United States Patent Application Publication US 2018/0126003 A1 - sequence listing, part 9

SEQ ID NO: 11159 - DNA, 2580 bp, Artificial Sequence
  derived and/or modified sequence
atgggaccatggggctggaagctgcgctggaccgtcgcactcctcctggcagcggcaggtaccgcggtcggcgatcgatgtgaacgaaacgaatttcagtgccaagatggcaagtgtatatcatataagtgggtgtgtgatggttcggctgaatgtcaggacggaagcgatgaatcgcaagaaacgtgtctctcggtgacctgtaagtccggcgacttcagctgtggtggaagagtcaacaggtgcatcccccagttctggaggtgtgatgggcaagtggactgcgataatggcagcgacgaacaagggtgtcctccaaaaacctgctcccaggacgaatttaggtgtcatgatggcaaatgtatatcacgtcaatttgtgtgcgactcggaccgagattgcctcgatggatccgatgaagcctcctgtcctgtgctcacctgtggccctgcatcgtttcaatgcaattcatcaacttgtattccccaactgtgggcctgtgataatgacccagattgtgaagatgggtccgacgagtggcctcaacggtgtcgggggctgtacgtgtttcaaggggactcgtcaccctgtagcgcattcgaatttcattgcctttccggtgagtgtatccatagcagctggcggtgtgacggtggaccagactgtaaggataagagcgacgaagaaaactgtgcagtggccacttgtcgcccagacgaattccaatgcagcgatggaaattgcatccatggtagccgccagtgcgatcgcgaatacgattgtaaggatatgtccgacgaagttggatgtgttaatgtcaccctctgcgaagggccaaacaaattcaagtgtcatagcggcgagtgcattaccctggacaaggtgtgtaatatggcaagagactgtagagactggtcggatgagccaatcaaggaatgtggcactaatgagtgtctcgataacaacggaggttgttcgcacgtgtgtaacgatctcaaaattgggtacgagtgtgactgtcctgatggatttcagctggtggcgcaaagaagatgtgaagatatcgatgagtgccaggatcccgatacctgcagccaattgtgcgtgaacctggaaggaggatacaaatgccaatgtgaagagggattccaactggaccctcacaccaaggcctgtaaagcagtcgggtcgattgcatacctgttctttaccaatcgccatgaagtgaggaagatgaccctggatcgatctgaatacacttcgctgattccgaatttgcgtaatgtggtcgcattggataccgaggtggcaagcaaccgaatctactggtcagatttgagtcagagaatgatttgctcgacccagctggatcgagcccatggagtctcctcatacgacactgtgatctcgagggatatccaagcaccagacggtctggcagtggattggatacactcgaacatttactggaccgacagcgtccttgggaccgtgtcagtggctgacactaagggagtcaagcggaaaactctgttccgggaaaacggctcgaagccccgagcaattgtggttgatcccgtccatggattcatgtactggactgactggggcacccccgccaagattaagaagggaggtcttaacggcgtggacatttactcgcttgtcacggagaatattcagtggcctaatggtataaccctggacttgctttccggccgcctttattgggtggattcaaagttgcatagcatctcttcgatagatgtcaacggaggaaaccgcaaaactatcctcgaagatgagaagaggcttgcgcatccattttccctggcagtgttcgaggacaaagtcttttggacggatatcatcaatgaagcgatattctccgcaaaccgacttaccggaagcgacgtcaacctgctcgcagaaaatctgctgagccctgaagatatggtcctgtttcataatctcactcaaccccgcggcgtgaattggtgtgaaaggaccaccctgtccaacggtggctgtcagtacctttgtctgcccgctccacagattaaccctcattcgcctaagtttacctgtgcatgcccagacggcatgctcctggcaagagatatgcgttcctgtctcaccgaagccgaagcagcagtcgcaacccaagaaacttcgactgtgaggctgaaggtatcctcgactgcagtgagaacccagcatactaccactcgcccagtgcctgatacgtcgagactgccaggtgcaactcctgggctgaccactgtggaaatcgtcaccatgtcacatcaggcacttggggatgtggccggccgtggaaacgaaaagaagccttcatcggtccgggctttgtcgattgtgctccctatcgtgctgctggtttttctttgtctcggagtctttctcctctggaagaactggcggctgaaaaacataaacagcattaactttgataaccctgtctaccaaaagactactgaggatgaagtgcatatctgtcataaccaggacggttactcttacccatccaggcaaatggtcagcctggaggatgatgtggcg

SEQ ID NO: 11160 - DNA, 2580 bp, Artificial Sequence
  derived and/or modified sequence
atgggaccttgggggtggaaactacgctggaccgttgcactgctgcttgctgctgctggaacagctgtgggagatcggtgcgagaggaatgagttccagtgtcaggacggcaagtgtattagctacaaatgggtgtgtgatgggtctgcagagtgccaggacgggtcggatgagagtcaggagacctgcctatctgtaacgtgcaaaagcggggacttttcttgcggcggaagagtcaaccgttgtattccacagttctggagatgcgacggccaggtcgactgcgataacggctctgacgagcagggctgcccccccaagacttgctcacaggatgagttcagatgtcatgacggaaagtgcatctcacgccagtttgtatgtgatagtgatagggattgcctggacggatctgacgaggcctcgtgcccggttcttacctgcggacctgcctcattccagtgtaattcatcaacttgtatcccacagctgtgggcttgtgacaatgaccctgactgcgaggacggaagtgatgagtggccacagcggtgtcggggtctctacgtatttcagggggatagctctccctgctccgccttcgagtttcactgtctctctggagagtgtatccactctagctggaggtgtgatggcggtcctgactgtaaggacaaatcagacgaggaaaactgtgctgtggcaacctgccgccctgacgagtttcaatgtagtgacgggaactgcattcacggctcccgccagtgtgaccgggagtatgactgtaaagacatgagcgacgaggtcggttgtgttaatgtcactctctgtgaaggcccgaacaagtttaagtgtcatagtggcgaatgcatcacgctagacaaggtgtgtaatatggccagagactgcagagactggtcagatgagccaattaaggagtgcgggaccaatgagtgccttgataacaatggggggtgctcacacgtgtgtaacgatcttaaaatcggttatgagtgcgattgtccagatggttttcagctcgtggcacagcgacgttgcgaggacatcgacgaatgccaggaccccgatacatgttctcagctgtgcgtgaatcttgaaggcggttataaatgtcagtgtgaagagggctttcagctcgacccacataccaaagcctgcaaggccgttggctcaatagcctacctctttttcacaaacaggcatgaagtgaggaagatgacgctggacaggagtgagtacacgagtctgatacccaatctgcggaatgtggttgcactggatacagaggtggcgagcaaccgaatctactggagcgatttgtcacaacggatgatctgctccacccagctcgaccgagcacacggtgtgagctcttacgatacagtcatcagtcgggatatccaggctcctgatggactggcagtcgactggatacattcaaatatctactggaccgactccgtcttggggaccgtgtctgtcgcagacacaaagggcgtgaaacgcaaaaccctttttagggaaaacggctcaaagccccgagcaattgtcgttgatcccgtccatggtttcatgtactggactgattggggtacaccggcaaagataaaaaaggggggactcaacggagtcgatatttattctctggttaccgagaatatacaatggcccaatggcattacactggatctcttaagtggccggctgtactgggtggactctaaattgcacagcattagctctatagacgtgaatgggggcaaccgtaagaccattcttgaggatgagaaaagactggcccacccattttctctagccgtcttcgaggacaaagtcttttggacagatattattaatgaggccattttttctgccaacaggctgactggctccgacgtgaacctccttgctgaaaatctattgagtccggaggatatggtcctgtttcacaacctgacacagccacgtggcgtgaactggtgtgaaagaacgacccttagtaatggcggctgtcaatatctttgtcttccagctccacagatcaatccacactctcctaagttcacctgcgcatgtcctgatggcatgctgctcgcccgcgacatgaggagctgtttgacggaagccgaagcagctgttgcaacccaggagacatccacggtccggctgaaggtaagcagcactgccgtaagaacgcagcacacgaccacacggcccgtgcccgatacgagccggctccctggcgcaactccgggactgactactgttgagatcgttaccatgagtcaccaggctctgggagacgtggctggcagaggtaacgaaaaaaaacccagctctgtgcgcgccctcagtatcgtgttacccatcgtgctcctggttttcctgtgcttaggggtcttcctattatggaagaactggcggctgaagaacatcaacagtatcaacttcgacaatcccgtttatcagaagaccactgaagatgaggtacatatatgccacaatcaggatggatactcctacccttctcgtcagatggtaagtctagaggacgatgtggcc

SEQ ID NO: 11161 - DNA, 2580 bp, Artificial Sequence
  derived and/or modified sequence
atgggtccatgggggtggaagctgcgctggactgtagccttactcctagcagcagcagggaccgcggtgggagaccggtgcgagcgcaatgagttccaatgccaagatggtaagtgcatcagttacaaatgggtgtgtgatggttcagccgaatgccaggacggcagtgatgagtctcaagaaacatgcctgtccgtgacatgtaagtcgggggacttcagttgcggcggccgcgtaaaccggtgcattccccaattctggagatgcgacgggcaggtggactgcgacaacggcagcgacgaacagggctgcccacccaagacctgttctcaggatgaattcaggtgtcatgacggcaaatgtattagtcgacaattcgtctgtgactcagatagggattgcctggatggatcagatgaagcatcctgccctgtgctcacatgcggaccagcatctttccaatgtaattcctccacctgcatcccccagctgtgggcgtgcgacaatgaccccgattgcgaggatggcagcgatgagtggccccaacgatgcagaggactgtacgtttttcagggggactccagcccatgcagtgccttcgaattccactgtctgagcggtgaatgcatacattctagctggcggtgcgatgggggtcctgattgcaaggacaaatctgatgaggaaaactgcgcagtagctacctgtcggcctgatgagtttcagtgcagtgatggaaactgcatacatggttctaggcagtgtgatcgcgagtacgattgcaaagatatgtctgatgaggtgggctgcgtgaatgtgacactgtgcgagggtccaaacaagtttaagtgtcatagtggagagtgtataactctcgataaagtgtgcaatatggccagggattgccgcgattggtctgatgagcctatcaaagagtgtggaactaacgagtgtttggacaacaacggtggttgcagtcacgtctgtaacgatttaaaaatcgggtacgaatgtgattgtccagatggcttccagctagttgcccaacgccggtgcgaggacatcgatgagtgtcaagatcctgacacctgttcccagctttgtgttaacttggaaggaggatacaagtgtcagtgtgaagaaggattccaattggacccccacactaaggcctgtaaagccgtcggcagcatcgcatatttgttctttaccaacaggcatgaagtgagaaaaatgactttggatcgctctgagtatacctccttgatacctaacttacggaatgtggtggccttggatacagaagtcgcttctaaccgcatttactggagcgacctcagccagcggatgatttgcagcactcaactggaccgggcgcatggtgtctcctcatatgatacagtgatttcccgcgacattcaggcccccgacggcctggctgttgattggattcactccaacatctattggacagacagcgtgttgggcactgtgtccgttgccgacaccaagggagtcaaaagaaagaccctgttcagggagaatggatctaaaccccgcgccattgttgtagaccccgtccacggtttcatgtactggacagattggggtaccccagccaaaattaagaaaggggggttaaacggtgtggacatttacagcctggtgaccgagaatattcagtggcctaacggcattactcttgatctcctgtctggccgcctctattgggttgattctaaactgcatagtatctcctcaatcgatgtcaatgggggaaaccgcaaaactatccttgaggacgagaaaaggctagctcaccctttctcactggctgtattcgaagataaagtgttttggactgatatcataaatgaagcgattttttccgccaacaggctgacaggaagcgatgttaatcttcttgcggagaatttgctaagccccgaagatatggtgttgtttcataacttaacccagccccgaggtgtcaactggtgcgagaggaccactctttccaatggtggatgtcagtacttgtgtctgccggcgccccagataaatccgcactcacctaagtttacatgtgcgtgccccgacggaatgctgcttgctagagatatgcgatcctgcttaacagaagccgaggccgctgtggccacccaggagaccagtactgtgaggcttaaggtgtcttccaccgccgtacgcacacaacacacaacgactaggccagtgcccgacacgagtagactccctggcgccacaccgggattgaccactgtggagatcgtgaccatgtcacatcaagcacttggagatgtcgcggggcgaggaaacgaaaagaaaccttcatcagtgagagcactgagcattgtcctgcccatcgtactactggtgtttttatgcctgggggtgttcttgctgtggaaaaattggcgcctgaagaatatcaacagcatcaactttgataaccccgtatatcagaaaactaccgaggatgaggtgcacatatgtcataaccaggatggctattcctacccctcccgccagatggtctccttggaggacgatgtcgca

SEQ ID NO: 11162 - DNA, 2580 bp, Artificial Sequence
  derived and/or modified sequence
atggggccatgggggtggaaactgcggtggacagttgcgcttctactagctgcggcagggaccgccgttggggatagatgtgagcggaatgagttccagtgccaggatggtaaatgtattagttataagtgggtctgcgatggttcagccgaatgccaggatggtagtgatgaatcccaggagacatgtctcagcgttacatgtaaatccggagatttcagctgcggagggcgggtgaatcgctgtatccctcaattctggaggtgtgatggacaggtcgattgcgacaacggatctgacgaacagggatgcccaccaaagacctgtagtcaagacgaattccggtgccacgacggcaagtgtatctcccggcagttcgtctgtgacagcgatcgggactgcttggacgggtcggatgaagcctcatgccccgtgctgacatgcggcccagcttcctttcagtgtaattcctccacatgtatcccacaattatgggcgtgcgacaacgaccctgattgcgaggacgggtcggatgaatggccccagagatgccggggcctgtacgtgttccagggtgacagcagtccctgctcagccttcgaattccactgtcttagcggcgaatgtattcactcttcctggagatgtgacgggggcccagactgtaaggataagtccgatgaggaaaactgcgccgtggccacctgtcgtcccgacgagttccaatgctccgatggaaactgcatacacggctctagacagtgtgatcgcgaatatgattgcaaggacatgagcgacgaagtgggctgtgtcaatgtgacactctgcgagggccctaacaagtttaaatgccacagcggtgagtgtatcaccctggataaggtctgcaacatggctagagattgccgagactggtctgacgagcctatcaaagaatgcggaaccaacgaatgcctggacaataatgggggatgctcccatgtgtgtaacgacctgaagatagggtacgagtgtgattgccctgatggattccagctggttgcacaaagaagatgtgaggatatcgatgagtgccaggatccagacacctgttcccagctatgcgtgaacctcgagggaggttataagtgccagtgcgaagaaggcttccagctcgacccccatacgaaggcatgcaaagcggtgggcagtatagcttatttgttttttactaataggcacgaggttcgaaaaatgacactggatcgatctgagtatacctcgcttattcctaacctacgcaatgtcgtggctctggacaccgaggtagcttctaaccggatctattggtccgacctatcccagcggatgatctgctccactcagctggatcgcgcacacggtgtctcctcatacgacaccgtgatttctcgggacatacaggccccggacggcttggctgtcgactggatacactcaaacatctactggactgattcagtccttggtacggtgtcagtggcagatacaaagggggtgaagcggaagacactgtttcgggagaatggctccaaacctagagcgatcgtggtggatcccgtccacggcttcatgtactggacggactggggcacaccagcaaaaattaaaaagggtggcctcaacggcgtggacatttactctttggttacggagaacattcagtggcctaatggtatcaccctggacctccttagtggacgcctctactgggtggacagcaagcttcactctattagctccatcgacgtgaatggcggcaacaggaaaactattctggaagatgagaagcgtttggcgcacccctttagcctggctgtgtttgaggataaggtattctggacggatattattaacgaggccatctttagtgcaaaccgcttgacagggagtgacgtgaatcttctggctgaaaacctgctgtcccccgaggatatggtcctgttccacaacttgacacagccaaggggcgtcaattggtgtgaaagaacaacactgagcaatggtggctgtcagtatctgtgcctcccagcgccacaaattaacccacactcacccaaattcacctgcgcctgccccgatggtatgctcctcgcgcgggatatgaggtcatgtctcacagaggcggaagccgcagtggccacacaagaaacctcaactgtgagactgaaggtatcctctacagcagtccgaacacagcacaccacgaccaggccagtgcctgacacttcacggctgcctggagctacccctggcttaactacagtcgaaattgtaaccatgtcacaccaggcgcttggcgacgtcgcggggagaggcaatgagaagaagccctcaagcgtaagagccctcagcatcgtcttgccgatcgtcctgctggtcttcctgtgcctgggagtgtttctcttgtggaagaactggagactaaagaatataaattcaatcaatttcgacaaccctgtgtaccagaagaccacggaggatgaagtgcatatttgccacaaccaggacggatatagttacccaagcagacagatggtgtccctggaagatgacgtcgcc

SEQ ID NO: 11163 - DNA, 2580 bp, Artificial Sequence
  derived and/or modified sequence
atgggaccctggggttggaaacttaggtggaccgtcgcactgcttcttgccgcagccggaactgctgtgggtgatcgctgtgaaaggaacgaatttcagtgtcaagatggcaagtgtatctcctacaagtgggtgtgtgatggatccgcagagtgtcaggatggatcagatgaatcccaagaaacttgcctctccgtgacttgtaagtcgggggactttagctgcggtggtcgagtcaatcgatgcatccctcaattctggagatgtgatggacaggtggattgcgataacggatcggacgaacagggatgcccaccaaagacctgtagccaagatgaattcagatgtcatgacgggaagtgtattagccgacaatttgtgtgtgacagcgaccgggattgccttgacggctcagacgaggcctcttgcccagtgctgacttgcggaccggcctcgttccagtgcaactcgtccacctgtattcctcagctttgggcgtgcgacaacgatcctgattgcgaggacggatccgatgagtggccccaacgttgtagagggctctacgtgtttcagggagactcatccccatgctctgcctttgaattccattgtctttccggcgaatgcatccattcctcgtggcgctgcgatgggggacctgattgcaaggataagtcggacgaagaaaactgcgcagtcgcaacgtgccgcccagatgaattccagtgttcagacggtaattgtattcacggctcaaggcaatgcgaccgcgaatacgactgtaaggatatgtccgacgaagtcggttgtgtgaacgttaccctgtgcgagggtcccaacaagtttaagtgccattcgggagagtgtataacccttgataaggtgtgcaacatggcacgggactgtcgggattggtccgatgaacctatcaaagaatgtgggaccaacgagtgtctggacaacaacgggggctgctcgcacgtgtgtaacgatttgaaaattgggtacgaatgcgattgtcctgatggttttcaactcgtcgcacagaggcgctgtgaggacatcgatgagtgtcaggaccccgacacttgctcccaactttgtgtgaatctggaaggtggatacaagtgtcaatgtgaagagggctttcagctggacccacatactaaagcatgcaaagcagtgggttcgattgcatacctgttctttaccaatagacatgaagtccgaaagatgaccttggaccggtcggagtacaccagcctgattccgaatctgagaaatgtggtcgcactggataccgaagtcgcatcaaaccgcatatactggagcgatttgtcgcagaggatgatttgtagcactcagctggacagagcacatggcgtttcgtcatacgataccgtcatttcgagggacatacaggcgcccgatggtcttgccgtggattggattcactcgaatatctactggaccgatagcgtgctgggcacggtgagcgtcgcagacaccaagggtgtcaagcggaaaaccctctttcgcgaaaatggttcaaaaccaagagccatcgtggtggatccagtgcatggatttatgtactggactgattggggaactccagcaaagataaagaaaggtgggctgaatggagttgatatctattcgttggtgaccgagaatatacaatggcctaatggaatcaccctggacctgttgtcaggacggctgtattgggtggattccaagctgcattcgatttcgtccatagatgtgaatggcggtaacaggaaaaccattcttgaagatgaaaagagacttgcgcatcccttttccctcgcagtgttcgaagataaggtgttctggaccgacattatcaatgaggcaatcttttccgcaaaccggctgaccggttcggacgtgaatctgcttgcggaaaacctgttgtcgcccgaggacatggtcctgtttcataacctgacccagccacggggagtgaactggtgcgaacgcactactctttcgaacggaggatgccaatacctctgtctccctgcacctcagattaaccctcatagccctaaattcacttgtgcatgcccagacggtatgctgcttgcaagagatatgagatcgtgcctgacggaggcagaagcagcggttgcaacccaagagacttctactgtgcgactgaaagtcagcagcaccgccgtgcgcacccaacacacgaccacccgccctgtgccggatacctcccgtttgccgggcgcgaccccagggcttaccaccgtggaaattgttaccatgtcacaccaggcgcttggcgatgtcgcgggccggggaaatgagaagaagccttcctcggtgcgcgcgctgtcgattgtccttcccattgtgttgctcgtgtttctttgcctcggagtctttctcctttggaagaactggcggctgaaaaacattaactccatcaactttgacaacccagtctaccaaaaaaccacggaggacgaagtccacatatgtcacaaccaagatggttactcgtacccttcccggcaaatggtttcacttgaagatgatgtggcc

SEQ ID NO: 11164 - DNA, 2580 bp, Artificial Sequence
  derived and/or modified sequence
atgggtccgtggggctggaagctgcgttggactgtggctcttctcctggctgccgccggaacggcggttggcgaccgctgcgaaagaaacgaattccagtgccaagacggcaagtgtataagctacaagtgggtgtgcgacggatcggccgaatgtcaggatggatcagacgagtcccaggagacttgcctgagcgtgacctgcaagtccggagacttctcatgcgggggacgggtcaatcggtgcatcccacagttttggagatgcgacggtcaggtggactgcgataatggaagcgacgaacagggctgtcctccaaagacttgttcgcaggacgagtttcggtgtcatgatggaaagtgtattagccggcaattcgtgtgcgattcagacagagattgcctcgacggatccgatgaagcctcctgccccgtgctgacctgcggacctgcgtcgttccagtgcaattcgtcgacctgcatccctcaattgtgggcctgtgacaatgatccggactgcgaagatggctcggatgaatggccacaacggtgccggggcctttacgtgttccaaggggactcatccccgtgctcggcgttcgaattccactgcttgtccggcgaatgcatccactcatcgtggagatgcgatggaggaccggactgtaaggataagtccgacgaggaaaactgcgccgtggcgacttgtagaccggatgagttccagtgttccgatggcaattgcatccacggatcgaggcagtgcgaccgggaatacgattgcaaagacatgtcagatgaagtgggatgtgtgaatgtcactctttgcgaaggccctaacaaattcaaatgccactctggggaatgcatcaccctcgacaaggtgtgcaatatggcgcgggattgcagagattggagcgacgagcctatcaaggaatgtggcactaacgagtgtctcgacaataatggagggtgcagccacgtgtgcaacgacttgaagatcggatacgagtgtgattgcccggacggatttcaactggtcgcccagcgccggtgtgaggatattgatgagtgccaagacccagatacctgctcgcaactgtgcgtgaatctggagggtggatacaagtgccaatgcgaggagggcttccagcttgatccgcacactaaggcgtgcaaagccgtgggatccatagcgtacctgtttttcaccaaccgccacgaagtccgcaagatgaccttggacagatccgaatacacttcactcatcccaaacctgcgaaacgtggtcgccctggacactgaagtggcatcgaacagaatctactggagcgacctgagccaacgcatgatctgctcaactcagcttgatcgcgctcacggcgtgtcaagctacgacaccgtgatctccagagacatccaagcgccggatggactggctgtggactggatccacagtaacatctactggacggattcagtgctgggaactgtctcggtggcagacaccaagggagtgaagcgcaagactctgttccgcgaaaatggctccaagccaagagccattgtggtcgacccagtccatggattcatgtactggaccgactggggaaccccagccaagatcaagaaggggggcctgaatggcgtcgacatttactcactcgtcaccgaaaacatccaatggcctaacggaataaccttggatttgctgagcgggcgcctgtattgggtcgactcgaaactgcattcgatctcgagcatcgatgtgaacggaggaaaccgcaaaaccatcctggaagatgaaaagcgactggcgcatccgttttcgctggccgtgttcgaggacaaagtgttctggaccgacatcatcaacgaggccatcttctccgcgaaccgcctcaccggctcggacgtgaacctcctggcggaaaacttgctctcacccgaagatatggtgctctttcacaacctgactcagccacggggagtgaattggtgcgagcgcaccactttgtcgaacggaggctgtcaatacctttgtttgccagccccgcaaatcaatccgcacagccccaagttcacttgcgcatgcccagacggtatgctcctggcacgcgatatgcgctcctgcttgactgaagccgaagcagccgtggctacccaggaaaccagcaccgtgcgcctcaaggtgtcaagcactgcagttagaactcaacacactaccacgcgccccgtcccggacactagccgtctcccaggcgcgactccgggcctgacgaccgtggaaatcgtgaccatgtcgcatcaggctctcggtgacgtggccgggaggggaaatgaaaagaagccctcgtcggtgcgcgccctgtccatcgtgctcccgattgtcctgctcgtgtttctgtgcttgggcgtgttcctgctgtggaaaaactggcggctgaagaacatcaactcgatcaactttgacaatccggtgtaccagaaaactactgaggacgaggtgcatatctgccacaaccaagacggttactcgtacccgtcgcggcaaatggtgtcgttggaggacgacgtggct

SEQ ID NO: 11165 - DNA, 2580 bp, Artificial Sequence
  derived and/or modified sequence
atggggccctggggatggaaactgagatggactgtggccctgctgctcgcggctgctggcactgccgtgggcgacagatgcgagaggaatgagtttcaatgccaggacggcaagtgtattagctacaagtgggtctgtgatggcagtgccgagtgccaggatggctccgatgaatcccaggaaacgtgtttgtctgttacgtgtaaatcaggggacttcagctgtggaggacgagtgaatcgctgcatcccccagttttggcggtgtgacggccaggtcgactgtgacaatggaagcgatgagcaagggtgtccacccaagacctgcagccaggatgagtttagatgtcacgacgggaagtgtatttcaaggcagttcgtgtgtgactccgacagggattgcttggacggtagcgatgaagcatcctgcccagtactgacatgtggacctgcatcatttcaatgtaactctagtacctgcattcctcaactgtgggcctgtgacaacgacccggattgtgaggacggtagcgatgaatggccacagcgatgtcggggactgtatgtgttccagggtgactcctcaccctgttccgcttttgaatttcactgcctgagtggggagtgcatccacagttcctggcgctgtgacggcgggccagactgtaaggataagtctgatgaagaaaactgtgccgtggcaacctgcaggccagatgagttccagtgttctgacggtaactgcatccatggcagtaggcaatgcgaccgggaatacgattgcaaggacatgtccgacgaagtgggttgcgtcaacgtgacattgtgtgaggggccaaacaagtttaaatgccactccggcgagtgcataacccttgacaaggtatgtaatatggccagagactgcagggattggagcgatgaacccatcaaagaatgtgggacaaacgagtgtctggataataatggtggttgcagccacgtgtgtaatgacctcaaaatcggctacgagtgcgactgccccgacggattccagctggtggcccaaaggcgctgtgaggacatcgacgagtgtcaggacccagatacctgctcccagctgtgcgtgaaccttgagggaggctataaatgtcagtgcgaagaaggcttccagctggatccccacacaaaagcctgcaaggccgttgggtctatagcgtacttgttctttaccaatcggcacgaagtgaggaagatgacccttgaccgctctgagtatacctcactgattcccaacctccggaatgtcgtggctctggacacagaagtggctagcaatagaatctactggtcagacctgagccagcggatgatctgctcaacccagcttgacagggcccacggcgtttcaagctacgatacggtgatcagtagagacattcaggcacccgacggtctggccgtagactggatccattctaatatctattggactgatagtgtcttgggcacggtatccgtggccgacaccaagggtgttaaaaggaaaaccttgttccgagagaatgggtctaagccccgagcaatcgtggtcgacccggtgcacggttttatgtactggactgactggggaacgcccgccaagattaagaaaggtggcctgaatggtgtggacatttacagcctggtaactgaaaatatccagtggccgaacggcatcacccttgacctgcttagcgggagactctactgggtggactcaaagctgcacagcataagtagcatagatgtgaatggaggtaatcgaaaaaccatactcgaagacgagaaaagactggcccatcccttttccctggcagtgtttgaagataaagtattctggacagatattattaacgaggccatttttagtgccaataggctgaccggttccgacgtaaatctgctggcagagaatcttttgtctccagaggacatggtgttgtttcataatttgactcagccgcggggcgtaaactggtgcgaacggactaccttgagtaatggaggatgtcagtatctgtgcctgccggccccacagatcaaccctcatagccccaagttcacctgtgcctgtcccgatgggatgctgcttgcccgggatatgcgcagctgcttgactgaagcggaagccgctgtagctactcaggaaacctcaaccgtgaggcttaaggttagttccactgctgtgcgcacacaacacacaactacgcgccccgtgccagatacttctcgcttgccaggtgctacccctggactcaccacagtggagattgtgaccatgtcccaccaggccctcggagacgtcgctggtcgcggcaacgagaagaaaccatcctccgttcgggctctctcaattgttctgccaattgtgctgcttgttttcctgtgcctgggcgtattcctgctgtggaaaaattggcgcctgaaaaatatcaactccatcaatttcgataaccccgtataccagaaaacaacagaggatgaagttcacatatgtcataaccaagacggctacagctatccatccaggcagatggttagtttggaggacgatgtggcc

SEQ ID NO: 11166 - DNA, 2580 bp, Artificial Sequence
  derived and/or modified sequence
atgggaccctggggctggaagcttcggtggacagttgccctcttgctggcggcggccgggaccgcagtgggagaccggtgcgagcgcaacgaatttcagtgccaggacggtaagtgtatctcatacaagtgggtctgcgacgggtccgcagagtgtcaagacggctcagatgaaagtcaggagacttgtctttctgttacctgtaagtctggcgacttttcttgcggagggagggtgaacaggtgcatccctcagttctggaggtgcgatggtcaggtcgattgtgataacgggtcggacgagcaggggtgcccaccaaagacgtgttctcaggatgagtttcgctgccacgatggtaagtgcatttcacggcaattcgtttgcgatagtgatagagactgcctcgatggaagtgatgaggcttcttgtcctgtgctgacatgtggccctgcctcttttcagtgcaatagcagcacctgcatccctcagctgtgggcgtgcgataacgacccagattgtgaagatggaagcgatgaatggccccagaggtgtcggggtctctatgtattccagggggattcctccccttgttcagcttttgagtttcactgcctttccggggagtgcatccacagttcctggaggtgcgatggtgggccagactgcaaggacaaaagtgacgaggagaactgtgccgtggcaacatgtcggccagatgagttccagtgctccgacgggaactgtatccacggctctcgccagtgcgatagagaatatgactgtaaggatatgtccgatgaagtgggctgcgtcaatgtgaccctgtgtgaggggccgaataaatttaagtgtcatagtggcgaatgtattacgctggacaaggtctgtaatatggccagagattgccgtgactggtcggacgagccaataaaggagtgtgggacaaacgaatgccttgataacaacggtggatgctcgcacgtctgtaacgatctgaaaattgggtatgagtgcgactgccctgacgggtttcagttggtggctcagcggcgctgcgaggacattgatgaatgccaggacccagacacatgttctcagctgtgtgtgaatctggaaggaggatacaagtgccagtgtgaagagggcttccaactcgatccccacactaaggcttgtaaggccgttggcagtatagcgtacctctttttcacaaatcggcatgaagtgcgtaaaatgacgctggacagatcggagtatacatcgttgattccaaacctccgtaatgttgtggcactggatactgaggttgcatccaaccgcatatactggtctgatttgagccagaggatgatttgttcgacccaattggatcgcgcacacggagtgtcatcgtacgataccgtcatctcaagggatatccaagcacccgatggccttgctgtcgattggatccactccaacatctactggacagattctgtgcttggtacagtgagcgtggccgacaccaaaggagtcaagagaaaaaccctgttccgcgagaacggatcaaagcccagggcaattgtcgtcgatccagtgcatggtttcatgtactggaccgattgggggacccccgcgaaaatcaaaaagggaggactgaacggcgttgacatctacagcctagtgacggaaaacatacagtggccaaatgggatcaccctcgatcttctaagtgggcgtctgtactgggtcgatagtaagctgcattccatctcatctatcgacgttaatggaggcaacaggaagacgattctggaagatgagaaaaggctggcccatccattttctctggccgtgttcgaagataaggtattttggacggacattattaacgaagcgatcttttcggcgaatcggcttacagggtccgatgttaaccttttggccgaaaatctgctgtctcccgaggacatggtgcttttccataacctgactcagccccgaggagtgaactggtgtgaaaggactacattgtccaatggaggctgccaatacctctgtctgccagccccacagataaatccgcacagccctaagttcacttgtgcctgccccgacggtatgctgcttgctagggacatgagaagttgtttaaccgaagctgaggctgcagtggccacacaagagacctcaaccgtgagactcaaagtctcttccaccgcagtgaggacacagcatactaccactcgtccggtgcccgacaccagccgcctccctggcgcgactcccggtctgacaactgtggagattgttaccatgtctcaccaggccctgggggatgtagcgggtcgagggaacgagaagaaaccatcttcagtccgagcactatcaatcgtcctgccaatcgtcctgttggtatttctgtgcctgggagtgtttttattgtggaaaaactggagacttaagaatattaatagcatcaacttcgacaatccggtttaccagaaaacaaccgaggatgaggtccacatttgccacaaccaggatggctactcctacccatcgcggcaaatggtgtcgctggaggacgatgtagcg

SEQ ID NO: 11167 - DNA, 2580 bp, Artificial Sequence
  derived and/or modified sequence
atgggaccatggggatggaagctgcggtggactgtggcacttctccttgctgccgcaggcaccgcggtcggtgatcgctgcgagaggaacgagttccaatgccaggatggcaagtgtattagctataagtgggtgtgtgacggttccgcagaatgccaggacggcagcgatgaaagccaagaaacctgtctgagcgtcacttgtaagtcaggtgattttagctgtggaggacgcgtaaatcgctgcatcccacaattttggcggtgcgatggccaagtggactgtgataacggatcggacgaacaaggatgcccacctaagacctgttcccaggacgagtttcgatgccatgatggtaagtgtatttcgagacagtttgtgtgcgatagcgatcgcgattgtcttgatggttccgatgaagcgtcgtgcccagtgcttacgtgtggacctgcctcgtttcagtgtaatagctcaacctgtatccctcaactttgggcctgtgacaatgatcctgattgtgaggacggttcagacgaatggccccagaggtgcagaggactttacgtgttccaaggtgattcctccccctgttcagcattcgaattccactgtctgagcggggagtgcatccacagctcctggcgttgtgatggaggccctgattgcaaggataagtccgatgaggagaactgcgcggtcgcaacctgtagacctgatgaattccagtgttcggatggcaattgtattcatgggtctaggcaatgcgacagagagtacgattgtaaggatatgtcagatgaggtgggttgtgtgaatgttactctgtgcgaagggccaaataagttcaagtgtcattctggtgagtgtatcacgctggacaaggtgtgcaacatggctcgggattgccgcgactggagcgacgaaccaatcaaagagtgcggtaccaatgaatgcctggataacaacggtggatgttcccatgtgtgcaacgatcttaagattggatacgaatgtgactgtcctgacggatttcaattggtcgcacagcggcggtgtgaagatatcgatgagtgtcaggatccggacacttgttcacaactttgtgtgaacctggaagggggatacaaatgccaatgtgaagaaggatttcaactggaccctcacactaaggcctgcaaggcggtgggaagcatcgcttatctgtttttcaccaacagacatgaggtgagaaaaatgactcttgataggtccgagtacacttccctcatccccaacctgagaaatgtggtagcactggacaccgaagtggcttcaaacagaatttactggtccgacctctcccagaggatgatctgctctactcaacttgatcgggcacacggagtctcttcgtacgatactgtgatctcccgggacattcaggcaccggacggtcttgccgttgattggatacattccaacatctattggactgattccgtgctggggactgtgagtgtggctgataccaaaggagtgaagcgcaagactctgtttagggaaaatggctcgaaaccacgcgcaatcgtggtggatccagtgcacggttttatgtactggactgattgggggactcctgcgaagataaagaaaggtggcctgaacggtgtggacatatactcacttgtgaccgagaacatccagtggccgaacggaataactcttgaccttctcagcggacgactttactgggtggactcgaaacttcattcgatatcgtcgattgacgtgaatggaggaaatcgaaagaccattctggaagatgaaaaaagactcgcacacccgttttcgctcgctgtctttgaggacaaggtcttttggaccgatatcataaacgaagcgatattctctgcaaatagacttaccggatcggacgtcaacctccttgcagagaaccttctctccccagaggacatggtgctgtttcacaacctcacccagcccaggggggtgaactggtgtgagcggaccactttgtccaatggtggatgtcagtacctttgtctgcctgcaccacagatcaaccctcactcgccgaaattcacgtgcgcatgccccgatggtatgctccttgcacgtgacatgcgcagctgtcttaccgaggcggaggcagcagtggcgactcaagaaaccagcaccgtgaggttgaaggtgtccagcaccgcggtgaggactcagcataccacgactagaccagtcccagatacctcgagactcccgggcgcaacccctggacttactactgtggagattgtcactatgtcccaccaggccctgggcgacgtggcaggtcgcggtaacgagaaaaaaccatcgtcggtgcgagcactgtcaatcgtgcttccaattgtgctgctggtctttttgtgcctgggggtgtttcttctgtggaagaattggcggctgaagaacattaactcaattaactttgataacccggtctaccaaaagaccaccgaggatgaagtccacatttgtcataaccaagatggatactcgtacccctcacggcagatggtgtcactcgaggacgatgtcgca

SEQ ID NO: 11168 - DNA, 2580 bp, Artificial Sequence
  derived and/or modified sequence
atgggaccttgggggtggaagctgagatggactgttgctttgcttctcgcagcagccggcacagctgtcggcgacagatgtgaacgaaacgagttccaatgccaggatggaaagtgcatatcttacaagtgggtttgcgatggatctgcagagtgccaagacggctctgatgagtcccaggagacatgcctaagtgttacctgtaagagcggagacttcagttgcgggggcagagtgaacagatgtatccctcagttctggagatgcgatggacaggtggattgcgataatggcagcgatgaacagggttgtcccccaaagacctgttctcaggatgaatttcgatgccacgatgggaaatgtatcagcagacagttcgtgtgcgattccgacagagattgcctggatggcagcgatgaagcttcttgcccagtcttgacctgcggcccggcctcattccagtgtaactcatccacctgcatcccacagttatgggcttgcgataacgaccctgattgtgaagacgggagcgatgagtggccccagaggtgtagaggcttgtacgtcttccaaggtgactcatccccatgttctgctttcgaattccattgcctcagtggcgagtgcatacatagcagctggagatgcgatggaggacctgactgcaaggataagagtgatgaggagaattgcgcggtagcgacatgccgtcctgacgagttccagtgttcagatggaaactgtattcacggctctcgccaatgtgatagagagtatgattgcaaggacatgagcgatgaagttggctgcgttaacgtgacattatgtgaaggaccaaacaaatttaagtgtcacagcggagaatgcattacactggataaggtctgcaacatggcacgcgactgccgcgactggagtgacgagcctatcaaagaatgcggcactaatgagtgtctcgataacaacggggggtgtagccatgtgtgcaacgatctaaagataggctacgaatgcgactgcccagatggattccagctggttgcacagaggaggtgcgaagatatcgatgaatgccaggatcctgatacctgcagtcagctctgtgttaacttggagggtgggtataaatgtcaatgcgaagagggatttcagctcgacccccatacaaaggcctgcaaggctgtgggctctatcgcctacctgttcttcacaaataggcatgaggtgagaaagatgaccctcgacaggtccgagtacactagcttgataccaaacctgagaaacgttgtggcgcttgacacagaggtcgctagtaatcggatatactggagcgatctgtcacagaggatgatctgtagtacacagctcgatcgggcacacggagtcagtagctacgacacagtgataagccgcgatatccaagcacctgatggccttgcagtggattggatacatagcaacatctattggacagacagtgtgttggggaccgtcagcgtggccgatactaagggagtgaagaggaagacactgttccgtgaaaacggctcgaaaccgagggctatcgtggtcgatccagtacacgggtttatgtactggactgattggggcactcctgcaaaaatcaaaaaagggggactgaacggcgtggatatctacagcctggtcactgaaaacattcagtggccaaatggcatcacactagacctgttgagtggcagactttactgggtcgattccaagcttcacagtatctcttcaattgatgttaatggtggaaatcggaagaccatcctcgaagacgagaagcgactggcccacccctttagcctggccgtattcgaggataaagtcttctggaccgacatcataaacgaagcaattttttccgccaacagactcaccggatccgacgttaatttactagccgagaacctgctgtccccagaagacatggtgctattccataacctgacccagcctcggggggttaattggtgcgaacgcacaaccctcagcaacggcggatgccaatatttatgcctcccagctcctcagattaatccccacagccccaaattcacttgcgcgtgccctgatggaatgcttctggcaagagacatgcggagctgtctcacagaggccgaggctgctgttgctacccaagagacaagcaccgtccgattgaaagtttccagtaccgcggtccggacacaacacactactaccaggcctgtgcccgatacatctcggctgcctggggctacgccagggctaaccactgtcgagatagtcacaatgagccaccaggcattgggcgatgtggcaggccgcggcaatgagaagaaaccgagctccgtcagagcactcagtatcgtcctgcctattgtgctgttagtgttcctgtgtctgggagtcttccttttgtggaagaactggcgtctgaaaaacatcaacagtatcaattttgataacccagtctaccagaagaccacagaggacgaggtccatatttgccacaaccaagatgggtactcctatccgtcccggcagatggtgtctctggaggacgatgtggcc

SEQ ID NO: 11169 - DNA, 2580 bp, Artificial Sequence
  derived and/or modified sequence
atgggaccatggggttggaagctgagatggactgtggcgctccttctggcggccgccggtactgcagttggtgacagatgtgaacgcaacgaatttcaatgtcaagacggtaaatgcatttcctacaagtgggtgtgcgacggatcagcagaatgccaggatggttcagacgaatcccaagaaacctgcctgagcgtgacttgtaagtcgggagatttcagctgcggagggcgggtgaatcggtgtatcccccaattttggaggtgcgatggtcaagtggattgtgataatggatcagatgagcagggatgtccccctaagacctgttcacaggacgagtttaggtgtcacgacggaaaatgtatcagcagacaattcgtctgtgattcggatagagattgtctggatggctccgacgaagcatcatgcccagtgctcacgtgtggacctgcgtcgtttcagtgtaactcctctacttgtattccacaactttgggcatgtgataacgatccggattgtgaagatggcagcgatgaatggccacaaagatgccggggactgtatgtgtttcagggagattcgtccccttgttccgcctttgaatttcattgtctttcgggagaatgtattcattcgtcgtggcgatgcgacggtggccctgactgtaaggataagtctgatgaagagaactgtgccgtggcaacttgcagacctgacgagtttcaatgttccgatggaaattgcattcatggttcgagacaatgtgatagagagtacgattgtaaggacatgtcggatgaagtcgggtgtgtgaacgtgacgctgtgtgaaggcccaaacaagttcaaatgccatagcggcgaatgcatcaccctggataaggtttgcaatatggcaagggactgcagggactggtccgacgaacccatcaaggaatgcggaaccaatgagtgcctggacaacaacggtggatgttcgcatgtatgcaacgacctcaagattgggtacgaatgtgactgtcccgatggcttccaactggtggcacaaagaagatgcgaggatattgacgaatgtcaagacccagatacctgcagccaactttgtgtgaaccttgagggaggatacaagtgtcagtgtgaagaaggttttcaattggatccacacaccaaggcgtgcaaggcagtaggttcaattgcctacctgtttttcaccaatcggcatgaagtcaggaagatgacgctggatcggtcggagtatacctcccttatccctaaccttagaaacgtggtggcacttgataccgaggtggcctcaaacagaatatactggtcggatctgtcgcagcggatgatttgctccactcagcttgaccgggcacacggggtcagctcctacgatactgtcatttcaagggacatccaagcacctgacggtctggcagtggactggattcactccaacatttactggacggactcggtcttgggaactgttagtgttgccgatactaaaggggtgaagcgcaaaaccctgtttcgggaaaacgggagcaagccgcgcgccattgtcgtggaccctgtgcatggattcatgtactggaccgactgggggaccccagctaagatcaagaaagggggacttaatggagtggatatctacagccttgtgacggaaaacattcagtggcctaatgggattacccttgatctgctgtccggccgcctgtactgggtcgattcaaaactgcattcaatttcctcgatcgatgtaaatggtgggaataggaaaactattctggaggatgagaaaagacttgctcatccctttagcctggccgtgtttgaagataaggtattctggaccgatatcataaatgaagcaatcttcagcgccaaccgccttactggttcggacgttaatcttcttgctgaaaacctgctgagccctgaagatatggtgctcttccacaacctcacccagcctagaggtgtgaattggtgtgaaagaactaccttgagcaatggaggttgtcaatacctctgtctccccgctcctcagattaatccacattcaccgaaattcacttgtgcctgtccggacggcatgctccttgcgagagatatgagaagctgtttgactgaggccgaggcagctgtggcaacccaggaaacgagtactgtgagactgaaagtttccagcactgcagtgagaacccagcataccactacccgtcctgtccctgacacttccaggcttcctggcgcaaccccaggcctcaccaccgttgagattgtgaccatgtcgcaccaagcactcggtgatgtggctggccgcggcaacgaaaagaagccttctagcgtgcgtgccttgtcgattgtgctgcccattgtcctgctcgtgtttctgtgtcttggtgtgttccttttgtggaagaactggaggttgaaaaacataaactccatcaatttcgataaccctgtgtaccagaaaactacggaggacgaagtgcacatctgccataaccaggatggatacagctaccctagcagacagatggtcagccttgaggatgacgtggca

SEQ ID NO: 11170 - DNA, 2580 bp, Artificial Sequence
  derived and/or modified sequence
atggggccctggggttggaaactgcggtggactgttgcccttctgctagctgctgcaggcaccgccgtgggggacagatgcgaacgcaatgaatttcagtgccaggatgggaagtgcatatcctataaatgggtttgtgacggcagcgcagagtgccaggacggtagcgacgaatcacaagaaacctgcctgagtgtcacctgcaaaagcggggactttagttgtggcggacgtgtcaacaggtgcattccccagttctggcggtgcgacgggcaggtggactgcgataacggatctgatgagcagggatgtccccccaagacttgctctcaggatgagtttcggtgccatgacggcaaatgcatatccagacagttcgtgtgcgattctgatcgagattgtctggatgggtcggatgaggcctcctgccccgtgctgacgtgtggtccagcatccttccagtgcaactcttcgacatgtatcccacagctgtgggcgtgcgacaacgatcccgattgcgaggatggttctgacgagtggccccagcgttgtcggggcctctacgttttccaaggcgattcttccccgtgtagcgcattcgagtttcactgcctctctggggaatgcatccactccagttggagatgcgacggcggacctgattgcaaagacaagagcgacgaggagaattgcgcggtcgcaacctgtaggcctgatgagtttcaatgctcagacggaaattgtattcacggaagtcggcagtgtgaccgcgaatatgactgtaaagatatgtctgatgaggtagggtgtgtgaacgtaacactgtgcgagggacctaacaagttcaaatgccactcgggggaatgtatcaccttggacaaggtttgcaacatggctagggattgtcgggattggagtgacgagcccatcaaggagtgcggaacaaatgagtgcctggataacaacggtggatgcagtcatgtgtgcaatgacctgaagatcggctatgagtgcgattgtccggatgggtttcagctcgtggcccaacgacgttgcgaagacatagacgagtgtcaggatccagatacttgctcccaattatgtgtcaatctagagggaggctataagtgtcagtgcgaggagggcttccagctggaccctcatacgaaggcctgcaaagctgtcggatccattgcgtacctgttcttcaccaaccgtcacgaagtccgaaagatgactctcgataggagtgaatacaccagcctaattcctaacctgaggaatgtcgtggcactggacaccgaggtggcctcgaatcgcatttactggagcgacctgagtcaacgtatgatctgcagtacccaactggatagggcacatggagtttcatcatatgatactgttatctcgagagacattcaggcacccgacggcctggcggtggactggatccatagcaatatctactggacagacagtgtgctggggaccgtatcggtggccgacacaaaaggagtgaagcgtaaaaccctgttcagagaaaatgggagtaagcccagggccatcgttgtggaccctgtacacggcttcatgtactggacagattggggcacacccgcaaaaatcaaaaagggtggactcaatggcgtcgacatatactctttggtaaccgagaatatccagtggccaaatggcatcaccttggaccttttatctggccggctctattgggtggattctaaactgcattctatcagcagtatcgacgtaaatggaggcaatcgcaagactatcctcgaagatgaaaaacgactagcccatccattctcactggctgtgtttgaagacaaggttttttggactgatattattaatgaggccatcttcagtgccaaccgcctaaccgggagcgatgtgaatttgttggccgaaaatttactgtcccctgaggacatggttctctttcataatctgacccagcctaggggcgtgaactggtgtgagcgcacaacactaagcaacggagggtgtcagtatctctgcctgccagccccacagattaacccacatagtccaaagtttacctgcgcttgtcctgacggcatgctgctggcccgggatatgagatcatgtttgaccgaggctgaggctgcggtggcaacgcaagagacaagtaccgtacgtctgaaggtttctagcaccgccgtacggacacaacacaccactactaggcccgtccctgacacctcccgactgcctggtgctaccccgggacttactacggttgaaatagtcactatgtcgcaccaggcactgggcgacgttgccggccggggtaatgaaaagaaaccgtcatccgtgagggcactgtcgattgtgctgcctatcgttctactggtgttcctgtgtttgggggtgttcctgctatggaaaaattggcgcctgaaaaacattaactccatcaacttcgataatcctgtatatcaaaagaccaccgaagacgaagtacacatatgtcacaatcaggatggttacagctacccaagtcggcagatggtgtcactcgaagatgacgtggcc

SEQ ID NO: 11171 - DNA, 2580 bp, Artificial Sequence
  derived and/or modified sequence
atgggaccttgggggtggaagctgcggtggaccgtggcgctgctccttgccgccgcggggactgccgtcggggatcgctgcgaacgcaatgaattccagtgccaagatggaaagtgtatctcctacaagtgggtgtgcgacgggtccgccgaatgtcaggatggttcagacgagtcacaggaaacctgcctgtccgtgacttgtaagtcaggagatttctcgtgcggaggaagggtgaatagatgtatcccgcagttctggaggtgcgatggacaagtggattgcgacaacggatcggatgagcagggatgcccgccgaagacctgcagccaggatgaattcagatgccacgatggtaaatgcatttccagacaatttgtgtgtgacagcgacagggactgcctggacggatcagatgaggctagctgcccggtattgacctgtggacccgccagcttccagtgcaacagctccacctgcatacctcagctgtgggcgtgcgataatgacccagattgtgaagatggatcagatgaatggccgcaaaggtgccggggcctgtacgtgttccagggtgactcctccccctgcagcgcgttcgagttccactgcctgtcgggagaatgtatccactcctcctggcggtgcgatggaggcccagactgcaaggacaagagcgacgaagagaactgcgcagtcgctacctgtcgcccggacgagtttcagtgctcagacggcaattgcattcatggatctcggcagtgcgacagagaatacgactgtaaagacatgtcggacgaggtggggtgcgtgaacgtgactctctgtgagggacccaataagtttaaatgtcattcgggagagtgtattacccttgacaaggtgtgcaacatggcccgcgactgtcgggattggtcagatgagccaatcaaagagtgcggtaccaatgagtgtctggacaacaacggaggttgcagccacgtgtgcaatgatttgaagattggttacgaatgcgactgcccggacggtttccaacttgtggcacaacggagatgcgaggatatcgacgaatgccaagatccggatacttgctcccaactctgtgtgaacctcgaaggagggtataaatgccagtgtgaagaaggattccagctcgacccgcacaccaaggcctgcaaggcagtgggatccatcgcctacctgtttttcaccaaccggcatgaagtcagaaagatgacgctcgaccgcagcgagtacactagcctcattccaaatctccgcaatgtggtggcactggatacggaagtggcctctaacagaatctactggtctgatttgagccaacgcatgatctgcagcacccaactggatcgggcccatggcgtgtcttcgtacgacaccgtgatctcacgggatatccaggccccggacgggttggcagtcgattggatccacagcaacatctattggactgactccgtcctcgggactgtctcagtcgctgacactaaaggagtgaagagaaaaaccctgttccgcgaaaacggctcaaaaccaagagcgatcgtggtggacccggtccacggattcatgtactggaccgactggggaaccccggcgaaaatcaaaaagggaggactcaacggggtcgacatctactccttggtgaccgaaaacatccagtggccaaacggaataaccttggatctgctttccggtagactgtactgggttgacagcaagctccatagcatcagctcgatcgatgtcaacggaggtaatcgaaaaacgattttggaagacgaaaagcgcctcgctcaccccttttcgctggcggtgttcgaagataaagtcttttggactgacatcatcaacgaggcgattttctccgccaaccggctgacgggatcggacgtgaatctcctggccgagaatttgctcagcccggaagatatggtgcttttccataaccttacccaaccgcggggcgtgaactggtgtgagcgcacgactctttccaacggcggatgccagtacctttgcttgccagcccctcaaatcaatccgcattctcctaagtttacctgcgcctgcccagatggaatgctccttgcgcgcgatatgcggtcctgcctgaccgaagccgaggctgcagtggcgacccaggagactagcactgtgcgcctgaaagtctccagcaccgccgtcaggacccagcatactaccactcgcccggttccggacacctcgcggctgcccggagctacccctggactgaccactgtcgagatcgtcacgatgtcacatcaggcgttgggtgacgtggccgggcgcggcaacgagaagaagcccagctcagtgcgcgctctctcaatcgtgctcccgatcgttctgctggtgttcctgtgccttggagtgttccttctttggaagaactggcggctcaagaatatcaactcaatcaacttcgacaacccggtgtaccagaaaactaccgaggatgaggtgcatatctgccacaatcaggacggatactcctacccttcacgtcagatggtcagcctggaggacgatgtggcc

SEQ ID NO: 11172 - DNA, 2580 bp, Artificial Sequence
  derived and/or modified sequence
atgggaccatggggctggaagttgagatggactgtggccctccttctcgcagcagcggggacggcagtcggcgataggtgcgagcgtaacgagttccaatgccaggacggcaagtgcatctcatacaagtgggtctgtgacggtagcgcagagtgtcaagacggatcagacgaatcacaggaaacctgcttgtcggtgacctgtaagtccggggatttcagctgtgggggtcgggttaatcgatgcattcctcagttttggagatgcgatggacaagtggattgcgataatggatccgacgaacaagggtgtcctcctaaaacctgttcccaagacgagttccgctgtcatgatggtaagtgcatatcacgccaatttgtgtgcgattccgatagagattgtctcgatggctcggatgaagcaagctgtccagtgctcacctgcggacccgcatcgtttcagtgtaatagctcaacgtgcatcccgcagctctgggcctgtgataacgatcccgattgtgaagatggatcggacgaatggcctcagcgatgtcggggtctttacgtgtttcaaggagattcctcaccctgcagcgcttttgaattccactgcctctcgggggagtgcatccattcatcgtggagatgtgatggaggacctgattgtaaagacaagtcggatgaagaaaactgtgcggttgcaacctgcagacctgatgagtttcaatgctcggatgggaactgcatccatgggtcccgacaatgcgaccgggaatacgattgtaaagatatgtcggatgaggtgggttgtgtcaacgtgactctctgtgaaggccctaacaaattcaagtgtcatagcggcgaatgtatcaccctggataaggtctgtaatatggccagggattgtagggattggtccgatgaaccgattaaagaatgtggtaccaacgaatgccttgataacaatgggggctgtagccatgtgtgcaatgacctcaaaatcggatacgaatgtgattgccctgatggttttcaactggtggcacagcgtagatgtgaggacattgatgaatgtcaagatccagacacctgttcacaactgtgcgtgaatctggaaggggggtacaaatgtcaatgcgaggaaggattccaacttgatccgcatactaaggcctgcaaggcagtgggaagcattgcataccttttctttaccaatcgccacgaagtgcgaaaaatgaccctggatcggtcggaatacaccagcctcattcccaatctccggaatgttgtggccctggacactgaagtggcatccaatagaatatactggagcgatctttcacagcgcatgatttgttcaacccagttggaccgcgcacacggtgtgtccagctacgacacggtgatctcaagagatattcaagcgccagacggccttgccgttgactggattcacagcaacatttactggactgattccgtgcttgggactgtgagcgtggcagatactaagggggtcaagcggaaaactctgtttagagaaaacggctcaaagcctcgcgctatcgtggtggaccctgtccacggtttcatgtactggactgactggggtactccagcaaagataaagaaaggaggtcttaacggggtggacatttactccctcgtgacggaaaacattcagtggcctaacgggattaccctggatcttcttagcggacggctgtactgggtcgattctaaacttcactccatctcctcgattgatgtcaacggaggcaacaggaaaactattctcgaagatgaaaagaggcttgctcatccctttagcctggccgtttttgaagataaagtgttctggaccgacatcattaacgaggcaatcttcagcgcaaacagattgactggttcagatgtcaatcttctggcagaaaacctgctgtcccccgaagatatggtgctctttcataatcttactcagccccggggcgttaattggtgtgagcggaccaccctctccaatggtggatgtcagtacctttgtctcccagcaccacagattaatccgcactcgccaaagttcacctgtgcctgccccgatggcatgctcctggcacgcgacatgcgttcgtgtcttacggaagcggaagcggcagtggcgacccaggaaacttcgacggtccggctcaaggtgtctagcaccgcggtccgcacccaacataccactaccagacccgtgcctgacacttcacgacttcctggagcaactcctgggctcacgaccgtcgaaattgtgaccatgtcccatcaggccctcggtgacgtggctggaaggggcaatgaaaagaaaccttcgtcagtgcgagcactttcgattgtcctgcctatcgtgctgctggtgtttctttgtcttggtgtgttcctgctctggaaaaactggcggctcaagaacatcaactccattaacttcgataaccctgtctaccaaaagactacggaagatgaggtccatatatgtcataatcaggatgggtacagctatccctcacgacagatggtgagcctggaagatgacgttgcg

SEQ ID NO: 11173 - DNA, 2580 bp, Artificial Sequence
  derived and/or modified sequence
atgggcccttggggatggaaactgcgctggacagtggcactgctgttggccgcagccggaaccgccgtcggagaccggtgtgaaaggaacgaatttcagtgccaggatggcaagtgtatttcatataaatgggtctgcgatggttccgctgaatgccaggacggcagtgatgaaagtcaggagacttgtctgtccgtgacctgcaagagcggcgattttagttgcgggggccgtgttaatcgttgcattcctcagttttggagatgcgacggtcaggtagactgcgataacggttccgatgagcagggatgcccaccaaagacatgttcccaggatgaattccggtgtcatgacgggaaatgcatctctcgccagttcgtgtgtgattccgaccgcgactgccttgacgggtctgacgaagcctcttgccccgtacttacatgtggtcctgcctctttccagtgcaactcgtctacatgcattccccagctgtgggcatgtgacaatgacccagattgcgaagatggcagtgatgagtggccccagcgatgcaggggactgtacgtgtttcagggtgacagcagtccctgttccgcttttgaattccattgtcttagtggcgagtgcattcactcttcatggagatgcgacggcggtccagactgcaaggataagtctgatgaggagaactgtgccgtcgccacctgtcggcccgacgagttccagtgttcagacgggaactgcatccacggaagccgtcagtgtgatcgcgagtacgattgtaaggacatgtctgacgaagtcggttgcgtgaatgtcaccctctgcgagggacctaacaagtttaaatgtcactctggggagtgcatcaccctcgataaagtctgtaacatggcccgggattgtcgggattggtcagatgaaccaataaaggaatgcggaaccaatgaatgcttagataataacgggggctgcagtcacgtttgtaatgatttgaagattggttatgaatgtgactgccccgacggcttccagttggtggcccagcggcggtgtgaggacattgacgagtgccaagaccctgatacatgtagccagttatgcgtcaatctggagggtggctataagtgtcagtgcgaagagggctttcaactggacccgcatacaaaggcctgcaaggccgtgggcagtatcgcctatctattttttaccaatcgccacgaagtgaggaaaatgacacttgatcgctctgagtacacatctctcatccctaatctccgcaatgttgttgcgctggatactgaggtcgcctcaaatcggatttattggtctgatcttagccagaggatgatctgttctactcagctcgaccgagcccatggagtctcttcatacgatactgtcatatctagggatatccaggccccagatggtttggctgtagattggatccattccaacatctattggaccgacagcgtgttggggactgttagcgtggcagacacaaaaggcgtcaagcgaaagaccctcttcagagagaacggatctaaacctcgagccattgtcgtggaccccgtgcatggcttcatgtactggactgattgggggactcccgctaagatcaagaagggaggcttgaacggggtcgacatatatagcctcgtgactgagaatattcagtggcctaacggcatcaccctcgacctgctgtctgggcggctctattgggtggatagcaagttacattcaatctcaagcatcgatgtaaacggtggcaacaggaaaaccatcctggaagatgaaaagcggctggcacatcctttcagcctggccgtgtttgaggataaggttttctggactgacatcatcaacgaagccatcttttccgccaataggcttacaggatcggacgtcaacttgctggcagagaacttgctctcacctgaagatatggtgctgttccataacctaactcagcctcggggagtcaattggtgtgaaaggactactctgtctaatggaggatgccagtacctttgtttacctgcaccgcaaatcaatccccactcaccaaagttcacttgcgcctgtcctgatgggatgttgttggcccgagatatgagatcctgccttaccgaagctgaagctgctgtggccacacaagagaccagtactgttagactgaaggtgagttcaactgccgtacggacacagcacaccaccacccgacctgttcccgataccagtaggttgcctggcgctacacctggtctgacaacggtggagattgtgactatgtctcaccaggctttgggggatgtggctggacgtggtaatgaaaaaaaaccttcttccgttcgagccctgtccatcgttctgcctattgtgttactcgtgttcctgtgtcttggagtatttctgctgtggaagaattggcgcctcaagaatatcaattcaattaacttcgataacccagtgtaccagaaaacaaccgaggatgaggtgcacatctgccataaccaagatgggtattcatatcccagccgtcaaatggtaagcttagaggatgatgtggct

SEQ ID NO: 11174 - DNA, 2580 bp, Artificial Sequence
  derived and/or modified sequence
atggggccttggggctggaaactaagatggaccgtcgccctgctcctggctgctgcggggacagcagtgggagataggtgcgaacgaaacgagtttcagtgccaggacggtaagtgcatttcctataaatgggtttgtgatggatctgcagagtgccaggatggcagcgatgagagtcaagagacatgtctttccgtgacatgcaagagtggggacttctcctgcggagggagggttaatcggtgcattccccagttttggcgctgtgatggccaggtggactgtgacaatggatcggacgaacaagggtgcccacccaagacatgctcccaggacgaatttcggtgccacgatgggaaatgcattagtcgacagtttgtttgtgacagtgatcgtgattgcctggacgggtccgacgaagcctcttgccccgtattgacttgcgggccagcctctttccaatgcaacagctccacctgcatcccccagctttgggcttgtgataacgaccccgactgtgaagacggttcggatgaatggcctcaacgatgtcgagggctgtacgtcttccaaggggattcgtccccctgtagcgccttcgaattccattgtctctctggagaatgcattcatagttcctggaggtgcgatggggggcctgattgtaaggataaatcagacgaggagaactgtgccgtcgctacctgcaggccagacgaattccagtgttccgatggcaactgtatccacggaagtaggcaatgtgacagagagtatgattgcaaggatatgagcgacgaagtcgggtgtgtgaatgtgacactgtgtgaaggcccgaataagttcaaatgtcactccggcgagtgtattaccttggacaaggtctgtaacatggccagggactgtcgcgattggagtgacgagcccatcaaagagtgcggcacaaacgaatgcttagacaataatggcggctgctcccatgtctgtaatgacctgaaaatcggctatgagtgcgactgtccggatgggttccagctggtcgcacagcggagatgtgaggacatcgacgagtgccaggacccggacacatgttcccaattgtgcgtgaacctcgagggggggtacaagtgccagtgcgaagaaggttttcaattggacccacacactaaagcctgcaaagcggtggggagcattgcttacctcttttttaccaacaggcatgaagtgagaaaaatgaccctcgacagatcagaatacacctcactgatccccaacctcaggaacgtcgtggcactagacaccgaggtcgcctcaaatagaatttattggagtgacctgtcccagcgcatgatctgctcaacacagctcgaccgagcgcatggcgtcagctcttacgatactgtcatttcccgtgatatccaggcacccgacgggctcgccgtggattggattcactctaatatttactggacagactcagttctggggaccgtaagcgtggccgataccaaaggggtcaagaggaagaccttattccgagaaaacgggtccaagccccgcgctattgtggtagaccctgtgcatggttttatgtattggaccgattgggggacccctgccaagatcaagaaggggggcctgaatggggtggatatttacagtctggtgaccgagaacattcaatggccaaatggtataaccctagatctgttgtccggccgtttatattgggtggactctaaactgcattccatcagcagcattgacgtaaacggagggaaccgcaagacaatattggaggacgagaagaggttggcgcaccccttctcgctggccgtattcgaggataaggtcttctggacagacattataaacgaagctattttctccgccaatcggctgacgggctccgacgtgaatctactcgcagaaaaccttttaagtcctgaagacatggtgctatttcacaaccttacacaacccaggggggtcaattggtgtgagagaaccactttatccaacgggggctgtcagtatctgtgtctgcctgccccccaaattaacccccacagccctaagttcacctgtgcttgccccgacggtatgcttctggcaagggatatgcgatcctgcctgaccgaagccgaggccgccgtcgcaactcaagaaacttctactgtccggttaaaagtttcatctacagcggtcagaacacagcatacaactacccgccctgtccccgacaccagcaggctgcccggcgccaccccaggattgacaacagtggagattgttacgatgagtcaccaagccttgggggacgttgccggaagggggaatgaaaaaaaaccctcatccgttagagcgctgtcaattgtactccctatcgtattgttagtgttcctctgcctcggcgtctttttactttggaagaattggagactgaaaaatatcaactccatcaactttgataacccagtatatcagaaaaccacagaggacgaggtccatatttgtcataatcaagatgggtactcttacccgtccagacaaatggtctccctagaagacgatgttgca

SEQ ID NO: 11175 - DNA, 2580 bp, Artificial Sequence
  derived and/or modified sequence
atgggaccgtggggctggaagttgcggtggaccgtggcactcctgctggctgcggccgggaccgcggtgggcgatagatgcgaacgtaatgagttccaatgccaagacggtaagtgtatttcgtacaaatgggtctgtgatggatcagccgagtgtcaagacggctccgatgagtcgcaagaaacgtgcctttcagtcacttgcaaatcgggagatttctcatgcggaggacgcgtcaaccggtgcatcccgcagttctggcggtgtgatggacaagtggattgcgataatggaagcgatgagcaagggtgtcccccgaaaacttgctcccaggacgaatttaggtgccacgatgggaagtgcatctcgaggcaatttgtgtgcgactccgatagagattgcctggacggttcggacgaggcgagctgtccagtgttgacctgcggaccagcctcttttcaatgcaactccagcacctgcattcctcagctgtgggcgtgtgacaatgatccggactgtgaggacgggtcggatgagtggccacagcggtgtcggggtctttacgtgttccagggagactcttccccgtgctcggcgtttgaatttcactgcctgtccggagagtgtatccattcgagctggcggtgcgacggaggaccggactgtaaggacaagtcagacgaggagaactgtgccgtcgccacttgccggccagacgaattccagtgctcagatggaaactgtatccacggcagccggcagtgcgaccgggagtacgattgcaaggacatgtccgatgaagtgggatgtgtcaatgtgactctgtgcgaaggcccaaacaagtttaagtgccactccggagaatgcattactctggataaagtgtgcaacatggcccgcgattgccgcgactggtccgacgaaccgatcaaagaatgcggcaccaacgagtgtttggacaataacggaggctgtagccatgtctgcaatgacctgaagatcggatacgaatgtgactgcccagacggatttcaactcgtcgcgcaacgccgctgcgaggatatcgatgaatgccaggatcctgacacttgttcacaattgtgtgtcaacctcgagggcggatacaagtgccagtgtgaggaagggttccagctggacccgcatactaaggcatgtaaggccgtgggatcgatcgcgtacctgttcttcacgaatcggcacgaagtgcggaagatgactctggacagatcggaatataccagcctgattccgaacctgcggaacgtggtcgcactggacaccgaagtggcgtccaatagaatatactggtcggacctctcccagcggatgatctgctcaacccaacttgaccgcgcgcatggcgtctcctcatacgacaccgtgatctcacgcgatattcaggccccggacgggctggcagttgattggattcattcgaacatctactggacggacagcgtgctgggtacggtgtcagtggccgatactaagggggtcaagcgcaagaccctgttccgcgaaaatgggtcgaagcccagagccatcgtggtcgacccagtgcacggattcatgtactggaccgactggggcactccagccaagatcaagaaagggggattgaatggagtggacatttacagcctggtgaccgagaatatccaatggccgaacggaatcaccctggatctgctgtcggggcgcctttactgggtcgattcaaagctccattccatcagctcaatcgatgtgaatggggggaaccgcaaaaccattctcgaagatgaaaagcgcctggctcacccgttcagtctggcggtgttcgaagataaagtgttctggaccgacattatcaacgaagccatcttctccgccaaccggctgactggctccgacgtgaacctgctcgccgagaacctcttgtcgccggaagatatggtgctctttcataacttgacccagccacggggcgtgaactggtgtgagcgcaccactctctcaaatggaggatgtcaatacttgtgtctgccagccccccagatcaacccgcactcgccaaagttcacttgcgcatgtcccgacgggatgctgctcgctcgcgacatgcggtcctgcctcaccgaggcagaagctgcagtcgcgacgcaggaaacctcaaccgtgagactcaaggtgtcgtcgaccgccgtacggactcagcacactaccacccggccagtgccggatactagccggctgcctggagcaaccccgggactgaccacggtcgaaatcgtcactatgtcccaccaagccttgggagacgtcgccggccgcggtaatgagaagaagccctcgtccgtccgggccctcagcatcgtgctgccaatagtgctcctggtgttcctgtgcctgggagtgtttctgctgtggaagaactggcgtctcaagaatatcaattcaattaacttcgacaacccggtgtaccaaaaaactaccgaggacgaggtgcatatctgccataaccaggacggttacagctacccgtctcgccaaatggtgagcctggaggacgacgtggct

SEQ ID NO: 11176 - DNA, 2580 bp, Artificial Sequence
  derived and/or modified sequence
atgggaccttgggggtggaagctgagatggactgtggcccttcttctggccgcagccggaactgcagtcggtgacaggtgtgagcgcaacgagtttcaatgtcaagacggaaaatgtatatcatacaagtgggtgtgcgacgggtccgcagaatgccaggatggatcagatgagtcacaagaaacttgcctctcggtgacctgtaagagcggagatttttcgtgcggaggacgcgtcaacagatgtattcctcagttttggaggtgtgatggacaagtcgattgtgacaacgggtcggacgagcaaggttgtccacccaagacctgcagccaagatgaattcagatgtcacgacggcaagtgtataagtaggcagttcgtatgcgattcagatagagactgcctggacggaagcgatgaggcttcgtgtccagtgctgacctgtggcccagcctcgtttcagtgcaactcaagcacctgtatccctcagctttgggcatgtgataacgatcctgattgcgaggacggttcagacgaatggccacaaagatgccgaggactgtacgtctttcagggtgatagctcaccttgttccgcattcgagtttcactgcctgtcaggggagtgcatacactcttcgtggaggtgcgatggtggccccgactgcaaggataagtccgacgaggaaaactgcgcagtggcgacctgtaggccggatgagtttcaatgctccgatggtaactgcatccacggtagcagacaatgcgatagggagtacgactgtaaggatatgtcggatgaggtggggtgtgtgaacgtgactctctgtgaaggacctaacaagttcaagtgccattccggtgagtgtattactcttgataaggtgtgtaatatggccagggactgtcgggactggtccgatgaacccattaaggagtgcggcactaacgaatgccttgacaacaacggcggatgttcacacgtctgcaacgatctgaagattggatatgaatgcgattgtcctgacggtttccaacttgtggcccaaagaagatgtgaagatatagatgaatgtcaagaccctgacacttgcagccagctgtgcgtcaacctcgaaggtgggtacaaatgtcagtgtgaagaaggttttcagctggacccgcacaccaaagcatgtaaggctgtggggtcgatagcatacttgtttttcaccaaccgccatgaggtgcgtaagatgaccctcgaccgatcggaatacacctcactgattcccaatcttcgcaacgtggtcgcactggataccgaggtggcttccaatcgcatatactggtcagacctgagccagagaatgatctgcagcacccaactggacagggcacatggggtgtccagctacgacactgtcatttccagggacatacaggcacccgatggcctcgcagttgattggattcattcaaacatttactggaccgattccgtgctgggcacggtttctgtcgcagataccaagggtgtgaagagaaagaccctgtttcgagagaatggatcgaagcctcgcgcaatagtggtagatccagtgcacggattcatgtactggactgattgggggaccccggcaaagatcaagaagggagggcttaatggtgtcgacatttactccctcgtgactgagaacattcaatggcctaatggaattaccctggacctgctctcgggccgcctttactgggttgactcaaaacttcattcgatctcctcgatcgacgtcaatggagggaacaggaaaactattttggaagatgagaagcgacttgcacatccattctcactggcagttttcgaagataaagtgttttggactgacatcataaacgaggctattttctcagcaaacagacttacgggatcggacgtgaatttgctcgcagaaaatctgctgtcccccgaagatatggtgctctttcataaccttacccagccacgcggcgtgaactggtgcgaacgcaccactctttcgaatggagggtgccagtatctttgcctgcctgcgccacagattaacccacactccccaaagttcacttgtgcatgcccggatgggatgctcctcgccagagatatgcgatcctgcttgacggaggcagaagcagctgtcgcgacgcaggaaacttccaccgtgcggcttaaggtgtcaagcactgccgtgagaacccagcatacgactacccggccagtccctgatactagccgacttcctggtgccactcccggacttaccaccgtggaaatcgtgaccatgtcacatcaagcattgggcgatgttgcaggcagaggaaacgagaaaaagccttcgtcggtccgggcactctccatcgtgctgccaattgtgcttctcgtgttcctgtgtcttggagtgtttcttctctggaagaactggcgcctcaaaaacattaactcgatcaactttgataatcctgtttaccagaaaactactgaagatgaagtgcacatttgccacaatcaggatggatactcgtaccctagtagacagatggtgtcgctggaagatgatgtggca

SEQ ID NO: 11177 - DNA, 2580 bp, Artificial Sequence
  derived and/or modified sequence
atgggcccttggggttggaaactgcgatggaccgttgcactgttgctcgccgccgctgggactgcagtgggcgaccgttgcgagcggaatgaatttcagtgtcaggacgggaagtgcatatcatacaaatgggtgtgtgacgggtcagccgagtgccaagatgggtctgatgagagccaggagacctgcctcagtgtaacctgcaagtctggagatttttcatgcggtggcagggtgaatagatgtattccacaattttggcgatgtgacggccaggtcgattgcgacaatggatctgacgagcagggctgccctcctaaaacgtgttcacaggatgaattccggtgccatgatggtaaatgtatctctcgccagttcgtctgcgacagcgatagagactgtctggatggttcagatgaagcctcctgtccagtgctaacctgtggtcccgcctcttttcagtgcaactcctctacttgcattccacaactgtgggcatgtgataatgatcccgattgtgaagacggatctgacgagtggcctcagagatgcagggggctgtatgtgtttcagggggatagtagcccctgtagcgcttttgagtttcactgtctctccggcgagtgcattcacagtagctggagatgcgatggaggcccagattgtaaagataaatcggacgaggaaaattgcgccgtcgcaacttgcagacccgacgagtttcagtgctctgatgggaattgtatccacggatcaaggcagtgcgaccgggaatatgattgcaaggacatgagtgacgaggtcgggtgtgtgaacgttactttgtgcgaagggcccaacaaatttaagtgccactccggagaatgcataaccctagacaaagtgtgtaatatggcccgggattgtagagactggagtgacgaacccattaaagagtgtggcaccaacgaatgtttagataataatgggggatgttcacatgtgtgtaacgacctgaagatcggctatgaatgcgattgccctgacggtttccaactggtcgctcagcgcagatgcgaggatatcgacgagtgccaggacccagatacatgtagtcaactgtgcgtaaatctggaaggaggatataagtgccagtgcgaggaaggcttccagttggacccccatactaaggcctgcaaggccgttggatcgatcgcctatctattctttacgaatcggcatgaggtgaggaagatgaccttggacagatcggaatacacctcactcatccccaacctcaggaacgtggtggccttggataccgaggtggccagcaaccgcatctactggagcgacctttctcagcggatgatttgttcaacacagctggatcgggctcacggagtgagctcgtatgatactgtgataagtcgagacatccaggctcccgatggcttggcagtggattggattcatagtaacatatattggaccgattccgtgctgggaaccgtcagcgtggccgataccaagggtgtgaaacgcaagactctttttcgcgagaacgggtcgaagccaagagcgattgtagttgacccagtccatggctttatgtattggactgattgggggaccccagccaagattaagaagggcggacttaatggagtggacatctattcactggtgacagagaatatccagtggcctaatggtattactttggatctgctgtccggccgactatactgggttgattcgaaactacactcaataagtagtatcgacgtcaatgggggtaatcgaaaaacaattctggaggacgaaaaaaggctcgcccatccctttagcttagccgtattcgaagataaggtattctggacagacattatcaatgaggccattttctctgctaatcgtctgaccggcagcgatgtgaatctgctagctgaaaatctcctgtcccccgaagacatggtcctgttccacaacttgacgcagcctcgaggcgtaaactggtgtgaacgtacaaccctgtcaaatggcggctgtcagtacctttgtctgccagctccacagatcaatccccactcccccaagttcacctgcgcctgccctgatggaatgctactcgccagagatatgcggagctgcctcacggaggctgaagcagccgtggcaacacaggaaacttccactgtccggttgaaggtttccagcaccgctgtccggactcaacataccacaacccgtcccgtgcctgacacgtctagacttcctggagccacacctgggttgaccacagtggagattgtcactatgagccaccaagctctgggggacgttgccggtaggggaaacgagaaaaagcccagtagtgtgcgggccttgagtattgtactgcccatagtgttgctggtgttcttgtgcctcggcgtgttccttctctggaaaaactggaggttgaaaaacataaacagcatcaacttcgataatcccgtataccagaagacaactgaggacgaggttcacatttgtcacaaccaagatggctactcttatccatctaggcagatggtgagcctcgaggacgacgtggca

SEQ ID NO: 11178 - DNA, 2580 bp, Artificial Sequence
  derived and/or modified sequence
atgggcccatggggctggaagttgaggtggacggttgcgctgctccttgcggctgccggcaccgccgtgggagatcgctgcgagcggaacgaatttcaatgccaggacggcaaatgcataagttataagtgggtgtgcgacgggagtgccgagtgtcaagacggctctgacgagtcccaggaaacttgcttgagcgttacctgcaagtccggagatttcagttgcggaggccgcgtaaataggtgcataccccagttttggaggtgtgatgggcaagtggattgcgacaacggctctgatgagcagggctgtccccctaaaacctgctcacaggatgaattcaggtgccatgatggtaaatgtatcagcaggcagtttgtttgtgattccgatagggactgcctggacggatctgacgaagccagttgcccggtcctgacttgtggtccagcgtccttccaatgcaactcctccacgtgtatcccccagttgtgggcgtgtgataacgaccctgactgcgaagacgggagtgacgagtggccccagagatgtaggggactgtacgtgtttcaaggggactcaagcccatgttccgcctttgagttccactgcctctccggcgagtgtattcactcaagctggagatgtgatgggggcccagattgtaaagacaaaagcgacgaggagaattgtgccgtggctacctgtcgccccgatgagttccagtgttccgacggtaactgtatacacggatcacgccaatgcgaccgagaatatgactgcaaggacatgagcgatgaggtgggatgcgtgaatgtcacgctgtgcgaggggcctaacaagttcaaatgccactccggtgagtgtattactcttgataaggtttgcaatatggctcgagattgcagagattggtccgatgagcccataaaagagtgtggcaccaatgaatgtttggataacaacggcgggtgctctcacgtgtgcaacgatctcaagattggctacgagtgtgattgtccagatgggttccaactcgtggcgcagcgccgctgcgaagacattgatgaatgtcaggatcctgatacgtgctctcagctttgcgtgaaccttgaagggggttataaatgtcaatgtgaggagggttttcagctggatcctcacacaaaagcatgcaaggctgtcggttcaatcgcatatctttttttcacgaatcgacatgaagttcgcaagatgaccttggaccgaagtgagtacacctccctgatcccaaacttgaggaacgtggttgctttggacactgaggtggcctccaataggatttattggtctgatctgagccagcgcatgatctgtagtactcagctcgaccgggctcacggcgtgtctagttatgatacagtcatctcccgggacatccaggctcctgacggccttgcggtagactggatccattctaacatctactggacagactccgttctcggtacggtctccgttgccgataccaaaggtgtgaagagaaaaaccctgtttcgcgaaaatggatccaaacctcgcgcgattgttgttgatccagtgcatggcttcatgtactggaccgactggggcactcccgccaagattaaaaaggggggtctcaatggcgtggacatttacagcctggttaccgagaatattcagtggcccaacggaatcaccctggacctgctgtctggcaggctgtactgggtggactccaaactgcattccatcagttcaattgatgtgaacggtgggaaccgaaaaaccatcctcgaggatgagaagcgcctggcacatccgttcagccttgccgtgttcgaagacaaggttttctggactgacattattaacgaagccattttcagcgctaaccgactcacggggagcgacgtgaatctgctggccgaaaatctgctctcaccagaagacatggtcctgttccataacctgacgcagccccggggagtaaattggtgtgagaggactaccctgtcaaatggggggtgtcagtacctgtgtctgccggcgccccaaatcaatccccacagccccaaatttacctgtgcctgccctgacggaatgctgctggccagagatatgagatcctgtctgacagaagcagaggctgccgtggccactcaggaaacttccacagtgaggcttaaggtgagtagtaccgccgtgcgcacgcagcacaccacaaccaggcctgttccggatacgagtagactgcctggcgccacaccggggctcactacagttgagattgtcacaatgtcacaccaggcgctgggagatgtcgctggtcggggtaatgagaagaagccatcatccgttagagcactgagcattgtgttgccaattgtgctgctggtgtttctctgtcttggtgtgtttcttctgtggaagaattggcgcctcaagaacatcaacagcattaacttcgacaatccagtttaccagaaaacaacagaagacgaagtacacatttgtcataaccaggatggctacagctatccctcacgccagatggtttctcttgaggacgatgtggct

SEQ ID NO: 11179 - DNA, 2580 bp, Artificial Sequence
  derived and/or modified sequence
atgggcccctggggttggaagttaagatggacagtagcactccttttggctgctgcaggaacagctgtgggggaccggtgcgagagaaacgagttccagtgtcaagatggtaagtgcatttcgtacaagtgggtttgcgatggtagcgccgaatgccaagatggttccgatgaaagtcaggagacttgcttgtcagtcacctgtaaatctggggatttctcgtgtggaggtcgtgttaacagatgcataccacagttctggcgttgtgacggtcaggttgattgtgacaatggtagcgacgagcagggctgtcccccaaagacttgctcccaagacgaatttcgatgccatgatggaaagtgcatctcaaggcagttcgtttgcgatagcgaccgtgattgtctcgacggttcagacgaggctagctgtcccgttctaacttgcggaccggctagctttcagtgcaactcctcaacttgcattccacaattatgggcctgcgacaacgatcccgattgcgaggatggtagtgacgagtggccgcaacggtgcaggggtctgtacgtatttcagggtgattcctccccatgctcagccttcgaattccattgtttgtcgggggagtgtattcactcatcatggcgatgtgacggaggacccgattgtaaagataaaagcgatgaggagaactgcgcagttgcaacctgtcgtcccgacgagttccaatgttcagacgggaactgtatccatgggtcccgtcagtgtgatagagaatacgactgcaaagatatgagtgatgaggttggttgcgtcaatgtaaccctttgtgagggaccgaacaaatttaagtgccacagcggggaatgcataactttggacaaggtttgtaatatggctagggattgcagggattggtcagatgaaccaatcaaggaatgtggtacaaatgagtgcctcgataataacggaggatgcagccatgtttgtaatgacctcaagatagggtatgagtgtgactgtcctgatgggttccaacttgttgcccaaaggagatgtgaggacatcgatgagtgccaggatcccgacacctgttcacagttgtgcgtgaatcttgaaggaggttataagtgtcagtgcgaagaaggtttccaattagatccacacaccaaggcttgcaaagccgttggttctattgcttacctttttttcactaaccgtcatgaagtcagaaaaatgactttggatagaagcgagtacacttcgctgatacctaatttgcggaatgttgtcgcacttgatacggaagttgcttcaaatagaatttattggtcggacctttcacaacggatgatttgctcgacccaattggacagggctcatggcgtatctagttacgatactgtcatctctagagatattcaagcaccagacggcttggctgttgactggatccattcaaacatctactggacagattcggtccttggtaccgttagcgttgccgacacaaagggggtcaaacggaagacgttgttccgggaaaacggttctaagccccgagccatcgtggtcgacccagtccatggcttcatgtattggactgattggggtactcctgctaagataaaaaagggtggtcttaacggagttgatatttattcccttgtgacagaaaatattcagtggcccaatggtatcacgctggatttgctctcgggtcgtctatactgggttgattctaaactccactcaatttcaagcattgatgtgaatggcggtaataggaaaacaatccttgaggatgagaaaaggttggcacacccattctctcttgctgtgtttgaagataaggtattttggactgatattatcaacgaagctattttctccgctaataggcttactggctccgacgttaatttgttggcagaaaatctactttcccctgaggatatggtccttttccataatttgacgcagccaagaggtgttaattggtgtgaaaggactacgctttcgaatggaggatgtcagtatctgtgtttacctgccccacaaattaatccacactcaccaaagttcacgtgcgcatgtccagatgggatgttgcttgcaagagatatgagatcctgcttgactgaagctgaagctgcagtcgctacacaagagacttccaccgttagacttaaagttagtagtactgccgtgcgtactcagcatactacaaccagacctgtgccagatacctcaaggcttccaggggctactcctggactaaccaccgttgaaatcgttactatgtcgcaccaggcgttgggagatgttgccggaaggggtaatgagaagaaaccttcttcagttagggcattgtcaattgtgctccctattgtcttgcttgtgtttttgtgtcttggcgtctttctcctatggaagaactggcgacttaagaacataaactcgatcaactttgacaatcctgtttatcaaaaaactaccgaagatgaagtgcatatctgccataatcaggacggttacagctatccgtctcgtcaaatggtttctctagaagatgatgttgcg

SEQ ID NO: 11180 - DNA, 2580 bp, Artificial Sequence
  derived and/or modified sequence
atgggaccttggggctggaagctgcgctggactgtcgcccttctgctcgccgccgctggcacagccgttggtgaccgctgcgagaggaatgagtttcaatgtcaggatggaaaatgtattagttacaagtgggtgtgtgatggtagcgccgagtgccaggatggttcagatgagtctcaagaaacttgcttgtcagtcacgtgcaaaagtggcgacttttcttgtggaggcagggttaaccgctgtattccccaattctggaggtgcgacggccaggtcgattgcgataacggttctgacgagcaaggttgtcctcccaaaacgtgctctcaggatgaattcaggtgccacgacggtaagtgcatatcaaggcagtttgtgtgtgatagcgaccgcgattgcctggatggatccgatgaagcaagctgccctgtccttacctgcggtcccgcgtccttccagtgtaactcctccacctgcatcccacagctgtgggcttgcgataacgatcccgactgcgaagatggttcagatgaatggccccagagatgccgcggtctctacgtcttccagggcgactccagcccatgtagcgctttcgaattccattgcttgtccggtgagtgtatccattcaagttggaggtgtgacggaggtcccgactgtaaggacaagtcagacgaagaaaactgcgcggtggccacttgccgccctgacgaattccagtgcagtgatggaaactgtatccatggcagcaggcagtgtgatagggaatacgattgtaaagacatgagtgatgaggtgggatgcgtaaacgtgaccttgtgcgagggtcctaacaagtttaaatgtcactccggagagtgtatcacgctcgacaaggtgtgtaatatggccagggactgtcgcgattggagcgacgagcccatcaaagagtgtggcacgaacgagtgccttgacaacaacggcggctgctcacacgtctgcaatgatctcaagattggttacgaatgcgactgcccagacggatttcagctggttgcccagaggcgctgcgaggatatcgatgagtgccaggacccggacacctgctcccaactgtgcgtgaacctggagggaggctataagtgccagtgtgaagagggcttccagttggatccgcataccaaagcatgcaaggctgttggttctatcgcatacttgttttttaccaacagacatgaggtccgcaaaatgactctggacaggagcgagtacaccagcctgatccccaacctccgcaacgtggtggctttggacaccgaagtagcctctaaccgcatatattggtccgacttgagccagaggatgatctgctcaacacagctggacagggcacacggcgtgtctagttacgatacagtgatttctagggatatacaggcgcccgatggtcttgcggtcgactggatccacagtaatatttactggacagactctgtcttgggcactgtcagtgtggccgacacaaaaggagtcaaaaggaagacgttgtttagggagaacggatccaagcctagagccatagttgtggatcctgtgcacggcttcatgtactggaccgactggggcacccctgctaagattaaaaaaggtggacttaacggtgttgatatctattccctggtgactgaaaatatccagtggcccaatggtattaccctcgacttgctctcaggtcgcctctactgggtggattctaagctgcattccatttcaagcatcgatgtgaacggcggaaacagaaagaccatcctcgaggatgagaagcgcctggctcacccttttagcctggcagtcttcgaggacaaggtcttctggactgacattatcaatgaggctatcttctcagcaaacaggttgacaggttctgacgtgaacctgctcgcggaaaatttgctgagcccagaggacatggttcttttccacaacctgacgcagcctcgcggcgtaaattggtgtgagaggacaacactgtctaacggaggttgccaatacctgtgcttgccggcacctcagattaatccccattcacccaaatttacgtgcgcctgcccggacggtatgttgctcgctagagacatgcgctcctgcctcactgaggcagaggccgcagtagcaactcaagagacctctactgtgagactcaaggtatcctctaccgctgtcagaacgcagcacactacaactagaccagtgccggacacctcaaggctgcccggcgcaactccaggcttgacaacggtcgagattgttacaatgtcccaccaggccctgggagatgtggcgggaaggggcaatgaaaagaagccttctagtgtccgcgcgctcagcatcgtgctgccaatagtactgttggtgttcctgtgtctgggtgtgtttttgctgtggaagaactggcgcctcaaaaacattaattcaatcaattttgataatccagtgtatcaaaaaactactgaagacgaggtgcatatatgtcataatcaggacggatatagttacccctcccgccagatggtgagcctcgaagatgatgtcgcc

SEQ ID NO: 11181 - DNA, 2580 bp, Artificial Sequence
  derived and/or modified sequence
atgggaccttgggggtggaaactgagatggactgtggccttgctgctggcagcggcgggcactgctgtgggagacagatgcgagagaaacgagttccagtgccaggatggaaagtgcatctcatacaagtgggtctgcgacggctcagcagaatgtcaggacgggagcgacgaatcacaggagacttgtctgtctgtcacctgcaagtcaggcgatttctcatgcggcggacgagtcaacaggtgcatcccgcagttttggcgctgtgacgggcaggtggattgcgacaacggatcagatgaacaggggtgccccccaaagacgtgctcgcaagacgagttccggtgtcatgacggtaaatgtatttcccgtcagttcgtgtgcgactcggaccgcgactgcctggacggatctgacgaagcgtcgtgtccggtgctcacttgtggaccggcctcattccagtgcaatagctccacgtgcattccccagctgtgggcctgcgataacgacccggactgcgaggacgggtcagacgaatggccacagagatgtagaggactgtacgtctttcaaggcgattcgagcccgtgcagcgcctttgagttccactgcctgtccggagagtgcatccactcatcgtggaggtgtgacggtggacctgattgcaaggataaatcagacgaagaaaattgcgcggtggcaacgtgccgaccggatgagtttcaatgcagtgacggaaactgcattcacggctctcgtcaatgcgatcgggagtatgactgcaaagacatgtccgatgaagtcggctgcgtcaacgtgaccctgtgcgagggtcctaacaaattcaagtgccattcaggagaatgtatcactctggacaaggtgtgcaacatggccagagactgtcgcgactggtcggatgaaccaattaaggagtgtggcaccaacgaatgcctcgacaataatggcggatgttcgcacgtgtgcaatgatctcaaaatcggctacgagtgtgattgcccagatggctttcagcttgtggcacaacgccggtgcgaggacatcgatgaatgtcaggatccagacacttgctcccagctctgcgtcaatttggagggaggatacaaatgtcagtgcgaagaaggattccagctggacccgcacactaaagcatgtaaagcagtgggctccatcgcttacctgttcttcaccaaccggcatgaagtgagaaagatgactttggacaggagcgagtacacctcgcttatccctaatctcagaaacgtggttgcactggacaccgaagtcgccagcaatcgcatctactggtcggatctgtcccaacgcatgatttgctcgacccagctggaccgcgcgcacggagtgtcctcatacgacaccgttatctcccgggatatccaggcgcctgacgggctggcggtggattggatccactccaacatctactggaccgactccgtgctgggaaccgtctcggtggctgatactaaaggagtgaagagaaagaccctgttcagagaaaacggatcgaagccccgcgccatcgtggtggacccggttcacggatttatgtactggacggattggggcactcctgccaagatcaaaaagggtgggttgaatggagtggacatctactcactggtgaccgaaaacatccagtggcctaacgggatcacccttgacctcctttcgggtcgtctttactgggtggattctaagctccactcgatctcctccatcgacgtgaacggcggtaaccgcaagactattttggaggacgaaaaaaggcttgcgcatccgttctcccttgccgtctttgaggacaaggtgttctggacggacattatcaatgaggccatcttctcggcgaatcgcctcaccggttcggatgtgaaccttctcgctgaaaacctgctgagcccagaggacatggtgctgttccacaacctcacgcagccacgcggagtgaattggtgcgaaaggaccactctgtcgaacggggggtgccagtacctgtgcctgccggccccccagatcaatccacattcgcctaagtttacttgcgcctgcccagacgggatgctcctcgccagagacatgcggtcctgtctgaccgaagctgaagccgctgtggctacccaagaaacgtctaccgtgcgcctcaaggtgtcgagcaccgctgtgagaacccaacacaccaccacccgcccggtgcccgacaccagcaggctccccggagctactccggggctgactactgttgaaattgtgactatgagccaccaggccttgggcgatgttgccggaagaggcaacgaaaagaaaccttcctctgtgcgggccctctcgatcgtgctgcctatcgtgctccttgtgttcctgtgtctgggggtgttcctgctctggaagaattggaggctgaagaacatcaattcgatcaattttgacaaccctgtctaccagaaaaccaccgaggacgaggtgcacatctgtcacaaccaagatggctactcttacccgtcccgccaaatggtgtcgctggaggacgacgtcgcc

SEQ ID NO: 11182 - DNA, 2580 bp, Artificial Sequence
  derived and/or modified sequence
atgggtccatggggttggaagctccgatggactgtcgcacttctgctggccgcagctggtactgcagtaggagatcggtgtgagagaaatgaattccagtgccaggatgggaagtgtattagctataagtgggtctgtgacggatcggcagaatgccaggatggcagcgacgagtctcaggaaacctgtctgagtgtcacgtgcaagtctggtgacttcagctgtggaggtcgcgtgaaccgctgcatccctcagttttggcggtgtgacggccaagtagattgtgacaacggatccgacgagcaaggatgcccgcccaagacctgctcgcaagatgagtttcggtgtcatgacggaaagtgcatctcccgtcagttcgtgtgtgatagcgacagggattgtctggacggctccgatgaggcttcctgtccagtgctcacatgcggcccagcctcattccagtgtaacagcagcacttgtataccccaactgtgggcttgcgacaacgaccctgattgcgaggacggctcggatgagtggccgcaacgatgccgcgggctgtacgtctttcagggcgactcatccccatgttctgcgttcgagttccactgccttagtggggaatgcattcactcaagctggaggtgtgacggcggccccgattgcaaggataaaagtgacgaggagaattgcgctgtggcaacttgccgacccgacgaattccagtgcagcgacgggaattgcatacatggatcacgccagtgtgaccgtgaatatgattgcaaagacatgtccgatgaggtgggctgtgtcaacgtgacgctctgtgaggggccaaataaattcaagtgtcactctggagagtgcatcactttggataaggtctgcaatatggctagggactgcagagactggtccgatgaacctatcaaagagtgcgggacgaacgagtgcctggacaacaacggagggtgtagccatgtgtgtaacgatctgaagattggttatgagtgtgactgcccagacggatttcagttagtcgcacagaggaggtgcgaggacattgacgagtgtcaggatcccgatacctgtagtcagctgtgcgtgaacctggagggtgggtacaagtgccagtgtgaagaaggctttcaacttgatcctcataccaaagcctgcaaggctgtaggtagtatcgcataccttttctttaccaaccgccacgaggttaggaagatgaccctggatcgaagtgagtacacatcccttattccaaacctacggaatgtggtggctcttgacactgaagtcgcgagtaaccgcatctactggtctgacctgtctcagcgcatgatatgctcgacccagttagaccgggctcacggggtatcatcctacgacaccgtcatctctcgggacattcaggcccctgacggtctcgctgtggattggatccactccaatatctattggacagattcagtgctcggaactgtatctgtggccgacactaagggtgtgaagcgtaagacactgttccgagagaacggatccaagccacgagctattgtggtcgatcccgtccacggcttcatgtactggaccgactggggtaccccggcgaaaattaaaaagggggggcttaacggtgtggacatctactccctcgtcaccgagaacatccaatggcccaacggcatcacccttgacctgctgagtggccggctatactgggtggattctaagctacactctatttcctccatagatgtgaatggaggaaaccggaagacaatccttgaggatgaaaagcggctggcgcacccatttagtctggcagttttcgaggacaaggtgttttggactgacattattaacgaggccatttttagcgcaaacaggctgaccggaagtgacgtgaacctcctggcagagaatctgctgagtccagaggacatggtacttttccataatcttacccagcctaggggggttaattggtgcgagcggaccacccttagcaacggcgggtgccagtatctctgcctaccagccccgcagatcaacccccatagtcctaaatttacttgtgcctgccccgacggcatgctactcgcgagggatatgcggagctgcctgactgaagcggaagctgcagtagctacacaggagacctcaaccgtacgactgaaagtgagttcaacggctgtgcggacacagcacactactacgcgccctgtgcctgacacatctcgccttccaggggccactcccggcctgaccaccgttgagattgtgacaatgtctcatcaggcattgggggatgtggctggaagggggaacgaaaagaaaccctcaagcgtgagagccctgtccatcgtcctgcctatcgtcctcctggtgttcctttgtttgggcgtcttcctactatggaagaactggcgcttgaagaatataaactcaattaatttcgacaatcctgtgtaccaaaagactacggaggacgaggtccatatttgccacaatcaggatggctatagctacccttcacgtcaaatggtgtccctggaggacgacgtggct

SEQ ID NO: 11183 - DNA, 2580 bp, Artificial Sequence
  derived and/or modified sequence
atgggcccgtggggctggaagttgcggtggaccgtggcactgctactggctgcggccgggactgcagttggggacagatgtgagcgcaatgagttccagtgtcaagacggaaaatgcatatcttataagtgggtgtgtgacgggagcgccgagtgtcaggatggctcagacgagagtcaggagacatgtctctcagtaacatgcaagagcggggacttcagctgcgggggtagagtgaaccgttgtatcccacagttttggcgctgtgacggacaggtggattgcgataatggcagtgatgagcagggctgtccgcccaaaacttgtagtcaagacgagttccgttgtcacgacggtaaatgcatctccaggcagtttgtttgcgacagcgatcgcgactgcctcgacggctcagacgaggcctcttgtcccgtgctcacgtgtggtccagctagctttcagtgtaacagttcaacctgcatcccacaactttgggcttgcgataacgaccctgattgtgaggacgggtccgacgaatggccccagagatgccgcggactgtacgtgttccagggcgacagctctccttgttcagcctttgagtttcattgcctgtctggcgagtgtatacactcctcatggaggtgcgatggggggccggattgcaaagacaaatcagatgaggagaattgcgccgtcgccacatgccggcccgacgagtttcaatgttctgatggcaactgcatccacggctccagacagtgtgatcgggagtacgactgtaaggacatgagtgacgaggtgggctgtgtgaacgtaaccctgtgtgagggcccaaacaaatttaagtgccactctggcgagtgcatcacccttgacaaagtgtgcaatatggcacgagactgtcgggattggtcagacgagcctattaaggaatgtgggaccaacgagtgcctagacaacaatgggggttgttctcacgtgtgcaatgatctgaagattggctacgagtgcgattgccccgatggatttcagctggtggctcagcgcaggtgcgaagatatcgatgagtgtcaggaccctgatacctgctctcagctgtgcgtaaatcttgaaggagggtacaaatgccagtgtgaggagggtttccagttagacccacacaccaaagcttgcaaagcagtaggctccatcgcatacctgttcttcactaatcggcatgaggtgcgcaaaatgactctcgataggtcagaatatacgtccctcataccgaatttaagaaacgttgtggcactggacaccgaagtagcaagtaatcgaatctactggagcgacctctcacagcgaatgatctgttctacacagctcgatcgcgcacatggcgtttcctcatacgatacagtgatcagtagggacatccaagcacccgatgggctggcagtggattggattcactctaatatttactggacggactccgtcctagggacagtgtccgtcgctgacacaaaaggagtgaaacgaaagacactgtttcgagagaacggatccaagccacgggccatcgtggtggatcctgttcacggattcatgtactggaccgactggggaacacccgccaaaatcaaaaaaggaggattaaacggcgtcgacatctactcccttgtcactgagaatatccagtggccgaacggtataacattggacctgctttcaggtagactgtactgggtagatagcaagctccattccatcagctcgattgacgtaaatgggggaaacaggaagaccattcttgaagacgagaagcgactcgcacaccccttttctctggcagtgttcgaagacaaagtgttttggaccgacataatcaacgaggccattttttctgcgaacagactgaccggaagtgatgtaaaccttctggcagagaacttgctgtcgccagaagacatggtcctctttcacaacctgactcaaccccggggtgtaaactggtgcgagaggacaaccttgtcaaatgggggatgtcagtacctctgcctacccgccccgcagatcaacccacattcaccaaagttcacctgcgcttgtccagatgggatgctgctggctagggatatgaggagttgtctgacggaggccgaagctgccgtcgccacgcaggaaactagtaccgttagactgaaagtcagtagcaccgccgtgcggacccaacacaccactacaagacctgtcccggacacttccagactccccggagcaacacctggcctgacaacagtggagatagtcacaatgagtcaccaggccctcggagacgtggccggacggggtaatgaaaaaaagccttctagtgtgcgcgcccttagtattgtgttgccgatcgttcttctagtgttcctgtgcttaggggtcttcctactgtggaagaactggaggcttaaaaatatcaactctattaatttcgataacccggtttatcaaaaaaccacagaagatgaggtgcacatctgccataaccaggatggctacagctaccctagtcggcagatggtcagtttggaggacgatgttgcg

SEQ ID NO: 11184 - DNA, 2580 bp, Artificial Sequence
  derived and/or modified sequence
atgggcccctgggggtggaaactacgctggacagtggcgctgttgctggctgcagcaggaaccgccgtcggagacaggtgtgagaggaacgagtttcagtgccaggatggtaaatgtatttcatataagtgggtgtgcgatggctcggccgaatgccaggacggctcagacgagagtcaggagacatgcctctccgtgacatgtaaatcgggtgattttagttgcggaggtcgcgtgaacagatgcattccccagttttggcggtgtgacggccaagtggactgtgacaacggatctgacgagcaggggtgtccccccaagacctgttcccaagacgaattcaggtgccacgacggaaagtgcattagtagacagttcgtgtgtgactccgatagagattgcctggacggatccgatgaagcctcatgccccgtattaacctgtgggccagctagtttccaatgcaacagctctacttgcattccccagctgtgggcctgtgacaacgatcccgactgtgaagacggtagcgacgagtggcctcagcggtgcagaggcctgtatgtgtttcagggcgactcgtccccctgcagcgcttttgaatttcactgcctgtctggggagtgcatccatagctcctggagatgcgatggcggcccagactgcaaggacaagtccgatgaggagaattgtgccgtggcgacctgccgaccagacgagtttcagtgctcagatggaaattgtatccacggctcaaggcaatgtgatcgggaatatgattgcaaggatatgtccgatgaagtaggatgcgttaacgtcacattgtgtgaaggcccaaacaagttcaaatgtcattcaggcgaatgtattacactggataaagtgtgtaatatggcacgcgactgcagagactggagcgacgaacctattaaggagtgcgggactaatgagtgtctcgataacaacggcggatgcagccacgtgtgcaatgacctgaagattggatatgaatgtgactgtcccgacggttttcagcttgttgcacaaaggcgatgcgaggacatcgacgaatgccaggacccagacacgtgttcccagctttgtgtgaaccttgaaggaggttataaatgtcagtgcgaggaaggctttcagctggatcctcataccaaagcgtgcaaagcagtgggcagcattgcctatttattctttaccaacagacacgaagtgcgcaagatgacactcgatcgctccgagtacacgagcctgattcccaacctgcgcaacgtcgttgccctggatactgaagtggctagcaaccgtatatattggtctgacctctctcagaggatgatatgttctacacagctggatagggctcacggggtgtccagctacgacacggtcatctcacgcgacatccaggcccccgacggtctggccgtggactggatacactccaacatatattggacagattctgtgctgggcacagtctccgtggccgatacaaagggcgtgaagagaaaaactctgttcagagagaacggttcaaagccacgtgcaatcgttgtggaccccgtgcacgggttcatgtactggactgattggggaacgcctgcaaagataaaaaaggggggcctcaatggtgttgacatatattcccttgtgaccgagaatattcagtggccaaatgggatcaccctggatcttctgtctggacggctctattgggttgatagcaagctccattcaatcagctctatcgacgtcaacggaggtaatcgcaaaaccattctggaagatgaaaagcgcctggcccacccatttagtctggccgtttttgaagataaagtgttttggaccgatatcatcaatgaggccattttcagtgcgaataggctgacgggcagtgatgtaaacctgctagcagagaacctgctgagtcccgaggatatggtgcttttccacaatcttacgcagcctagaggggtgaattggtgtgaacgtaccaccctatccaacgggggttgccagtacctttgcctacccgctccccagatcaacccacactcgcccaaattcacctgtgcctgtcctgatggaatgttattggctcgcgacatgaggagttgtcttacagaagcagaagctgccgtggccacccaggagacttcgacagtaaggctgaaggtttccagtacagcagtgcgaactcagcatactactacccgtcccgtgcccgacacctcccggcttcctggggcgacgccaggcctgacaactgtcgagatagtaacaatgtcgcaccaagccctgggagatgtggctgggcgcgggaatgagaagaagccctcatctgtgcgtgccttgagtatcgttttgccgattgtgctgctggtcttcctgtgtttgggagtatttctcctttggaagaactggagactaaagaatatcaatagcatcaacttcgacaacccagtctatcagaaaaccactgaagacgaagtgcatatttgtcataatcaggatggctactcttatccctcccgacagatggtctccttggaggacgatgttgct

SEQ ID NO: 11185 - DNA, 2580 bp, Artificial Sequence
  derived and/or modified sequence
atgggcccctggggctggaaattgcggtggaccgtggcgctcctactcgcagcagcaggaacggccgtcggtgatcgatgcgagcgcaatgagttccagtgccaagacggaaaatgtataagctacaagtgggtgtgtgacggctccgctgagtgtcaagacggcagtgatgaaagtcaggagacatgtctcagtgtgacttgcaagtccggcgatttcagttgcggcggccgggttaaccggtgcataccccagttttggcgttgcgacggccaagtcgactgtgacaacggttcagatgaacagggatgcccgccaaaaacgtgctctcaagatgagtttcgatgtcacgatgggaagtgcatcagccggcagttcgtatgtgattcagaccgagattgcttggacggatcagatgaggcctcttgtcctgtgctcacttgtggtcccgcctcatttcagtgtaattcttcaacctgtattccccagctctgggcctgcgataatgatccagattgcgaagacggatcagacgaatggccacagagatgccgtggactttacgtgttccagggcgattcgtccccctgcagcgcttttgagttccactgcctgagcggggagtgtatccacagttcctggagatgcgacggcggaccagactgcaaagataagagcgatgaggagaactgcgctgtggccacatgtaggccagatgagttccagtgctctgacggcaattgcattcacgggagtcggcagtgtgacagggagtacgactgtaaagacatgagcgatgaggtcggttgtgttaacgtcactctctgtgaaggcccaaacaaattcaaatgtcactccggggagtgtataactctggacaaggtttgcaatatggcccgggactgtcgcgactggtcagacgaacccatcaaagagtgcggaacaaacgagtgtcttgacaataacggaggttgtagccacgtctgtaacgatcttaaaattgggtacgaatgcgactgccctgacggcttccagctcgtggctcagcgaaggtgcgaagacattgacgaatgccaggacccggatacatgctcccagttgtgtgtgaatctggaggggggttataagtgtcaatgcgaagaaggattccagctggatccgcatactaaggcctgtaaagctgttggttctatagcttacctgttttttacaaaccgtcacgaggtgaggaagatgacactagaccgcagcgagtacactagccttattcctaacctccgtaatgtggtggccctggacacagaagttgcgagcaataggatttactggagcgacttgtctcagcgaatgatttgttctacccagttagaccgcgcacacggcgtttctagctacgacaccgtcatcagtcgcgacattcaggcccccgacggactggccgtcgattggatccatagcaacatctattggactgacagcgttcttggcacagttagcgttgcagacacaaaaggagtgaagaggaagaccctctttcgcgagaacgggtccaaacctcgcgccatagtggtcgaccctgtgcatggattcatgtactggacagactggggcacacctgctaagatcaaaaagggtggactcaacggcgtcgatatttactctttggtgactgaaaatatccaatggcccaatggtatcacactggacctactgagcggacgcctctattgggtagatagtaaactgcattccatcagcagcatagacgtcaatggaggcaacaggaagacaatccttgaagacgagaaaagactggctcacccgttttctctggcggttttcgaagacaaggttttctggacagatattattaacgaagccatattctcagctaataggctgactggttctgatgtgaatctcttggccgaaaatctcctctcgcctgaggacatggtcctcttccataacctgacccagcccagaggcgtcaactggtgcgagcgcaccactctcagtaatggagggtgccagtatctttgtctgcctgcgccgcaaattaaccctcatagccctaaattcacatgtgcgtgtccagacggcatgctgctcgccagggatatgcgtagctgcttgacagaagcggaagcagccgtggccacccaggagacctcaacagtgcgactgaaagtctcatcgactgcggtccgtacgcagcatactactacaagaccagtgcctgacacatcccggctgcctggggcgactcctggactgacaacagtcgaaatcgtcaccatgtcacaccaggcattgggcgatgtcgccggccgtggaaacgaaaaaaaaccatcaagcgttcgtgcactgagcattgtgctccccatcgttctcctagttttcctgtgtctgggtgttttccttctttggaagaattggagactaaagaacatcaacagtattaacttcgataaccccgtgtaccagaaaaccactgaggatgaggtgcatatttgccacaaccaggacggctatagctacccatcacggcagatggtatcactggaagacgacgtcgcg

SEQ ID NO: 11186 - DNA, 2580 bp, Artificial Sequence
  derived and/or modified sequence
atgggaccttggggctggaaactccgctggaccgtggcactcctcctcgcggcagcaggaactgcagtgggagatcgttgtgaaaggaacgaattccagtgccaggacggtaaatgtatttcgtacaagtgggtctgtgacggatcagccgaatgccaggacggctccgacgaatcacaagaaacttgtctgtcggtcacttgtaagtcgggtgatttctcatgcggtggacgcgtgaatagatgtattcctcaattctggaggtgcgatggccaagttgattgtgataacggatcggatgaacagggttgcccaccaaaaacgtgttcccaggatgaattccgttgtcatgatggtaaatgcattagccgacaatttgtgtgtgacagcgacagggattgccttgacggatccgacgaagcaagctgtcctgtgcttacctgcggccccgcctcgttccaatgtaatagctccacttgtattccgcagctttgggcatgtgataatgatccggattgcgaggacggatccgatgaatggccacaaagatgtcgcggcctttacgtctttcagggcgattcgtccccgtgctccgcattcgagtttcattgtttgtcgggggaatgtatccattcctcgtggcgttgtgatggtggtccagattgtaaagataaatccgacgaagaaaattgcgcggtggctacttgtaggcccgatgaatttcagtgtagcgatggtaactgcatccatggcagcagacagtgtgatcgggaatacgattgtaaggatatgtccgatgaagtggggtgtgtgaacgtcacgctttgtgaaggaccaaataagtttaagtgtcattctggtgagtgtatcactctcgacaaggtgtgcaatatggcacgagattgtcgggattggtcagacgaacctattaaggaatgcggtaccaacgagtgtctggacaataatgggggatgtagccacgtgtgtaacgacctcaaaattggatacgaatgtgattgccccgacggttttcaactggtcgcacaacggagatgtgaggatattgacgaatgtcaagatcctgacacgtgttcgcaactgtgtgtgaatctcgaaggtggctacaagtgccaatgtgaagagggctttcagctggaccctcatactaaagcgtgtaaggccgttggatcaattgcttaccttttctttactaataggcatgaagtcagaaagatgacgctggaccgctcggaatataccagccttattccaaaccttcggaacgtggtcgctcttgatactgaggtggcctcgaatcgaatttactggtcagacctgtcccaacgaatgatctgtagcacccagcttgatcgcgcacatggtgtgtcgagctacgatactgtgatttcccgcgatattcaggcgccggatggtcttgccgtcgattggattcactccaatatctactggaccgattcagtgcttggaaccgtgtcggtcgcagatactaagggagtgaaaagaaagactctctttagggaaaacggaagcaaacctcgtgcaattgtggtggatcctgtccacggttttatgtactggactgactggggaactcctgcgaagattaagaaaggaggactgaacggtgtcgacatttacagcctcgtgaccgagaatatccaatggcctaatggcatcaccttggatcttctttccggccgactttactgggtggactctaaattgcactcgatctcatcgatcgacgtcaacggaggcaacagaaagactattctcgaggatgaaaagagacttgcacatcctttttcccttgcagtctttgaagataaggtcttttggactgatatcataaacgaggcaattttctcggcaaacagactgactggatccgacgtcaaccttcttgcggaaaatctgctctcaccagaagatatggtgctgtttcataacctcacgcaacccagaggagtgaattggtgtgaacgcacgaccctttcgaacgggggatgtcaatacctttgccttccagcacctcagatcaacccacattccccaaagttcacctgtgcatgtcccgacggcatgctgctggcacgcgatatgcgttcctgcctgaccgaagcagaggccgccgtcgctacccaagaaacctcgacggtgcgacttaaggtgtcgtcgaccgcagtgaggactcaacatactactacgcggcctgtgcccgacactagccggcttccaggagcaacccccggcctcaccactgtggagattgtcaccatgtcccaccaggctcttggagacgtggcaggtcgtggaaacgagaaaaaaccttccagcgtccgagctctgtcgatcgtactgcctatcgtgctgctcgtgtttctgtgccttggggtgttccttctttggaagaattggagactcaagaatatcaactcgattaactttgataatcctgtctaccaaaaaactaccgaagatgaagtccacatctgtcacaaccaggacggttacagctacccatcccgccagatggtatcgctcgaggacgatgtggca

SEQ ID NO: 11187 - DNA, 2580 bp, Artificial Sequence
  derived and/or modified sequence
atgggaccttggggatggaaattgcgatggaccgtcgcactccttcttgcggcagcgggtaccgcggtgggagatcgctgtgaacggaacgaatttcagtgccaggatggcaaatgtatctcctacaagtgggtgtgcgacggtagcgcagaatgtcaagatggatccgatgaaagccaggaaacgtgcctgtcggtgacctgtaagtccggtgacttttcctgtggtggtagagtgaataggtgcatacctcaattctggcggtgtgacggccaagtcgattgtgataacggatcggatgagcagggatgcccacctaaaacttgttcgcaagatgagtttaggtgtcatgatggtaagtgtatttcgagacagtttgtgtgtgactcggaccgggactgtcttgacggaagcgatgaagctagctgtccagtgctgacttgtggtcccgcaagttttcaatgtaatagctcaacttgcatccctcaactttgggcctgtgacaacgacccagattgtgaagatggctcggacgagtggccgcaacgttgccgtggactttacgtgttccagggggattcgtcgccatgctcggccttcgagttccattgcctgagcggggagtgtattcactcgtcgtggcggtgcgacgggggccccgattgcaaggacaagtcggatgaagagaactgcgccgtcgccacttgtcgcccagacgagttccaatgttcagatggaaactgtatacacggatctcgacagtgtgatcgggaatacgattgtaaggatatgtccgatgaagtcggttgtgtgaatgtgactctctgtgaaggtcctaacaagttcaagtgtcattcaggagaatgtatcacccttgataaggtgtgtaacatggcccgagactgtagagattggtcggacgaaccaattaaggagtgtgggactaatgaatgccttgacaataatggcgggtgttcccacgtgtgcaacgacctgaagattggatacgaatgcgattgtcctgatggttttcaactcgtggcccaaagaaggtgtgaagatattgatgagtgtcaggacccggacacttgttcccagctttgcgtgaacctggaaggggggtacaagtgccagtgcgaagagggatttcagcttgacccacatactaaggcatgcaaggcagtgggatcgatcgcgtacctgttcttcaccaatcgccatgaagtccgaaagatgacgctcgatcgttccgaatacaccagccttataccaaatcttagaaacgtcgtggcgttggataccgaagtggcctctaaccgcatttactggtcggatttgtcacagcggatgatctgttcgactcaactggatagagcacatggggtcagttcgtacgatactgtcatctcccgagatatccaagcacccgatggattggcagtggattggattcattcaaacatttactggacggatagcgtgcttgggactgtttcggtcgcagatactaaaggagtgaagcgaaaaacgcttttccgcgagaacgggtcgaaaccccgcgctattgtggtggaccccgtgcatggttttatgtactggaccgattggggtactccagcgaagatcaaaaagggaggactcaacggtgtggacatatacagcctggtcactgagaatattcaatggcctaatgggatcactcttgatcttcttagcggcaggctgtactgggtggattccaaactgcattccatctcatcaatcgatgtcaacggcggcaatcgaaagacgatcctcgaggacgagaagagactggcacatccattttcgcttgcggtctttgaagataaggtcttttggaccgacataatcaatgaagctattttcagtgcaaatagacttactggctccgacgtgaatctgctggcagaaaatcttctctcgcccgaggacatggtgctttttcacaaccttacccaacctagaggagtgaactggtgtgaaagaaccaccctgtcaaatggaggatgtcagtacctctgtctgcccgcaccacagattaatcctcattcacccaagtttacctgtgcgtgccccgatggcatgctcctggctcgggacatgcgttcctgcttgactgaagctgaagcagcggtcgccacccaagaaaccagcaccgtgagacttaaagtctccagcaccgcagtgagaacccaacacaccactaccaggccagtccccgacacttcccgcctcccaggcgcgacgcccggtcttactaccgtggaaatcgtgaccatgtcgcatcaagccctgggtgacgtggccggtagggggaatgaaaagaagccatcctctgtgcgtgccttgtcaattgtgctgccaattgtgcttctggtgtttctctgtcttggagtgtttcttctgtggaagaactggagactgaagaatatcaattcgatcaacttcgataaccctgtttaccagaaaactaccgaggatgaagtccacatttgccataatcaagatggctactcctacccatcaaggcaaatggtgtcacttgaagatgatgtggcg

SEQ ID NO: 11188 - DNA, 2580 bp, Artificial Sequence
  derived and/or modified sequence
atgggtccttggggctggaaactgcgttggacggtggcactgctccttgccgcggcaggtaccgccgtcggggatcgttgtgagcgaaacgaattccagtgtcaggacggaaaatgcatttcgtataaatgggtgtgcgacggttctgccgagtgtcaggacggttcagatgagagtcaggagacctgtttgtcagtgacttgcaagagtggggatttttcctgtggggggcgtgtgaatagatgtataccccagttttggagatgcgatggtcaagtggattgtgataatgggagtgatgagcaaggatgccctcccaaaacctgctctcaggacgagttcaggtgccacgatggtaagtgcatatccagacaattcgtgtgcgacagcgaccgggactgtctggacgggagtgatgaggcctcttgcccagttctcacctgtggcccagccagctttcagtgcaatagcagtacttgcatcccccagctctgggcttgcgacaatgatcccgactgtgaggacggatctgatgagtggccacagcgttgcagagggctgtatgtgttccaaggagatagtagtccgtgttctgcttttgagtttcactgcctgagtggcgagtgcatccattcctcatggcgttgcgatggggggcctgattgcaaggacaagtccgacgaagaaaattgtgccgtggccacctgccgaccagacgaatttcaatgctccgacggcaattgtatccatgggagccgacagtgtgatcgagagtacgactgtaaggacatgtccgatgaggttggctgtgtgaatgtgacgttatgcgagggccccaataaattcaaatgccacagcggagaatgcatcaccctggataaggtctgtaacatggcccgagattgccgagactggtctgatgagccaataaaggagtgcggcactgcagaatgtctagataacaacggtggctgttcccatgtgtgcaacgacctgaagatcgggtatgaatgtctttgcccagatggttttcagttggttgcccagagaaggtgtgaagacattgacgaatgtcaggatcccgacacctgttctcagttgtgtgttaatctggagggtggatataaatgtcagtgtgaggaaggtttccagctggatccgcataccaaagcttgcaaagcagtaggtagcatagcctacctgtttttcactaatcgacatgaagtacgaaaaatgaccctcgatcggtcggaatacacctccttgatacctaaccttaggaatgtcgtcgcccttgacaccgaggtggcctcaaatcgaatctattggagcgacttgtcacaaagaatgatttgcagcacacagcttgaccgggctcacggtgtaagctcgtacgatacagtcatatcacgcgacattcaggcgccggacgggctggcagtggattggattcactccaacatctactggacggacagtgtgctgggaaccgtgagcgtggccgataccaagggcgtaaagcgaaagactctgttcagggaaaacggatcaaagcctagagccatagtcgtagacccagtccatgggttcatgtactggacagattggggcacccctgcaaagatcaagaagggggggctgaatggggtggacatctactctctggtaactgaaaatatccaatggccgaacggaatcactttagacctgctctctggccgactctactgggttgattctaagcttcattctattagctccattgacgtcaatggcggtaacaggaaaaccatactcgaggatgagaaaagactggctcatcctttctccctggctgtctttgaagataaggtcttctggactgacataataaacgaagccatcttttccgcaaatcggttgaccggatctgacgtgaacttgcttgcagagaatctgctctccccagaagacatggttctattccacaaccttacgcagcctagaggggtcaattggtgcgaaagaactactctctctaacggcgggtgtcagtacctgtgcctgcccgcccctcaaatcaatccccatagccctaagtttacatgcgcatgccccgatggcatgctgctggccagagacatgcgatcttgtcttacagaggcagaggccgcggtcgccacccaagaaacctcgactgtcagactaaaggtgtcgagcaccgcagtgcgaactcagcacacaacaacccgccccgtgcccgatacgagtcgactgcctggagccacccctggtctgacaaccgtggaaatcgtgaccatgtcacatcaggccctcggcgacgttgccgggcgtggtaacgagaagaagccaagctccgtgcgagccctttctatcgtcctgcctattgtgttgctggtgtttctctgcctcggagtgtttctgctgtggaagaactggagactcaaaaatatcaattccattaatttcgacaatcctgtctatcagaaaaccaccgaagatgaagtgcacatttgccacaatcaagatgggtatagctatccttcacgacagatggtcagtttggaggacgatgtagcc

SEQ ID NO: 11189 - DNA, 2580 bp, Artificial Sequence
  derived and/or modified sequence
atgggtccttggggctggaagcttcgctggacagttgcactgctcctggcggcagcaggtactgcagtcggtgacaggtgtgaacgcaatgagttccagtgccaggacggaaagtgcatcagttataagtgggtctgtgacggttccgcagaatgccaggacggtagtgacgaaagtcaggagacatgcttgagtgtcacctgtaagagcggcgatttctcatgtggcggtagggtcaacaggtgcatcccacaattctggagatgtgacggccaggtcgactgcgataacggctcagatgagcaaggatgcccccccaagacttgctcccaagatgagtttcgctgccacgatggcaagtgcatttccaggcaatttgtgtgtgattctgatcgcgactgcctcgacggaagtgacgaagcatcctgtcctgtgctgacatgtggccctgccagctttcagtgcaattcttctacatgtattccccaattgtgggcatgtgataacgaccctgactgcgaggatggcagtgatgaatggccacagagatgtaggggtctgtatgtattccagggagatagctccccctgttcagcgtttgagtttcactgcttgtctggtgaatgcatccacagttcctggagatgcgacggtggacccgactgtaaagacaaaagtgacgaggaaaattgcgcagttgctacatgtagacctgacgaatttcagtgttcagacggaaactgtatccacggtagtaggcaatgtgaccgcgaatacgactgcaaagacatgtccgatgaggtcggctgcgttaacgtgaccctgtgtgagggtccaaacaagttcaagtgccactcaggcgagtgcatcactctggataaggtctgtaatatggcaagggactgtagggactggtccgacgagccgatcaaggagtgcggcaccgctgaatgcttggataacaacggcggttgctctcacgtgtgtaacgacctgaaaatcggctacgaatgcctgtgtcccgatggctttcaactcgtcgctcagaggagatgtgaggacatcgacgagtgccaggaccctgatacatgctctcaactctgtgtgaacctcgaaggtggttataagtgtcaatgcgaggagggcttccagctggacccccacaccaaggcttgcaaagccgtaggctccatcgcatacttgttttttacaaacaggcatgaagtgagaaaaatgactctggataggagtgaatacacatccctgatccctaacctccgcaacgttgttgcactggacaccgaggtggcctccaacagaatctactggtcagacctgtcacaacgcatgatttgctctacacagctggaccgcgcgcacggcgtgagttcctatgatactgtaatctctagagacatccaggctccagacggtcttgcggtcgattggatccactctaatatatactggacagattctgtcctgggaaccgtgagcgtcgctgataccaagggcgtaaagaggaaaacactgttcagggaaaacggatctaagccccgcgcaatagtagttgaccctgttcacggcttcatgtactggaccgattggggaacaccagccaaaattaagaagggaggactgaatggtgtcgatatatactctttggttacagaaaatattcagtggccgaacggtatcacccttgatctgctgtctggaaggctctactgggtggattcaaaactgcactctatcagctccatagatgttaatggtggaaatcgcaagaccatccttgaagatgagaagcgcctggcccatcctttctccttggccgtgttcgaggataaggttttctggaccgatattatcaacgaggctatcttctctgctaatcgcctgacaggctccgacgttaacctgcttgctgaaaatctgctttcacctgaggacatggtactgtttcacaatctgacacagccaagaggagtaaactggtgtgaaaggactacactttctaatggtggttgtcaatacctttgcctcccggcgcctcaaattaatcctcactctcctaagttcacatgcgcttgccccgacggaatgcttctggcacgcgatatgcgcagttgccttaccgaagcggaggctgctgttgctacccaggaaacttcaacagttcgcctgaaggtctcaagtaccgcggtgaggactcagcataccaccaccaggcccgtgccagatacgagtagattgccaggcgcgactcctggacttaccactgttgagattgtaacgatgtcacaccaagctcttggtgacgtggccggtcgcggaaacgagaagaagcctagctctgtcagagccctcagtatagttctgcctatcgtgctgctggtgttcctgtgtcttggagtctttttgctgtggaagaactggaggctgaagaacataaattccatcaattttgacaacccagtataccagaagactacggaggacgaagtgcatatttgtcacaaccaggacggttactcatacccttcccgccagatggtctctttggaggatgatgttgcg

SEQ ID NO: 11190 - DNA, 2580 bp, Artificial Sequence
  derived and/or modified sequence
atggggccttggggatggaagctgcgctggactgtggcactgctgctggctgcagcgggaacggccgtgggcgacaggtgtgagcgtaatgaattccagtgccaagacggcaagtgtatttcatacaagtgggtgtgtgatggatcagccgaatgtcaggatggctcggacgaaagccaagagacgtgcctgtccgttacttgtaagtcgggcgacttctcgtgcggcggacgcgtgaatcgctgcatcccgcagttctggcggtgcgacgggcaagtcgactgcgacaacggcagtgacgaacaaggatgcccgccaaagacttgctcgcaggacgaatttcgttgccacgacggtaaatgtatctcacgccaatttgtctgcgactcagatcgggattgcctggacggctctgatgaggcgtcgtgcccggtcctgacctgtggaccagcgagtttccagtgcaactcctccacttgcatcccgcaactgtgggcatgcgacaatgacccagattgcgaggacggttcggacgaatggccgcagcgctgcagagggctgtatgtgttccagggtgactcaagcccatgctcagcctttgagttccactgtttgagcggagagtgtatccactcctcatggcgctgcgatggaggtcctgattgcaaagacaagtccgacgaagaaaattgtgcagtagccacctgccggcccgatgagttccagtgttccgacggcaactgcatccatgggagccggcagtgcgacagagagtacgactgcaaagatatgtcagacgaagtcggctgcgtgaacgtgaccctctgcgagggaccaaataagttcaaatgccactcaggagaatgcataactctcgacaaagtgtgcaatatggccagggactgcagggactggtcagatgagccgattaaggaatgcggtactgcggaatgcctggacaataacggcgggtgtagccatgtgtgtaacgatctgaagattggatacgagtgcctctgtccagatggattccagctggtggctcagcggagatgtgaagatattgatgaatgccaggaccctgatacctgttcgcagttgtgtgtgaatctggagggaggctacaagtgccaatgcgaggagggattccaactggatccacacactaaagcctgcaaggccgtcggatctatcgcgtacctgttcttcacgaacaggcatgaagtccgcaagatgactctggatagaagtgaatacacctctctcatcccgaacctgcgcaacgtggtggccctggataccgaagtggcttccaaccggatctactggtccgacctgtcccagcggatgatctgctcgacccagctggatcgggcccacggagtgagctcgtacgacaccgtgatctccagagatattcaagccccggacgggttggctgttgattggatccattcgaacatctactggacggactccgtgctgggaacggtgtccgtggctgatacgaaaggagttaagcggaaaaccctgttcagggagaacggatcgaagccacgtgcaatcgtggtcgacccggtccacggtttcatgtactggaccgactggggaaccccggctaagatcaagaaaggcgggctcaacggcgtcgacatctacagcctggtgacggagaacatccagtggcctaacggaattactctggatttgctgtcaggtcgactctactgggtggactccaaactgcactccatcagcagcattgacgtgaacggaggaaatcgcaagactatcctggaggacgaaaagagactggcacacccgtttagccttgcagtgtttgaagataaggtgttctggaccgatatcatcaacgaagccattttctcggccaaccggctgactggatctgacgttaacctcctcgccgagaatctgctttcgccggaggacatggtgttgttccataacctgacgcaaccacggggagtcaactggtgcgaacggaccactctcagcaatggcggttgccagtacctctgtttgccggcgccccaaatcaaccctcattcacccaaattcacctgcgcttgtccggatggaatgctcctggccagggacatgcgctcgtgcctgacggaagccgaagccgctgtcgcgacccaagaaaccagcaccgtcagactgaaggtgtcctccaccgcagtgcgcactcaacacaccacgacgaggcccgtgcctgatacctcgaggctgcctggcgcgacccctggacttactaccgtcgagatcgtgactatgtcgcatcaggcactgggcgacgtggctggcaggggaaatgaaaagaagccgtcgtcagtgcgggccctgtctatcgtgctcccgatcgttctcctcgtctttctgtgcctcggggtctttctgctctggaagaattggcgactcaagaatatcaactcgatcaactttgataaccctgtgtaccaaaaaacgactgaagatgaggtgcacatctgccacaaccaggatggttattcctacccgtcccggcagatggtgagtctggaggatgacgttgcc

SEQ ID NO: 11191 - DNA, 2580 bp, Artificial Sequence
  derived and/or modified sequence
atgggaccatggggatggaaactcagatggacggtcgcgctgctgctggcagccgctgggacggccgtgggagacagatgcgaaaggaatgaattccagtgtcaagatggcaagtgcatctcttacaaatgggtctgcgatggctctgcggaatgtcaggatggctccgacgaatcacaggaaacctgtctaagcgtgacctgcaaatcaggcgacttcagctgcggcggacgggtcaaccgatgtatccctcagttttggaggtgcgatggccaggtcgattgcgataacggttcagatgagcagggctgtccgcctaaaacctgttctcaggacgaatttaggtgtcacgacggcaaatgtatatctagacagtttgtgtgcgactctgaccgcgactgccttgacggctcggacgaggcatcttgtccagtgttgacgtgcggccccgcctcttttcagtgcaacagttctacctgcatccctcaactgtgggcgtgtgacaacgaccctgattgcgaagatggatccgatgagtggccccagcgctgtagggggctgtatgttttccagggtgacagctccccttgttcagcatttgagttccactgcctaagcggcgaatgcatccatagctcatggcgctgtgacggaggacccgattgcaaggacaaaagcgacgaagaaaattgcgcggtggctacgtgccggcctgatgaatttcagtgttctgacggtaattgtattcacggtagccgtcagtgcgacagagaatatgattgcaaagacatgagcgacgaagtgggctgtgttaacgtgacgctgtgcgagggcccgaataaattcaagtgtcattcgggggagtgcataacgctggataaagtctgtaacatggctcgagattgtcgtgactggtctgacgagcctattaaagaatgtggaacagctgagtgtctggataataacggaggatgttctcacgtgtgcaatgatctgaagattggatacgagtgtttatgtccggatggctttcagttggtggcgcagcggcgctgtgaagacatcgacgaatgccaagatcccgacacttgttctcaattatgtgtcaatctggaggggggatacaagtgccaatgcgaggaaggcttccaactcgacccccataccaaggcgtgcaaagccgtgggctctatagcatatcttttctttaccaaccgccatgaagtgcgtaagatgaccttggacaggtccgagtacaccagtcttatccctaacctgcggaacgttgtcgctcttgatacagaggtagcctcgaatagaatctactggagcgacttgagtcagcgtatgatttgtagtacccagctcgatcgggcccacggcgtctctagttatgacacagtaatctcgcgggacattcaggccccggacggcctggctgttgactggattcactcaaacatatactggactgattccgtcctcggtactgtaagcgtggcagacacaaaaggcgtgaaacgcaagactctattcagggagaatgggtccaagcctcgggcaattgtcgtggacccagtgcatggcttcatgtactggaccgattggggaactcccgccaaaattaaaaagggcggactgaatggtgtggacatttatagcttggtgacggaaaatattcagtggcctaacggaattactctcgatctgctgtctgggcggctgtactgggtggattccaaacttcattccatctccagtatcgacgtgaatggggggaacaggaaaacgatcctcgaagatgagaagcgccttgcgcaccctttctcgctcgcggtctttgaggacaaagtcttttggactgatatcatcaatgaggcgattttctccgcaaatcgcctgaccggatctgatgtcaatcttctcgcagaaaatctcttatcaccagaggatatggtattatttcacaacttgacccaaccaagaggcgttaactggtgcgaacggaccaccctctccaacggcgggtgtcagtatttgtgtctgccagcccctcagataaacccacacagtccgaaattcacctgcgcctgccccgacggcatgctgttggcacgagacatgaggtcctgtctcaccgaggccgaggccgccgtggctactcaggaaacaagcaccgtaaggttgaaggtgagctctacagccgtgcgtactcagcacacaacgacaaggccagttccggatacgtcccgcctgccgggtgcgacgccgggattaacgaccgtcgagatcgtaactatgtcacatcaggcattgggagatgtcgccggacgggggaatgagaaaaaaccttcttccgtccgagctctgagcatcgtgttgcccattgtgctcctggtgtttctgtgcctcggggttttcttgttgtggaaaaattggcgactaaaaaacatcaattccatcaacttcgataatccggtgtatcagaagactaccgaggacgaagtccacatctgccataaccaggacggctacagctacccatcccgacagatggtatccctagaggatgatgtggcg

SEQ ID NO: 11192 - DNA, 2580 bp, Artificial Sequence
  derived and/or modified sequence
atgggtccttggggatggaagctccgctggactgtggcgctgctccttgctgccgccggaactgcggtgggagacaggtgcgaacgcaatgaattccaatgtcaggatggaaagtgtattagctacaagtgggtgtgtgatggctcggcggagtgccaggacggcagtgacgagtcgcaggaaacctgcctgtccgtcacttgtaagtccggagacttttcctgtggaggacgtgtgaacaggtgtatcccgcagttttggcgttgtgacggccaggtggactgcgacaacggatccgatgagcaaggatgcccgccgaagacttgtagccaagatgagttccggtgccacgacggcaagtgcatctcacggcaattcgtgtgcgattccgaccgcgactgtctggatggatcagatgaggcatcgtgccctgtgttgacctgcggcccagcatccttccagtgtaactcctccacctgcatccctcagctgtgggcctgcgataatgatccagattgcgaagatggtagcgacgaatggccgcaaagatgccgcggtttgtacgtgtttcagggcgactcatccccatgcagcgccttcgaatttcactgcctctcgggagagtgtatccactcctcctggcgctgcgatgggggaccagattgcaaggacaaatcggatgaggaaaactgtgctgtcgctacttgcaggccggacgagttccaatgctcggatggaaactgcattcatggatcgcgccagtgtgatcgggaatacgattgtaaggacatgtcagacgaggttgggtgcgtcaatgtgaccctgtgcgagggaccgaacaagtttaagtgccattcgggagaatgcatcacgctggataaagtgtgtaatatggcccgcgactgtcgggactggtccgacgaacctatcaaagagtgtggaactgcagagtgcctcgacaacaacggcggatgctcgcacgtgtgcaacgacttgaagattggatacgaatgcctgtgcccagacgggtttcagctggtcgcgcagcgccggtgcgaagacatcgatgagtgccaggatccagatacgtgcagccaactgtgcgtgaatctcgaaggaggctacaaatgccagtgcgaagagggctttcagctcgatccgcataccaaagcgtgcaaggccgttggaagcatcgcatatctcttcttcactaacagacacgaggtgaggaaaatgacccttgaccggtcagagtacacctccctgatcccgaatctgagaaacgtggtggcactggacaccgaggtcgcctcgaacagaatctactggtcggatctgtcgcaacgcatgatctgctcgactcagctggaccgcgcacatggagtgtcttcctacgacactgtgatctcccgcgacatccaagccccggatggactggcggtggactggatccacagcaacatctactggacggattcggtgctcgggactgtatcggtggctgacaccaagggtgtgaaacggaagaccctgttccgcgaaaacgggagcaaaccgcgcgccatcgtcgtggaccctgtgcatggattcatgtactggactgattgggggacgccagcgaaaatcaaaaaggggggtcttaacggagtcgatatctacagcctcgtgaccgagaacatccaatggcctaatggaatcaccctcgacctgctctccggaagactttactgggtggactcgaagctgcattccattagttcaattgacgtgaacggcggcaataggaaaactatactcgaggacgagaaacggctggcacacccattcagtctcgccgtgttcgaagataaagtcttctggactgatatcatcaacgaagctatcttcagcgcgaatcggctgacgggatccgacgtcaacttgctggccgaaaacctgctgtcgccggaggacatggtgctgtttcacaaccttactcagccgcgcggcgtcaactggtgcgagcgcaccacgctttccaatggcggctgccaatacttgtgcctgcccgccccgcaaattaacccgcattcgcctaagttcacttgcgcgtgccccgacggaatgctgctggctcgagacatgcggtcctgcctcaccgaggcagaggcagcggtggctacccaggagacttccactgtgagactgaaggtgtccagcaccgcagtgcgcactcagcatactactactcgccccgtgccggacacctccaggctgccgggtgcaacgccgggcctgaccaccgtcgaaatagtgactatgtcgcatcaggccttgggtgatgtcgcaggccgggggaatgagaagaagccgtcctcggtccgagccctgtcaatagtgctcccaatcgtcctcctcgtgttcctctgtctgggagtgttcctcctgtggaagaattggagactcaagaatatcaactcaatcaactttgataatcccgtgtaccagaagactacggaagacgaagtgcacatctgccacaatcaggatggctactcctacccttcccggcagatggtgtccctggaagacgatgtggcc

SEQ ID NO: 11193 - DNA, 2580 bp, Artificial Sequence
  derived and/or modified sequence
atgggcccatgggggtggaaacttaggtggaccgttgcgctgctgctcgcagccgctggcactgctgttggtgatcgatgcgaacggaatgagtttcagtgtcaggatggtaagtgcatctcatacaagtgggtgtgtgacggttcagccgagtgccaggacggaagcgacgagtcccaggagacttgcttgtcggtgacttgcaaatcgggagacttcagctgcggaggacgagtcaaccgctgtatcccacagttttggagatgtgacggtcaagtcgattgcgacaatggatcggacgaacagggatgtccaccgaaaacctgttcccaggacgagttccggtgtcatgacggaaaatgcattagccggcagttcgtctgcgattccgatcgggactgtctcgacggatcggacgaggcctcatgtccagtgcttacctgcggacccgcgagcttccagtgcaactcgtcgacctgcatcccccagttgtgggcctgtgataacgacccggattgcgaagatggttcagacgaatggccgcaacgctgccgcggtctgtacgtgtttcagggagattcgtccccgtgctcggcgttcgaattccactgcctgtcgggagaatgtatccacagctcttggaggtgcgatggaggtccagattgcaaagacaagtccgacgaagaaaactgcgccgtcgcaacctgccgcccggacgaatttcagtgttccgacggcaactgcatccatggaagcaggcagtgcgaccgcgaatacgattgcaaggatatgtctgatgaggtcggctgtgtgaacgtgactctgtgcgaagggcccaataagttcaaatgtcactccggagagtgtattacgctggacaaggtgtgtaatatggctcgcgactgcagagattggtcggacgaaccaatcaaagaatgcggcaccgccgagtgccttgacaacaacggtggatgctcgcacgtgtgcaatgatctgaaaatcggctacgaatgcctttgccctgacggttttcaactggtcgcccagcgcaggtgtgaagatatcgacgaatgccaagatccggacacttgctcgcaactctgcgtgaacctggaggggggatacaagtgccagtgcgaagagggattccaacttgacccgcacaccaaggcttgtaaggccgtgggatccatcgcgtacctcttctttacgaataggcatgaggtcagaaaaatgaccttggatcggtccgagtacacctcgctgatcccgaaccttcgcaacgtcgtggccttggacaccgaagtcgcatcgaaccggatctactggtccgatctgagccagaggatgatctgctcgactcaactcgaccgcgcccacggagtgtcgagctacgacaccgtgatttcacgcgacatccaggcccctgacggactcgccgtcgactggatccactctaacatttactggaccgattcggtgctggggactgtgtcagtggctgacactaaaggtgtgaagagaaagacgctgttcagagaaaacggaagcaagcctagagccattgtggtggaccctgttcatggattcatgtactggactgactggggcactccggccaagattaagaaaggaggcttgaacggagtggatatctactcgctggtcaccgagaacattcaatggcctaatggaatcaccctggacctcctttccggccgcctgtactgggtcgactccaagctgcactccatctctagcatcgacgtgaacggaggcaacagaaagaccatcctggaagatgagaaacgcctcgcccatcccttttcgctggcggtgttcgaagataaagtcttttggaccgacatcatcaacgaagcgatcttttccgcgaacagacttaccggcagcgacgtgaatctgctcgccgagaatctgctgtctccggaagatatggtcctgttccacaatctgactcagccacgcggagtgaactggtgcgaaagaactaccctctcaaacggaggctgccaatacctctgtttgccagccccacaaatcaatccgcactcgccgaagttcacctgcgcctgtcctgacggcatgctcttggcccgcgacatgcggtcttgcctgaccgaagctgaggcagccgtcgcgactcaagaaacgtccactgtgaggttgaaggtgtcctccaccgctgtcagaactcagcataccaccactcggcctgtcccggacactagccgcctgccgggcgctaccccgggcttgaccaccgtggagatcgtgacgatgtcacatcaggccctgggagatgtggccggccggggaaatgagaagaagccatcatcggtccgcgccctgtcgatcgtgctgccgattgtcctgctggttttcttgtgcctcggagtgttcctcctctggaaaaactggaggctgaagaacattaactcgatcaatttcgataatcctgtgtaccagaaaacgaccgaagatgaagtgcatatctgccataaccaggatgggtacagctacccgtcgcgccaaatggtgtcgcttgaagatgacgtggct

SEQ ID NO: 11194 - DNA, 2580 bp, Artificial Sequence
  derived and/or modified sequence
atgggtccgtggggttggaaactacgatggacggtagcgctattattagcggcggcgggtacggcggtaggtgatcgatgtgaacgaaatgaatttcaatgtcaagatggtaaatgtatatcgtataaatgggtatgtgatggttcggcggaatgtcaagatggttcggatgaatcgcaagaaacgtgtttatcggttacgtgtaaatcgggtgatttttcgtgtggtggtcgtgttaatcgatgtataccgcaattttggcgatgtgatggtcaagttgattgtgataatggttcggatgaacaaggttgtccgccgaaaacgtgttcgcaagatgaatttcgatgtcatgatggtaaatgtatatcgcgacaatttgtatgtgattcggatcgtgattgtctagatggttcggatgaagcgtcgtgtccggttctaacgtgtggtccggcgtcgtttcaatgtaattcgtcgacgtgtataccgcaactatgggcgtgtgataatgatccggattgtgaagatggttcggatgaatggccgcaacgatgtcgtggtttatatgtttttcaaggtgattcgtcgccgtgttcggcgtttgaatttcattgtttatcgggtgaatgtatacattcgtcgtggcgttgtgatggtggtccggattgtaaagataaatcggatgaagaaaattgtgcggtagcgacgtgtcgtccggatgaatttcaatgttcggatggtaattgtatacatggttcgcgacaatgtgatcgtgaatatgattgtaaagatatgtcggatgaagtaggttgtgtaaatgttacgctatgtgaaggtccgaataaatttaaatgtcattcgggtgaatgtataacgctagataaagtatgtaatatggcgcgagattgtcgagattggtcggatgaaccgataaaagaatgtggtacggcggaatgtctagataataatggtggttgttcgcatgtttgtaatgatttaaaaataggttatgaatgtctatgtccggatggttttcaactagttgcgcaacgacgttgtgaagatatagatgaatgtcaagatccggatacgtgttcgcaattatgtgtaaatttagaaggtggttataaatgtcaatgtgaagaaggttttcaattagatccgcatacgaaagcgtgtaaagcggtaggttcgatagcgtatttattttttacgaatcgtcatgaagttcgaaaaatgacgctagatcgatcggaatatacgtcgttaataccgaatttacgtaatgtagttgcgttagatacggaagtagcgtcgaatcgtatatattggtcggatttatcgcaacgtatgatatgttcgacgcaactagatcgagcgcatggtgtatcgtcgtatgatacggttatatcgcgagatatacaagcgccggatggtctagcggttgattggatacattcgaatatatattggacggattcggttttaggtacggtttcggtagcggatacgaaaggtgtaaaacgaaaaacgttatttcgagaaaatggttcgaaaccgcgagcgatagtagttgatccggttcatggttttatgtattggacggattggggtacgccggcgaaaataaaaaaaggtggtttaaatggtgttgatatatattcgctagtaacggaaaatatacaatggccgaatggtataacgttagatctactatcgggtcgtctatattgggtagattcgaaattacattcgatatcgtcgatagatgtaaatggtggtaatcgtaaaacgatattagaagatgaaaaacgtttagcgcatccgttttcgttagcggtttttgaagataaagttttttggacggatataataaatgaagcgatattttcggcgaatcgtctaacgggttcggatgtaaatctactagcggaaaatctattatcgccggaagatatggttctatttcataatctaacgcaaccgcgtggtgtaaattggtgtgaacgaacgacgttatcgaatggtggttgtcaatatttatgtttaccggcgccgcaaataaatccgcattcgccgaaatttacgtgtgcgtgtccggatggtatgttattagcgcgagatatgcgatcgtgtttaacggaagcggaagcggcggttgcgacgcaagaaacgtcgacggttcgactaaaagtttcgtcgacggcggtacgaacgcaacatacgacgacgcgtccggtaccggatacgtcgcgtctaccgggtgcgacgccgggtttaacgacggtagaaatagtaacgatgtcgcatcaagcgttaggtgatgtagcgggtcgtggtaatgaaaaaaaaccgtcgtcggttcgagcgttatcgatagttttaccgatagttctactagtttttttatgtctaggtgtatttctattatggaaaaattggcgtttaaaaaatataaattcgataaattttgataatccggtatatcaaaaaacgacggaagatgaagtacatatatgtcataatcaagatggttattcgtatccgtcgcgtcaaatggtatcgttagaagatgatgtagcg

SEQ ID NO: 11195 - DNA, 2580 bp, Artificial Sequence
  derived and/or modified sequence
atgggaccatggggctggaaactgaggtggacagtggctttgctgcttgccgccgctggtactgctgtgggagaccgctgtgagcgtaacgagtttcagtgccaagacggaaagtgtatttcatacaagtgggtgtgtgacggctcagcagagtgtcaggatggaagtgacgaaagccaagaaacctgtcttagcgtaacatgtaaatccggagacttttcctgcggtggtcgcgtgaatcgctgtattcctcaattttggcgctgtgatggacaggtggattgcgacaacggatccgatgagcaaggttgtccccctaaaacctgttcacaagacgagtttaggtgtcacgatggaaagtgtatctcacgtcagttcgtgtgcgacagtgatcgtgattgtttggacggatcagatgaggcctcatgtccagtcctgacctgcggaccagcctcatttcagtgtaattcatccacttgtatcccccagctctgggcatgcgacaatgaccctgactgcgaggatggctccgacgagtggccacagagatgtaggggactctatgtttttcagggagattcctccccttgctctgctttcgaattccactgtctcagtggtgagtgtattcatagttcctggagatgcgacggcggccccgattgcaaggacaagagcgatgaggagaactgtgctgttgctacatgccgccctgacgagttccagtgctctgatggtaactgcattcacggcagccgtcaatgtgaccgtgaatatgactgcaaggatatgtccgacgaagtgggctgcgttaatgtgaccctgtgcgaaggaccaaataagtttaagtgccactcaggcgagtgtattactctggacaaggtgtgtaatatggctcgcgactgtagggattggagcgacgagcccattaaggaatgcggaactgctgagtgcctggataacaatggtggctgtagtcatgtgtgcaacgacctcaagataggctacgagtgcctttgccctgatggtttccagctggtagcccagagacgttgcgaagacattgacgagtgccaggatcccgacacatgctcacagctctgcgtgaacctcgaaggcggctacaagtgccaatgcgaagaaggttttcagctggacccacacaccaaagcatgcaaagcagtaggatctattgcatacttgttcttcacaaatagacacgaagttcgcaagatgaccctggataggtccgagtacacttcacttatacctaatctgcgcaatgttgttgcactcgacactgaggtagcctcaaacagaatttactggtccgatctttctcagcgcatgatttgctctacacaactcgaccgcgcccacggtgtaagtagttacgatactgttatctcccgcgatatccaagcccctgacggactggccgtagactggattcactccaacatctattggaccgatagtgtgctcggtaccgtaagcgttgctgacacaaaaggagtgaaacgcaaaaccctcttccgcgagaacggttccaagcccagggctatagtcgtcgacccagtacatggattcatgtattggacagactggggaacaccagctaagatcaagaagggcggcttgaacggcgtagatatttactcacttgtgaccgagaatatccaatggcccaacggtataactctcgacctcctgagcggacgtttgtactgggttgatagcaagcttcactctatctcctcaatcgacgttaacggtggtaacagaaagactatcctggaggatgagaagcgtcttgcccacccattctctctggccgtattcgaggacaaggtcttttggactgatattatcaacgaagcaattttttctgctaatagactcactggatcagacgtgaaccttctggccgaaaacctgctctcacctgaagacatggtgctgtttcacaacctgacccagcctcgtggcgtcaactggtgcgagcgcactactctgagtaacggaggatgccagtacctgtgtttgcccgccccacagataaaccctcatagccctaaattcacatgtgcatgcccagatggtatgctcctggcccgcgatatgcgttcttgtctgaccgaagccgaagctgccgttgccacccaagagaccagcactgttagactcaaggtgtcttccactgctgtgcgtactcagcacactacaaccaggccagtacccgacaccagccgtctgcccggagccacacctggactgactactgtagagatcgtgacaatgtctcaccaagccctgggtgacgtggccggccgtggcaacgagaaaaagccttctagcgttcgcgctctgtctattgttcttccaatcgtactgctggttttcctttgtctcggagtattcctcctctggaagaactggagactcaagaacatcaactcaattaattttgacaatcctgtttaccagaaaacaacagaggatgaagtgcacatctgtcacaatcaggacggctattcatacccctcacgtcagatggtgtcccttgaggatgacgtggcc

SEQ ID NO: 11196 - DNA, 2580 bp, Artificial Sequence
  derived and/or modified sequence
atgggtccttggggttggaaacttagatggactgtggcactccttctggcagcagcaggtacggccgtgggcgaccgctgcgagagaaacgagtttcaatgtcaggacgggaagtgcatcagctacaaatgggtgtgcgacggatcggcagagtgtcaggacggaagcgatgaatcccaagaaacctgtctttcggtcacctgcaagtccggtgacttttcctgtggaggacgcgtgaataggtgcatccctcagttttggcgctgtgatgggcaggtggactgtgataacggatcagacgagcaaggttgcccacctaaaacctgttcgcaggatgagttccgctgtcatgatggaaagtgtattagccgacagtttgtctgcgattcggacagagattgcctggatggctccgatgaagcctcctgccctgtgcttacctgtggaccggccagctttcagtgtaacagctccacgtgcattccacaactttgggcctgcgacaacgacccagattgtgaagatggtagcgatgaatggcctcaacgttgtagaggactctacgtgtttcaaggtgactcttcaccctgtagcgcattcgaatttcattgtctttccggagaatgcatacactcatcgtggcgttgtgatggcggtccggattgtaaagacaagtccgatgaggagaactgtgcagtggccacttgtcgccctgatgagtttcagtgctcggatgggaattgtattcacggatcccgacaatgtgatcgcgagtacgactgtaaagacatgtcggacgaggtgggatgtgtgaatgtgaccctgtgcgaaggtcccaacaagttcaaatgccacagcggggaatgtatcactctggacaaggtctgcaacatggccagagactgtagggattggtccgacgaaccaattaaggaatgcggaactgcagaatgtcttgataacaacggcggatgttcccacgtgtgcaacgatctcaaaattggatatgagtgtctgtgccctgatggctttcagcttgttgcacagagacggtgtgaagatattgacgaatgccaagatccagatacttgttcacaactctgtgttaatctggaggggggctacaaatgtcagtgcgaggaagggtttcaactggaccctcataccaaggcctgtaaggcggtcggttcaatcgcataccttttcttcactaaccggcacgaagttaggaagatgactctcgataggtcagaatacacctccctcattcccaatcttcgtaacgtggtggcactggatactgaagtggccagcaatagaatctactggtcagatctctcgcaacggatgatttgctcgacccaactggatagagcacatggagtgagcagctatgataccgtcatctcgcgggacatccaagcaccggacggtctggcggtggattggatacattcgaacatctactggacggactcggtccttggcaccgtgtccgtggcagatactaagggcgtgaagagaaagacgctgtttcgggaaaacggatcgaagccacgggctattgtcgttgaccctgtgcacggttttatgtactggaccgattggggaacccctgcgaagattaagaagggtggccttaacggtgtggacatatactctctggtgaccgaaaacattcagtggccaaacggaattaccctggacctcctttccggacggctgtactgggtcgattccaagctccatagcattagctcaattgatgtaaacggaggaaatcgcaagaccatcctcgaagatgaaaagcggctcgcccatcctttttcgctcgcagtgtttgaggataaagtattctggaccgacataatcaacgaggccatattctctgctaaccgtcttacgggttccgacgtgaacctccttgcggagaatcttctgtcccccgaggacatggtccttttccacaacctgacccagccgaggggcgtgaactggtgtgaaagaaccaccctctccaacggaggatgccaatacctgtgtttgcctgcacctcagataaacccacatagccctaaattcacttgcgcgtgccccgatggcatgctgctcgcacgggatatgagatcgtgcctcaccgaagccgaagcggctgtggcgacccaggagacttcaactgttcgcctcaaggtcagctccaccgcagtgcgcacccaacataccactacgcgccctgtgccagacactagtaggttgcctggggccactccaggcctgactactgtcgaaatcgtcaccatgagtcatcaagcacttggtgacgtcgccggtcggggtaacgagaagaagccctccagcgtgcgggcactttctattgtgttgcccattgtgctgcttgtctttctttgtcttggagtgtttctgctgtggaaaaactggagactcaagaacatcaactcaataaacttcgacaatccagtgtatcaaaaaaccaccgaggacgaggtgcatatttgccataatcaagatggttacagctacccttcgcgccagatggtttccctggaggacgatgtggca

SEQ ID NO: 11197 - DNA, 2580 bp, Artificial Sequence
  derived and/or modified sequence
atgggtccttggggttggaagctgcgctggacggtggcactgctgttagcggccgcaggcactgccgtcggcgaccggtgcgaacgcaatgagtttcagtgccaggacggcaaatgcatctcttacaaatgggtgtgcgatggttccgctgaatgccaagatggcagcgatgagagccaggaaacctgcctcagcgtcacctgtaagtctggtgacttttcttgtggcggcagggtcaaccgctgcatccctcagttctggcggtgcgacgggcaagtggattgcgataacggatcggacgaacaaggttgcccgccaaaaacctgcagccaggacgagttccgttgtcacgacggtaagtgcatcagccgtcaatttgtgtgcgattcggaccgagactgtctggacgggagcgacgaagcgagctgccctgtcctgacttgtggtcctgcttcgttccagtgtaactcatccacttgcattccacagctttgggcttgcgacaacgacccagactgtgaggatggaagcgacgagtggccccagcggtgtcgcggcctttacgtgttccagggagattccagcccttgcagcgcattcgaatttcattgcctgagcggcgagtgtatccacagcagctggcgttgcgatggtggcccggattgcaaggataaaagcgatgaagaaaactgcgcagtggccacgtgtcgccccgacgagttccagtgctccgacggcaactgtatccacgggtcccgccagtgcgatcgcgaatacgattgcaaggacatgtccgatgaggtgggttgtgtcaacgtcactctgtgtgaaggtcctaacaaatttaaatgtcatagcggcgaatgcatcaccctggacaaggtatgcaatatggcgcgtgattgtcgtgactggtctgatgagcctatcaaggaatgtggtacggcagagtgcctggataataatggagggtgtagccatgtgtgtaacgacctgaagatcggttatgagtgtttgtgtccagatggcttccagttggtggcccagcgcagatgcgaggatatcgatgagtgtcaggatcctgatacttgcagccaactgtgtgtcaacctggaaggcggttacaagtgccagtgcgaggaaggattccagctggaccctcataccaaggcctgcaaggctgtcggtagcattgcctatctgttctttaccaatcgtcatgaggttcgcaaaatgacgctggatcgaagcgagtacacgagcttgattccgaatttgcgcaacgtggtggcgctggacaccgaagtggccagcaaccgaatttactggagcgacttgtcccagcgcatgatttgctcaacgcagctggaccgcgcacatggcgtttcatcttacgacacagttatttcacgcgacattcaagcaccggacggattggcagtggactggatccactctaatatctattggacggatagtgttctgggcactgttagcgtcgcggatactaaaggtgtaaaacgaaagaccctattccgcgaaaacgggtctaaaccgcgcgcgattgtggtggaccctgtacatggctttatgtattggaccgattggggtaccccggccaagatcaagaaggggggtctgaatggcgttgatatctacagcttggtgactgagaatatccagtggcctaacggcataacgctggatttgctgagcggacgactgtattgggtggattccaagctacactcgatctcttcaattgacgttaatggtggcaatcggaagactattttggaagacgaaaagcgcctggcccatccatttagcctagccgtttttgaggataaggttttttggacggatatcatcaatgaggccattttctccgctaaccgcttgacaggttcggatgtgaacctgctggccgagaatctgttgagcccagaagatatggtcctgttccacaacctgactcagcctcgcggtgtcaattggtgtgaacgtaccactctgtcaaatggtggctgccagtatctctgcctaccggccccgcagatcaacccgcatagccccaagttcacctgtgcatgcccagacggtatgcttctcgcgcgtgacatgcgcagctgcttgacggaggccgaggcagccgtggccacccaagaaacttctactgtgcgcctgaaggtctcctcaactgccgtaaggacgcagcatacgacgacccgtcctgttccggatacgtcacgcctgcctggggccacgccgggtcttaccaccgtggaaattgtgactatgtcgcatcaagcccttggtgacgtggctggtcggggcaacgagaaaaagccttcttcagttcgagccctgagcattgtactgccaatcgtcctgctggtgtttctgtgcctgggtgtctttttactgtggaagaactggcgtttaaaaaacataaactctattaactttgacaaccctgtttaccaaaaaacaacggaagatgaggtgcacatatgtcacaatcaggacggttattcctacccaagccgccagatggtttctttagaagacgatgtggcg

SEQ ID NO: 11198 - DNA, 2580 bp, Artificial Sequence
  derived and/or modified sequence
atgggtccttggggctggaaactgaggtggactgtggcattgctactagctgcggctggaactgcagtaggagatcgttgcgaacgaaatgaattccaatgtcaagatggaaaatgtatctcgtataaatgggtatgtgatggatccgcagagtgccaagatggatccgatgaaagtcaagagacttgtttatctgttacatgtaagtcaggagatttctcatgtgggggtcgtgttaatcgatgtattcctcagttttggcgctgtgacggtcaagtagattgcgacaatggttcagacgagcagggatgtccaccaaagacatgttctcaagatgagttcagatgccatgatggaaagtgcatatcccgacagtttgtctgtgatagtgaccgtgactgcctcgatggatccgatgaagcttcatgcccggtgctcacatgcggcccagcctcattccaatgtaacagtagcacttgtatccctcaactttgggcttgcgataatgatccagattgcgaagatggatccgatgagtggccacaacgttgcagaggattgtatgttttccagggagatagttctccttgttcagcatttgagtttcactgcttgagcggagagtgcatccattctagttggagatgtgatggcggaccagactgcaaagataaaagcgacgaagaaaactgtgctgtagctacatgtcgtcctgacgaattccagtgctccgatggaaactgtattcacggtagtcgacagtgtgatagagagtacgattgtaaagacatgtcagatgaagttggatgtgtgaacgtaacactttgtgagggacctaacaagttcaagtgtcattcaggagaatgtatcacgttggataaggtctgcaatatggcaagagactgcagggactggtctgatgaaccaattaaggagtgtggaactgcagaatgccttgacaataatggaggatgttcacatgtttgtaatgatctgaaaattggttacgaatgcttgtgcccagatggattccaacttgttgcacaacgaagatgcgaggacatcgatgaatgtcaggatccggacacatgttctcaactttgtgtgaatttagagggaggctacaaatgtcaatgtgaagagggatttcaactcgatccacatacaaaagcatgcaaggcagttggatcaattgcatatctcttctttacaaaccgccacgaggttcgcaagatgactcttgatcgatctgaatatacctcacttataccgaacctgcgtaacgtagtagcattggacacggaggttgcttcgaatcgaatttactggtctgatttgtctcaacggatgatctgcagcactcagcttgacagggcacatggtgttagctcctacgataccgtcatttctcgggatatccaagctccagacgggttagctgtggattggatacattctaacatttattggacagattccgttctcggtaccgttagcgttgctgatacaaagggagtgaagcgaaaaactttgttcagagaaaatggctcaaagccacgagctatcgttgttgatccagtccatggattcatgtactggactgactggggaaccccggcaaagatcaagaaaggaggacttaacggagtcgacatatatagtttggtaactgagaatattcagtggccgaacggcataacacttgatcttctgtcaggtcggctgtattgggtcgactctaaactccactctatctcttccattgacgtgaacggaggaaaccgtaaaactatattggaggatgaaaaaagactggcccatccgttctcgctcgctgttttcgaggacaaggtgttttggacagatattatcaacgaagctattttttcagcaaaccggttaactggaagtgatgtgaatctcctcgcagagaatctgttaagtccggaagatatggttcttttccacaacttgacacaaccaagaggcgttaattggtgtgaacgaaccacattatcaaatggaggatgccagtacttgtgcttaccagcaccacagatcaatcctcacagccccaaattcacatgcgcttgcccagatgggatgcttttagcaagggatatgcgttcatgcttaaccgaagctgaggctgcggtggctacacaagaaacgtcgacagtccgtctcaaagtttcatctacagctgttcgtacccaacatacgacgacacgaccagtcccggatacttcgagacttccgggtgctacacccggtcttacgaccgtagagatcgttaccatgtctcaccaggcattgggtgatgttgctggacgaggaaatgagaagaaaccaagttcggtgcgagcattgtcaattgttctacctattgtgttattagttttcctctgccttggcgtgttcttactgtggaagaactggcggctcaaaaacatcaattccatcaatttcgataatccagtgtatcagaaaacaacagaagacgaagtgcatatctgccacaatcaagacggatactcatacccatcacggcagatggtttcgctggaagacgacgtggct

SEQ ID NO: 11199 - DNA, 2580 bp, Artificial Sequence
  derived and/or modified sequence
atgggtccttgggggtggaagctgcggtggactgtcgctttgttactagccgccgcggggaccgccgtgggagaccggtgcgagcgcaatgagtttcagtgtcaggacggcaaatgcatatcatataagtgggtgtgcgacgggtcggcggaatgccaggacggaagtgacgagtctcaggagacatgtctgagcgtaacttgcaagtctggcgacttttcctgtggtggacgtgtgaacaggtgtatcccacagttctggcggtgtgacgggcaggtagactgtgataacgggagtgacgaacagggatgcccacctaaaacctgctcacaggacgagttccgatgtcacgacgggaaatgcatcagccggcagtttgtctgtgactccgaccgagactgtctggacgggagcgacgaggcctcttgccccgtgttgacatgcggccccgcaagctttcagtgtaactccagcacctgtataccacagctgtgggcttgtgacaacgacccggactgtgaggacgggagtgatgaatggccccaaaggtgccggggcctgtacgttttccagggagacagtagcccctgtagcgcgtttgaatttcattgcctgagtggggagtgcatccatagctcttggcgctgtgacgggggacctgattgcaaggataagagtgatgaagaaaattgcgccgttgcaacttgccgtccggatgagtttcagtgcagtgacggaaattgcattcatgggagtcgccaatgcgaccgggaatatgattgcaaagatatgtctgacgaggtcggatgtgttaacgtgacgctttgtgaagggcctaataagttcaagtgccactcaggcgagtgtatcactctggacaaggtctgcaatatggcaagagactgtcgcgattggagcgacgagccgatcaaggagtgtgggactgccgaatgtcttgataataacgggggttgttctcacgtatgcaatgatctgaagatcggttacgagtgtctgtgtccggatggtttccagctagtggcacagcgcagatgcgaagacattgacgagtgccaggacccagatacatgttcccagttgtgtgtaaacctggaaggcggatataaatgccagtgcgaggagggtttccagctggatccccatacgaaggcgtgtaaggctgttgggagcattgcgtacctgttcttcactaatcggcacgaggtgcgaaagatgaccctcgatcggtccgaatacacgagtctaatcccgaacctgaggaacgtggtggcactcgatactgaggtcgcctcaaaccgaatttattggtcagatctcagtcagagaatgatctgctctacccagctggaccgagcccatggcgtgtccagttatgacacagttatctccagggacatacaggctcctgatggcctggccgtcgattggattcatagtaacatatattggactgattcagtgttaggcacggtaagcgtcgccgatacaaaaggcgtaaaacggaagactctgttccgggagaatggcagcaagccgcgggccattgtggtggaccctgttcacgggtttatgtattggaccgactgggggacacccgcaaaaatcaaaaaggggggactcaacggagttgatatctatagccttgtaactgaaaatatacagtggcccaacgggattacgctagacctcttgtcaggccgtctgtactgggtggactccaagcttcatagtatctcctccatcgacgttaacgggggcaacagaaagacaattttggaagatgaaaaacggctggctcatccgttttccctcgcggttttcgaagataaagtgttttggacagacattattaatgaagccatattctccgcaaacagactaaccggaagcgacgtcaatcttctggccgaaaacttactgtcccctgaagacatggtgctctttcataatctgacgcagccccgaggcgtgaactggtgtgagcgcacaaccctgtctaacggcgggtgccaatacctttgcctccccgccccgcagatcaatccccactcaccaaagtttacgtgtgcttgtcccgatgggatgctgctggcgcgggatatgcgaagctgtcttacagaagctgaagcagccgtggctactcaggagacctccaccgtcaggctgaaggtcagtagtactgccgtgcggacacagcatacaacgacaagacctgttcctgacacatcacgcttgcccggcgcaactccgggcctgacaacggtggaaatcgttacaatgtcacaccaggccctcggggatgtggctgggagggggaatgagaagaaaccctcaagcgtgcgggccttgagtatcgtgctgcccattgtcctgctcgtgtttctctgtttgggggtgttcttgctatggaaaaattggagattgaaaaatatcaacagtattaattttgacaaccctgtctaccaaaagacgacagaagacgaagtccacatctgccataatcaagatggctactcctatccgtccaggcaaatggtgagtctggaggacgacgtggca

SEQ ID NO: 11200 - DNA, 2580 bp, Artificial Sequence
  derived and/or modified sequence
atgggcccctggggatggaaactgaggtggacggtcgcactcctcctagccgccgccggaacggccgtaggggacaggtgtgaaagaaatgagttccaatgtcaggacggtaaatgcatatcctataagtgggtgtgtgacgggtctgcagagtgccaagacgggagcgacgagtctcaagagacctgtcttagcgtcacctgtaagtcaggtgacttttcctgcggaggaagggtaaacagatgcatcccacagttctggcgatgcgacggacaagtggactgtgataatggcagtgatgagcagggctgtccaccaaaaacatgcagtcaagatgagtttaggtgccacgacggaaagtgcattagtcgtcagtttgtgtgtgactcagatcgtgactgcttggatggctcggacgaggcttcttgcccagtgctcacctgtggtcccgcctcctttcaatgcaatagctctacgtgtataccccagctctgggcctgtgataatgacccggattgtgaggacgggagcgatgaatggccacagcgttgtaggggtctctacgtttttcagggagatagctctccctgtagtgcattcgaattccattgcctgtccggcgagtgcattcactcctcttggcgatgcgatggaggccccgattgtaaggataaaagcgatgaagaaaattgtgctgtggcaacctgtaggcccgatgagtttcagtgctccgacgggaattgcatccatgggtcaaggcagtgtgaccgagagtacgactgcaaggatatgagtgacgaagtgggatgcgtgaatgttacgctgtgtgaagggcctaacaagtttaagtgtcattccggcgaatgtattactttagacaaggtgtgtaatatggctagagattgtagggattggtctgacgagccaatcaaagagtgtggaaccgcagagtgcctggataataacggcgggtgctctcacgtctgcaacgatctgaagattggttacgaatgtctctgccccgacggcttccagttggttgctcagaggcggtgtgaggacattgatgaatgccaggatccggatacttgctctcaactgtgcgtgaaccttgaggggggctataaatgccagtgcgaggaaggattccagctggatccacatactaaagcgtgtaaagcagtggggtcaatcgcttatctgttcttcaccaatcgtcacgaggtgcggaaaatgacgctcgatcgatcagagtacacctctttgatccctaatctgagaaatgttgtcgcactggatactgaggtggcaagtaatcgaatctactggagcgatctgtcccagaggatgatttgtagtactcagctagatcgagcccacggagtctcctcctatgacaccgtcatttcacgagatattcaggccccagacggccttgctgtggattggattcactcaaatatctattggacggattcggtccttggtacagtttccgttgcagacacaaagggtgtgaagaggaagaccctctttagggaaaacggctcgaagcctagagctatcgttgtggaccctgtgcatggattcatgtactggacagactgggggactcctgcgaaaattaagaaggggggactgaatggcgtggatatttattccttagttacagagaatatccagtggcccaacgggatcactctggaccttctctctggtagattatactgggttgattctaaacttcattcaatcagtagcatcgacgtgaatggtggcaacaggaagacaattttggaagatgagaagagactggcccaccctttttccttggccgtctttgaggacaaggtgttctggacagatataataaacgaggccatcttcagtgccaacagattgaccggatccgacgttaatcttctggccgagaacctgctgagtcctgaagacatggtcctctttcataacctaacccagcctagaggggtcaattggtgcgaaagaactacgctctctaatggcggctgccagtacctttgtctacccgcgccacagatcaacccacattcaccgaagtttacttgcgcatgccctgacgggatgcttcttgctagggacatgagaagctgtctgactgaggccgaagccgccgtggctacccaagaaacaagcacggtgaggttgaaggtaagcagcaccgcggtgcggacccagcatactacaacgagacccgtgcccgacacatccaggcttccaggggctactccaggcctgacgacagtcgaaatagtgaccatgagccaccaggcccttggtgacgtggccggcagaggtaatgagaagaagccgagtagtgtgcgagcgctttccatagtgctgccgattgtgttgcttgtgttcctctgtttgggagtttttctgctgtggaagaactggaggctcaagaatataaacagtattaactttgacaatccagtgtaccagaagaccaccgaagacgaagtccatatttgccacaatcaggacggctattcatatccaagtaggcagatggtaagcctggaagatgatgtggcc

SEQ ID NO: 11201 - DNA, 2580 bp, Artificial Sequence
  derived and/or modified sequence
atgggcccttggggatggaaactccgatggaccgttgctctcctgctcgcagcagcaggcaccgctgtcggagataggtgcgaaagaaacgagttccagtgtcaggacgggaagtgcatctcatacaaatgggtctgcgatgggagcgcagaatgccaagacggaagcgatgagtcacaagagacatgtctgtccgtgacctgcaagagcggagacttcagctgtgggggaagggtgaacaggtgtatcccccagttctggcgatgtgacggccaagtggactgcgacaacggaagtgacgaacaaggatgtccacctaaaacttgcagtcaagacgagtttcgctgccacgatggcaaatgtatcagccggcaattcgtgtgcgactcggaccgggactgccttgatggctctgatgaggcttcttgccccgtcctcacatgtggacccgctagcttccagtgtaacagttcaacatgtattccccagctgtgggcatgcgataacgatcccgactgcgaagatgggagcgacgagtggcctcagagatgccgcggactctacgtgtttcaaggcgacagtagcccctgttcagctttcgagttccattgcctctctggcgagtgcatccatagctcttggagatgcgacggggggcctgactgcaaggataagtccgatgaggaaaactgtgcagttgcaacatgcaggcccgatgagttccagtgtagcgatggaaactgcattcatggcagccgccaatgcgaccgcgaatacgattgcaaagacatgagcgacgaagtcgggtgtgtgaacgttactctgtgcgagggcccaaacaagtttaagtgccattccggggagtgcataacgctggacaaagtctgcaatatggccagggattgtcgggactggagcgacgaaccaattaaagaatgtggaacagccgagtgtctggataacaacggaggatgcagccacgtgtgcaatgaccttaaaattggttacgagtgcctgtgccccgacgggtttcagctggtcgcacaaaggagatgtgaagacatagatgaatgccaagatccagacacctgttcccagctctgcgtgaacctggagggcggttataagtgccaatgcgaagagggattccagttagatccccacactaaggcctgtaaggctgttggcagcatcgcttacctgtttttcaccaacaggcatgaagtcaggaaaatgactctggataggagcgagtacacctcactgatccccaatctccgcaacgtggtggcccttgacacagaggttgcttctaataggatctactggagtgacctgagtcagcgtatgatatgctctactcaactggatcgggcacacggcgtgtcaagctatgataccgtgatcagtcgggatatccaagcgccagatggcttggctgttgattggatacatagcaatatttactggaccgacagcgtacttggtacggtgagcgtggctgacaccaagggcgtgaaaaggaaaacattattccgcgaaaacggaagcaagccacgcgcaatcgtggtggaccctgtgcatggatttatgtattggactgattggggaaccccagctaagatcaagaagggtggactgaacggagtggacatctactctcttgtgaccgagaatattcagtggccgaacggcattaccctggatctccttagtggcaggctgtattgggtcgattctaagttgcattccatcagctccatagacgtgaacgggggaaacaggaagaccatccttgaagatgaaaagagactggcccacccatttagtctggctgtatttgaagataaagtgttttggaccgacatcatcaacgaggcgattttttccgctaatcgtctaactggcagtgatgtgaacttgctggccgagaacctgctttcacctgaagacatggtgctgttccacaacttaacccagccgaggggagtcaattggtgtgagcgcaccacactgtcgaacggcggatgccagtacctttgcctgcctgctccacaaatcaacccacattccccgaagtttacgtgcgcctgcccagatggcatgctgttggccagagacatgcgcagctgtcttacagaggcagaagctgccgttgccactcaggagaccagtactgttaggcttaaagtgagtagcaccgctgtaagaacccagcacacaacaacacggcccgtgccagacacctctagattgcctggagccacccccggtcttaccactgtggaaatagttacaatgtcccaccaggcactcggtgatgtggccggaagaggcaacgagaagaagccaagcagcgtgagagctctgtcaatcgtgttgcctatcgtgctcctggtgtttctgtgtctgggcgtctttttgttgtggaagaactggcgcctgaaaaacatcaactcgattaacttcgacaaccccgtttatcagaaaacaacagaagacgaggttcacatatgtcataaccaagacggatatagttatccctcaaggcaaatggtctccctcgaggatgatgtagca

SEQ ID NO: 11202 - DNA, 2580 bp, Artificial Sequence
  derived and/or modified sequence
atgggtccttgggggtggaaattgaggtggacagttgcgttgctgctggcggctgccggcactgccgtcggagataggtgtgaacggaatgagttccagtgtcaagacggcaaatgtatctcttataagtgggtgtgcgatggcagcgccgagtgtcaggacggttctgacgagagtcaagaaacttgtctcagtgtgacctgtaagagtggggatttctcttgtggagggcgcgttaatcggtgcatcccccagttctggagatgtgacggccaggttgattgcgacaatggcagtgatgagcaaggctgtccaccaaagacttgctcccaggatgagttccggtgtcacgacggaaaatgtatcagccggcagtttgtgtgcgattccgatagggattgcctggacgggtccgacgaggcttcatgccctgtgttgacttgcggtccagcctcgtttcagtgcaatagttcaacctgcatccctcagctgtgggcatgtgataacgatccggactgcgaggatggatctgacgaatggcctcagagatgccggggattatatgtattccaaggcgattcctccccttgcagcgccttcgaattccattgtctgtccggggagtgtattcactcctcgtggcgctgtgacgggggcccagattgtaaggataagtccgacgaagaaaactgcgcagtggctacttgcagaccggacgaatttcagtgttcagacggtaattgcatccacggcagccgccaatgcgacagagaatacgactgcaaggatatgtctgatgaggtcgggtgcgttaacgtgaccctgtgtgaaggccccaacaagtttaagtgtcattcgggcgagtgtatcacactggataaagtgtgcaacatggccagagattgtcgagactggtcagatgagccaatcaaagagtgtgggaccgcagaatgcctcgataacaacggtgggtgctcacatgtgtgcaacgatttaaagatcggctacgagtgtctgtgcccagacgggttccagttagtcgcccaacggagatgtgaagatattgatgagtgtcaggaccctgatacttgctcacagctctgcgtgaacttggagggaggctataagtgccagtgcgaagaagggtttcagctcgatccccacacgaaggcttgcaaagcagtcggctccatagcatatctgttcttcaccaaccgtcatgaggtcaggaagatgacccttgacagatccgagtacacatctctgattcccaacctgagaaatgtggtcgctcttgatactgaggtggcatctaaccgcatttattggtctgacctgtctcagcgtatgatatgtagtacacagttagatcgcgctcacggggtttccagttacgataccgtcatcagtcgagatattcaggcaccagatgggctggccgtggactggatacattccaatatttactggaccgattcagtactggggaccgtgtcggtcgccgataccaaaggtgtgaaacgtaagacactgtttcgggagaacggcagcaagccacgggctatagtggtggatcccgtgcatgggttcatgtactggactgattggggcacaccggccaagattaagaaaggggggttgaatggagttgacatatactccctggtcaccgaaaacattcaatggccaaacgggataaccctcgacctgctgtctggacgtctgtactgggttgactccaaactgcattccatttctagcatcgacgtcaacggcggcaatcgaaaaaccattctggaagacgaaaaaagacttgctcatccattcagcctagccgttttcgaggataaggtgttctggaccgatattattaacgaggcgattttcagcgcaaaccgcctaacaggatctgacgtcaaccttctcgctgagaacttactatcaccagaggacatggtcctgttccataacttaacccagccaagaggcgtgaactggtgcgaacgaaccactctcagtaacggaggctgccagtacctatgcctcccggcccctcagatcaacccacactcaccaaagttcacgtgtgcctgtcccgatggtatgctccttgccagagatatgcgaagctgtttgactgaggccgaggcggcagtcgcgacacaggagacttccacggtcagactgaaggtgtcgtctaccgcggtgaggacacagcacacaacaactcgcccagtcccggatacatcacggctgcccggcgctaccccgggcctcaccacagtagagattgtgactatgtctcatcaggctctcggggatgtcgccggcagaggaaatgaaaaaaaaccgtctagtgtgcgtgcgcttagcatagtcctgccaattgtactgctcgtctttctttgtcttggggtgtttctgctgtggaaaaattggcggctgaagaacatcaacagtattaatttcgataatcccgtgtaccaaaaaacaaccgaggatgaggttcatatttgtcacaatcaggatggttactcatacccctcgcgccaaatggtctcactggaagacgacgtggct

SEQ ID NO: 11203 - DNA, 2580 bp, Artificial Sequence
  derived and/or modified sequence
atgggcccttggggatggaagctgcgctggaccgtggcgctgctgctggcagccgcggggactgccgtcggtgacagatgcgagagaaatgaattccaatgccaggacggtaagtgcatctcctacaagtgggtgtgcgatggaagcgccgagtgccaagacggtagcgacgaaagccaggaaacgtgtctgtcggtgacctgtaaaagcggagacttctcctgcggaggccgggtcaacagatgtatcccgcagttttggaggtgcgacgggcaggtggattgcgataacggatcagatgagcagggatgcccacctaagacttgctctcaggacgagttcagatgccacgacggaaaatgcatctcgagacaattcgtttgcgattctgaccgggactgcctggacggatctgacgaagcgtcctgcccggtgttgacttgtggcccggcgtcgtttcagtgcaactcgagcacctgcatccctcagctgtgggcatgcgacaatgatccggactgcgaagatgggtccgacgaatggccacagcgctgccggggtctgtacgtctttcagggagattcctcgccgtgctcggccttcgaattccactgcttgagcggagagtgtatccacagttcatggcgctgtgatggagggcctgattgcaaggacaagagcgacgaagaaaactgtgctgtggctacctgccgcccggacgaattccagtgttcagacggaaactgcatccacggatcgcggcaatgcgatcgcgaatacgactgtaaggatatgtccgatgaagtgggatgtgtgaacgtgactctgtgcgagggcccaaataagttcaagtgccactcgggcgagtgcatcaccctggacaaggtgtgcaacatggcacgagattgccgggattggtcggatgaacccatcaaggagtgcggaactgctgaatgccttgacaataatggaggatgcagccatgtgtgtaatgacctgaagatcggctacgaatgcctgtgtccagatggtttccagcttgtggcgcagcggcgctgcgaggacatcgacgagtgccaggatcccgacacttgcagccagctgtgcgtgaacctggaaggaggttacaagtgccagtgtgaggaaggattccagttggaccctcataccaaggcctgtaaggccgtcggatcgatcgcctatctcttctttaccaatcggcacgaggtgcgcaagatgactcttgaccgctccgaatacacctcgctgattcctaacctccggaacgttgtcgctctggatacggaggtggcgtccaatcggatctactggtccgacctgagccaacgtatgatctgctcgacgcaactggatcgcgcacatggcgtgtcatcatacgacaccgtgatctcaagagacatccaggccccagatggcctcgctgtcgactggatccactcaaacatttactggaccgacagcgtgctcggaaccgtgtccgtggccgacactaagggagtgaaacgcaagactctcttcagagaaaacggatcgaaaccacgcgcgatcgtggtggatcccgtccacggtttcatgtactggactgactggggcaccccggcaaaaatcaaaaagggtggcctgaacggagtggatatctattccctggtgactgagaacatacaatggccaaatgggatcactctcgacctcctgtccgggcgcctctactgggtcgactcaaaactccattccatctcgtccatcgacgtcaatggaggcaaccgcaaaactattttggaggatgaaaaacggctcgcgcacccattctcattggccgtgttcgaggacaaagtgttctggacggacattatcaatgaggcgatctttagcgccaacagactgaccggcagcgatgtcaatctcctcgctgaaaacctgctctccccagaggatatggtgctctttcataacctgactcagccgcgaggcgtcaattggtgtgaacgcaccaccctgtccaacggagggtgtcaatacctgtgcctgccggcgccgcaaattaacccccattccccgaagttcacctgcgcttgccctgatggaatgcttctcgcccgggacatgcggtcgtgcctgactgaggccgaagcagccgtggccacccaagaaaccagcaccgtccggctgaaggtatcgtcgaccgcagtgaggactcagcatacgaccactaggcctgtgccagatacctcgcgactgccgggagcaactccgggactcaccaccgtggaaattgtcacgatgtcacaccaagcccttggcgacgtggccggtaggggcaacgaaaagaaaccctccagcgtcagggcactttcgatcgtccttccgatcgtgctcttggtctttttgtgtctgggggttttcctcctgtggaagaactggaggctgaagaatatcaactcaatcaacttcgacaatccggtgtaccaaaagactactgaggatgaggtccatatttgtcacaaccaggatgggtactcatacccgtcaagacaaatggtgagtttggaggacgacgttgcg

SEQ ID NO: 11204 - DNA, 2580 bp, Artificial Sequence
  derived and/or modified sequence
atgggaccatgggggtggaagttgcgttggactgtggcactgttgctggcagccgccggcaccgcagtgggcgaccgctgtgagaggaatgaatttcaatgtcaggacgggaaatgtatttcttacaaatgggtctgtgatggatctgccgagtgccaagacggatctgatgagtcccaggaaacctgcctgtcagtgacctgcaagtctggcgattttagttgcggtggtagagttaaccgctgcattccccaattttggagatgcgatggccaggtggactgtgataatggctccgacgagcagggttgtcctccaaaaacgtgctcccaagacgagtttcgttgccacgatgggaagtgcatatcacgccagttcgtctgcgactctgatcgcgactgtcttgacggatctgatgaagcatcatgcccagtcctgacctgtggaccagcctcatttcagtgtaacagttccacatgcattccccaactctgggcgtgcgacaatgatcccgactgcgaggacggaagtgacgaatggcctcagcgctgtcgtgggctgtatgtctttcagggggacagttcaccctgctctgcatttgagttccactgtttaagcggagagtgcattcattccagttggcgttgcgacggagggcctgattgcaaagataaatccgacgaagagaactgcgcagtagctacttgcagacccgatgagttccagtgttccgacggaaattgtattcatggaagccgccagtgcgacagggagtacgactgtaaggacatgagcgatgaagtggggtgcgttaacgtgactctttgcgagggcccaaacaagtttaagtgtcacagtggggaatgtattacactggataaagtctgcaatatggcccgcgactgcagagattggtcagacgagcccattaaagagtgcgggacagcagaatgtctggacaataacggaggatgcagtcacgtatgcaatgatctaaagatcggctacgagtgcttgtgccctgatggatttcagcttgtagcacagcgccgctgtgaagacatcgacgagtgccaggaccctgatacatgtagccagctgtgcgtcaacttagagggaggatataaatgccagtgtgaggaaggtttccaactagatccccatactaaggcctgcaaagcggtggggtctattgcctacctcttcttcacaaatcgccatgaggtcagaaaaatgactctcgatagatccgagtacactagccttatccctaatctcagaaatgtggtcgccctcgatacagaagtggcaagtaatcggatttactggtccgaccttagccaaagaatgatttgttccacccagcttgacagagctcacggggtcagcagctacgataccgtaataagccgcgacatacaggcccccgatggtttagcagttgactggatacactcaaacatttactggaccgactccgtgctaggtaccgtgtcagtcgccgacacaaagggtgtgaaacgcaagaccctctttagagaaaacgggagcaaaccacgagccatcgttgtggatccagtgcacggtttcatgtattggacagactggggtactccagctaaaataaagaaagggggtctaaatggtgtggatatttactctttggtgacagaaaacatccagtggcctaatggcatcacactggaccttctgtccggtagattgtactgggtggactccaaactgcattcaattagctctatagatgtgaatggggggaatcgaaagacaattctggaggatgagaaaagactggcccacccttttagtctggccgtctttgaggataaggtcttttggacagatatcatcaacgaggcaatattctcagcgaatcggctgacgggctctgatgtgaacctccttgccgagaatctcctgtctccagaggacatggtgctcttccataatcttacacagcctaggggcgtcaattggtgtgaacgaacgacgctgtcaaatggcggctgccaatacctgtgtctccccgccccacagataaatccgcactcccccaaattcacttgcgcctgcccggacggtatgttactcgcccgggatatgagatcgtgtctgaccgaggcagaggctgccgtggccacacaagaaactagcacagtacggctaaaggtatcctctacggcggtgcgaacgcagcacaccactacccgtccagtaccagacacatcgcggctgcccggggctaccccaggactgacgactgtcgagatagtgactatgtcccatcaggctcttggggacgtagcgggaagggggaatgagaaaaagccctcgtctgtcagagccctgtctattgtcttgcctattgtgttactggtcttcctgtgcctgggcgtgttcttattatggaagaattggcgccttaaaaatatcaactctatcaacttcgataaccccgtctatcagaagacgactgaggacgaggtacatatttgccataatcaagacggatattcatatccgtccaggcagatggtttccctagaagatgatgtagca

SEQ ID NO: 11205 - DNA, 2580 bp, Artificial Sequence
  derived and/or modified sequence
atgggaccttggggttggaagttgagatggacagttgctttactattggctgccgccggaacagcagtaggcgatcgctgtgaaaggaacgaatttcaatgccaggatgggaagtgtatcagctataaatgggtctgtgatggaagcgccgagtgtcaggacggaagtgacgagtctcaggagacatgcttgagcgtgacatgcaagtccggggatttttcctgtgggggtcgggtgaatcgctgtattccacagttctggcgctgtgacggtcaggtggactgtgataatgggtcagatgagcagggatgtcctccaaagacgtgttcccaggatgaatttcgctgtcatgatggcaaatgtattagccgccagttcgtttgtgattctgaccgagattgccttgacggatccgacgaggcatcgtgcccggtgctgacttgtggccctgcaagttttcagtgtaacagttccacgtgtatacctcagttgtgggcatgcgacaacgaccccgactgcgaagatggttccgatgagtggccgcaacggtgcagaggactttatgtgttccagggtgacagttcaccttgttccgcctttgaatttcactgtctgtcaggcgagtgcatccactcatcgtggaggtgtgacggcggccccgactgcaaagataagtccgatgaggaaaattgcgcagtcgctacctgtcggcctgatgagttccagtgcagcgacggcaattgcattcatggcagtcgacagtgcgacagagagtatgactgcaaagatatgagtgacgaggtaggatgtgtcaacgttactctgtgcgagggccccaacaagttcaaatgtcactcgggcgaatgtattacactggataaggtctgcaacatggctcgtgactgcagagactggagtgacgagcctatcaaggaatgcggaacggcggaatgtctggacaataatggggggtgctcacacgtgtgcaacgacctaaagatcgggtatgaatgtctgtgccccgacggcttccagttggtggctcagcggcggtgtgaagatattgacgagtgtcaggaccccgatacctgctcacagttatgcgtgaatctggagggcggctacaaatgccagtgcgaggaggggttccagttggacccccatactaaggcttgtaaggctgtgggttcaatcgcctatttgttttttaccaacagacatgaggtacgcaagatgacattggatagatccgagtacacatcactgatccccaatctgagaaacgttgtggcgctggatacagaggtggccagtaatagaatttactggtcagatctctctcaacggatgatatgctccactcagttggaccgagctcatggtgtgtctagctatgacacggtgatatccagggatatccaggctcctgacggtctcgccgtggactggatacattccaatatctactggacagattcagtcctagggacagtaagcgttgcagatactaaaggcgtcaaacggaaaaccttatttcgagaaaatggctctaaacctcgtgctatcgtcgtggaccctgtgcacggatttatgtattggactgactggggcacccctgctaaaatcaagaagggcggattaaatggcgtagatatatacagcttggtaaccgagaacatccagtggcccaatggcattactctagacttactgtctggccggctctactgggtggacagtaagcttcactcaatctccagcatcgatgtaaacggcggcaaccgcaaaacaattttggaggacgagaagcgactggctcatcccttctccttggcagtcttcgaagacaaggtgttctggactgatatcataaacgaagccatattttccgctaaccggctgacaggcagcgacgttaacctccttgccgaaaatctcctgtcccccgaggacatggtcctgtttcacaatttaacccagcctagaggggtgaattggtgtgaacgaactactctgagtaacggtggctgccagtacctgtgtctgccagctccacagatcaatccacactcacctaagtttacttgtgcgtgtccagatggcatgctattggctcgagacatgcgcagctgcctcactgaggctgaagccgccgtcgccactcaagaaacatctaccgtacgccttaaggtgtctagcacagctgtgcgcactcagcacaccaccacccgacccgtaccagacacatcccggctgccgggagcaacgccggggctcaccactgtggagatcgtgacgatgtcccaccaagccctgggtgatgtggccggtcgtggcaacgagaagaaaccctcctccgtgcgggcgctctccattgtcctgcccatcgtactgctcgtatttctatgcctgggtgtctttctgctgtggaaaaactggcggttgaagaacatcaacagcattaattttgataacccagtgtaccaaaaaaccacagaggacgaggtgcatatttgtcacaaccaggacgggtattcttatccctccagacagatggttagtctggaagatgacgttgct

SEQ ID NO: 11206 - DNA, 2580 bp, Artificial Sequence
  derived and/or modified sequence
atgggaccttggggatggaaactgcgttggaccgtggccctgcttctggctgcggccgggactgctgtgggggatcggtgtgagcgcaacgagttccaatgtcaggacggaaagtgtatatcgtacaagtgggtctgcgatgggtcggctgaatgtcaagatgggtccgatgaaagccaagaaacttgtctgtcggttacctgtaagagtggggacttttcctgtggaggtagagtaaaccgctgtattccacaattttggcgctgcgacggacaggtcgattgcgacaacggatcagacgagcaaggatgtcccccgaaaacgtgtagccaagatgagtttaggtgccatgatgggaagtgtattagcaggcagttcgtgtgcgacagcgacagggattgtcttgatggatcggatgaagcatcatgtcctgttctgacttgtggtcccgcatcctttcagtgcaactcgagcacttgtatcccccaactttgggcgtgtgataatgaccctgattgcgaggacggatcagatgaatggcctcagcgctgccgtgggctttacgtgtttcaaggcgatagctccccatgctctgcattcgaatttcattgtctctctggcgagtgcattcactcatcctggagatgtgacggtggaccggattgtaaagataagtccgacgaagaaaactgtgcagtcgcaacctgtagacctgatgaatttcagtgtagcgatggtaactgtatacatggatcgagacaatgtgaccgcgagtacgattgtaaggatatgtccgatgaggtgggatgcgtcaatgtgacgctttgcgaaggtcctaataagttcaagtgtcattcaggagaatgtataactctcgacaaagtgtgcaatatggccagagattgtcgggattggtcggacgagccaatcaaggagtgtggcacggcagaatgcctggacaacaacggtgggtgctcccatgtctgcaatgacctgaagataggatacgaatgcctttgcccggatgggttccaactggtggcacagaggcgttgtgaggacattgatgaatgccaggatcccgacacttgctcgcaactttgtgtaaatctggaaggaggttacaagtgtcaatgcgaggaaggatttcagctggacccacacaccaaggcttgcaaggccgttggttcgattgcatacctctttttcacgaacagacacgaagtgcggaagatgacgctggatcggagcgaatacacctcactgatccctaacctccgtaacgttgtggcactcgatactgaagttgcctcgaatcggatctactggtctgacctgtcgcagaggatgatctgttctacccaactggaccgcgcacatggagtgtcgagctacgataccgtgatcagtagagatattcaggcaccagacggtctggccgtggactggatccattcaaatatctactggaccgattcagtgcttggaaccgtcagcgtggcagacactaaaggtgtgaaacgcaaaaccctctttagagagaatggttctaagccaagggcgattgtggtggatcctgtgcacggcttcatgtattggactgactgggggacccctgctaagattaagaaggggggactcaacggcgtggatatctactcgttggttaccgaaaacattcaatggcctaacggtattactcttgatcttctgtccggccgactttattgggtcgattcgaagctccactccatctcttcaattgatgtgaacggagggaatcgaaaaactattttggaggacgagaagagactcgcacacccgttttcactggcagtgttcgaagataaagtgttttggacggacatcattaatgaagccattttcagcgccaaccgcctcactgggtcggatgtcaatcttctggcagaaaacctcctgagcccagaagatatggtgctctttcacaacttgacccaaccgcgcggtgtgaactggtgcgaacgcaccactctgtcaaatggtggctgccaatacctgtgccttccggccccacagataaacccgcatagccctaagttcacgtgtgcatgtcccgatggaatgctcttggccagagacatgaggtcctgtctgaccgaggcagaagcggcagtcgcgactcaggagacttccaccgtcagacttaaggtgtcctccactgcggtccggacccaacataccactacccgcccagtccctgatacctcccggcttccgggtgcaactcccggtcttacgaccgttgagatcgtgaccatgtcacatcaagcgctgggcgatgtcgcgggaagaggaaatgaaaagaagcccagctcggtgcgagcactttcaattgtgttgcccattgtgctgttggtatttctttgccttggcgtgtttctgttgtggaaaaactggcgactgaagaacataaactctatcaattttgataaccccgtctaccaaaagactactgaagatgaggtgcatatttgtcataaccaggatgggtactcgtacccttcgagacagatggtgagcctggaagatgatgtggca

SEQ ID NO: 11207 - DNA, 2580 bp, Artificial Sequence
  derived and/or modified sequence
atggggccgtggggatggaagctgagatggaccgtggcactgcttctcgcagctgctggaacggccgtgggagatcgttgtgagcgcaacgagttccaatgtcaggacggaaagtgcatttcgtacaagtgggtttgtgacggaagcgctgaatgtcaagacggatcggacgagagccaagaaacgtgcctttccgttacctgtaagtcaggtgatttctcctgcggtggaagggtgaaccgttgtattcctcagttttggaggtgtgacggacaagtggactgcgataacggctctgatgaacagggttgtccacctaaaacttgttctcaagacgagtttagatgtcatgacggaaagtgtatctcgagacaattcgtgtgcgattcggacagagattgtcttgatggatcggatgaagcctcgtgcccagtgctgacttgtgggcccgcctcgtttcaatgtaattcgtcaacgtgtattcctcaactctgggcatgtgacaacgaccctgactgtgaggatggtagcgatgagtggccgcaacggtgtcgaggcctgtacgtctttcaaggagatagctcaccttgctcagcgtttgagttccactgtctctcgggtgaatgcatacattcgtcgtggagatgcgacggcggaccggactgtaaagataaatcagacgaagagaattgcgccgtggcaacgtgtaggccagatgaatttcagtgttcagatggaaattgtattcatggttcgcgacagtgtgatcgggagtacgactgtaaagacatgagcgatgaggtggggtgtgttaacgtcactctttgtgaaggcccaaacaaattcaaatgccattcgggagagtgtatcaccctcgataaggtttgtaacatggccagagattgtagggattggagcgatgagcctataaaggaatgcggaactgccgagtgtcttgacaacaacggaggctgttcacacgtgtgtaacgacctcaagattggctacgaatgcctgtgtcctgacggattccagctggtcgcacagcgacgctgtgaagatattgatgagtgccaagatcctgacacttgcagccagctgtgtgtgaatctggagggtggatacaaatgtcagtgtgaagaaggatttcagctcgacccacatacgaaggcatgcaaggccgtgggttcaattgcataccttttcttcaccaacagacatgaggtccggaagatgacccttgacaggtccgaatacacttccctgatccctaatctgaggaacgtggtggcactggatactgaagtcgcctccaacagaatttactggtccgatctttcgcaaagaatgatctgcagcactcagttggatcgcgcccatggcgtgagctcctacgataccgtgatttcgagagacatacaagcacccgacggtcttgcagtcgattggattcactccaacatttactggaccgatagcgtcctgggcactgtgtccgtcgccgataccaagggagtgaagcggaaaactttgttccgcgaaaacggttcgaagcctcgagccattgtggtggaccctgtgcacggttttatgtactggaccgactggggaactccagcaaagattaagaaggggggacttaacggggtcgacatttactcacttgtcactgaaaacatccaatggccaaacggtatcactcttgaccttttgagcggtaggctctactgggtggattccaagctccatagtattagcagtatcgacgtgaacggaggaaacagaaagaccatccttgaagatgaaaagcggctggcacatccgttttcactcgccgtgtttgaagataaagtgttttggactgacatcattaatgaagccatattctcagctaaccggctgactggctcggacgtgaacttgcttgctgagaacctgctgtcgcctgaggacatggtgctttttcataaccttacccagcccagaggcgtgaactggtgtgaacgcactactctcagcaatggtgggtgccagtacctctgtctccctgcacctcagatcaaccctcatagccccaagttcacgtgcgcatgtccggatggaatgctcttggcaagggatatgcgctcctgtcttactgaggcagaagcagcagtggccacccaggaaacttcgaccgtacgccttaaagtctcatcaaccgccgtgcggacccaacacactacgaccagacctgtgcccgatacctcccgcctccctggagcaactcccggactgactaccgtcgaaatcgtgaccatgtctcatcaagccctgggagatgtggcgggccgtggtaacgagaaaaaacctagctcggtgagagccctgtcaatcgtccttccaattgttctcctggtgtttctgtgtctcggtgtgttcctgctctggaagaattggcgtctgaagaacatcaactcgattaacttcgacaatcctgtctaccaaaagactactgaggacgaagtccatatctgtcacaatcaggatgggtacagctacccttcgcggcaaatggtgtcactggaggacgatgtcgca

SEQ ID NO: 11208 - DNA, 2580 bp, Artificial Sequence
  derived and/or modified sequence
atgggaccatggggatggaagctccggtggacagtggccctgctgctagccgccgccgggacagctgtgggggatcggtgtgaaaggaacgagttccaatgccaggatggcaaatgtatctcgtataagtgggtctgcgatggatctgccgagtgccaggacggctccgatgagagccaggaaacttgcctatccgtgacctgcaagtccggtgacttctcgtgtggcggaagggtcaacagatgtataccccagttttggcgctgtgatggccaggttgattgcgacaatggatcagatgagcaggggtgtccacctaagacatgttcccaggatgaatttcgctgccatgacggtaagtgtatctcacgtcagttcgtctgtgacagcgatagagattgcttagacggaagtgacgaggcaagttgccctgttcttacttgcggcccagctagtttccagtgcaactcctcaacctgcatacctcagctctgggcctgtgataatgacccggactgcgaggatggatccgacgagtggccacagagatgcaggggtctgtatgtgtttcagggggactcctctccttgctccgccttcgagtttcactgcctttctggcgaatgcatccatagtagctggcgctgcgatggcggtccagactgtaaagataagagcgacgaagagaactgcgccgtagcaacttgtcggcctgacgagtttcagtgcagtgacggcaactgcatacatgggtctaggcagtgtgacagggagtacgactgtaaggacatgagcgacgaggtcggatgtgttaatgtgactctgtgcgagggcccaaataagttcaaatgccactcaggcgagtgcatcacgctcgacaaggtgtgcaacatggccagggattgtcgggactggtccgatgagcctatcaaggagtgcggtaccgcggagtgtttggacaacaacggcggctgctcacacgtgtgcaatgacctcaagattgggtacgaatgcttgtgtccagatggctttcaattggtggctcagcggcgttgcgaggacatcgacgagtgtcaggacccggacacgtgtagtcagctttgtgttaaccttgaagggggctataaatgtcagtgtgaggaaggcttccaactggatccacataccaaggcgtgcaaggctgtaggatctatagcctatttgtttttcactaacaggcacgaagtgaggaaaatgaccctggacaggtccgagtatacttcactcattcctaacctgcgtaacgtcgtcgcactcgacactgaggtggcctctaaccgcatttactggtcggatttgagccagagaatgatctgctcaacacagttggacagggcacacggagtttcgtcatatgatacagtcattagccgggacatccaagcccctgacggtctcgcagttgactggatacactctaatatatactggacagattcagtgcttgggaccgtgagcgtagcagacacgaaaggcgtgaagcggaagacgctgtttcgtgagaacggttcaaaaccccgcgcaatcgtcgtggaccccgtccatgggtttatgtactggaccgactggggtacccccgctaagattaaaaagggtggactcaacggggttgacatttattcccttgtgaccgaaaatatccaatggcctaacgggataacacttgatctattgtctggaagactgtactgggtggactcaaagctccactccatcagctccattgatgttaacggcggaaataggaagaccattctcgaggacgaaaaaagactggcccacccgttctctcttgcagtgttcgaagacaaggttttttggacagacattatcaatgaggctatattttcagctaacaggctaacaggcagcgacgtgaacttactcgcggaaaatctgctgtcccccgaggacatggtactgtttcataatctcacacagcccaggggtgtcaactggtgcgaacgcacaacactatcaaacggcgggtgccagtacctgtgcctaccggctccccagatcaatcctcacagccctaaattcacgtgcgcttgcccagacggtatgctgttggctagagacatgcggagttgtttgactgaggccgaagccgcagtggccacccaggagactagtaccgtccgcctaaaagtaagctccactgccgtccggacgcaacatacaacgacacgacctgtacccgatacatcccgtctccccggtgcaaccccgggactgacaaccgtcgagatcgtgaccatgagtcatcaggcactgggagacgtcgcaggtagaggcaacgaaaagaaaccttcctccgttcgtgcgttgtcgattgtgctgccaatcgtcctccttgtgttcctgtgtctgggtgtgttccttctctggaagaattggcgactgaagaacataaactccataaatttcgataatcctgtatatcaaaaaactacagaagatgaagtacacatctgccataaccaggacggctacagctacccatcccgacagatggtgtcgcttgaagacgacgtggca

SEQ ID NO: 11209 - DNA, 2580 bp, Artificial Sequence
  derived and/or modified sequence
atgggcccctgggggtggaagctgcgctggacagtggccttgctcctggcggcagccggcactgccgttggtgaccgctgtgaaagaaacgaattccagtgtcaggatggaaagtgtatctcttataaatgggtatgtgacggctctgccgaatgtcaggacgggtcagatgagtcgcaggaaacctgtcttagcgtcacttgtaagagcggtgacttttcttgcggcggcagagtcaaccgatgcatccctcagttctggcgctgtgacggccaggttgactgcgacaatggctcagacgagcagggttgccccccgaagacgtgcagtcaggacgagtttcgatgccacgacggtaagtgtatctcaaggcagttcgtttgcgattcagatcgcgattgtctggacggctcagacgaagccagctgtcccgtgctgacatgtggaccagccagttttcaatgcaatagctctacgtgcatcccccagctgtgggcctgtgacaatgatccagattgtgaggatggttctgacgagtggcctcaacgatgtcgtgggttgtacgtcttccagggggactcgtcaccctgcagcgctttcgagtttcattgcctctctggggagtgcattcactcatcatggcgttgcgacgggggacctgactgtaaagacaagagcgatgaagagaactgtgctgtcgccacatgcaggccggatgaatttcagtgctccgatggcaactgtattcatggctctcggcagtgtgatcgcgaatacgattgcaaggatatgtccgatgaggtcggctgtgtgaacgtcacactgtgcgaaggaccgaataagttcaaatgccattccggggaatgtattacactcgacaaggtgtgcaatatggcaagggattgccgcgattggagcgacgaaccaattaaagagtgcggcacagccgaatgcctcgataacaacggcggctgctctcatgtgtgcaacgatcttaagattggatacgaatgtctatgccctgatggttttcagctggtggctcaacggcgatgtgaggacatcgatgaatgccaggacccggatacatgttcccaactctgcgtgaatctggaaggcggctacaagtgccagtgtgaagagggttttcagctcgatccacacacaaaggcatgtaaggcagtgggaagcattgcttatctcttttttactaatagacacgaggtacggaagatgaccttggaccgaagtgagtatacctcactcatccccaatctcagaaacgtcgtcgctcttgatacggaggttgcaagcaacaggatttattggtctgaccttagtcagcgcatgatatgttctacccagctggatcgcgcgcacggcgtctcttcctacgatacggtgatttctcgggacatccaggctccagacggattggcggtggactggattcactcaaatatttattggaccgactctgtgctgggtactgtctcagtcgccgatacaaagggtgtgaaacgcaagaccctcttccgtgagaatgggtctaagccccgggctatcgtcgtggaccccgtacacgggttcatgtactggaccgactggggaacacccgccaaaatcaagaagggcggcctgaatggcgtagacatctacagcctggtgaccgagaatatccagtggcctaacgggatcaccctggacctgctttcgggccgactctactgggtggattctaaactgcattccattagtagcatcgatgttaatggaggcaataggaaaacgatcctagaggacgagaagagactcgcccacccctttagtctggctgtgttcgaagacaaggtgttctggacagacatcatcaatgaggccattttctctgctaaccggctgacagggagcgacgtgaacctattggccgagaacttgctgtcccctgaagacatggttctgtttcacaatctgacccagccgagaggcgtgaattggtgcgagagaacaacactatctaacggcgggtgccagtatctatgtctgccagcccctcaaataaacccccactctccaaagttcacgtgcgcctgccccgacgggatgttgttggctagggacatgaggagttgcctcactgaggctgaggctgccgtcgccacccaggaaacttccaccgttcggttaaaggtcagcagtaccgccgtccgcacccagcacaccactacgagacccgtcccagacaccagtcgactccccggcgccactcccggcctgactaccgtggaaatcgttacgatgagtcaccaagccctgggcgacgtggccggaagagggaatgagaagaaaccctccagcgtgcgggctttgtccattgtcttgcctatagttctgctagtgttcctgtgtctcggtgttttccttctgtggaagaactggagactcaagaacattaacagtatcaattttgataaccccgtctatcagaagaccactgaggacgaagtgcacatttgtcacaatcaagatgggtatagttatccgtcgagacagatggtgtcgctggaagacgacgtcgca

SEQ ID NO: 11210 - DNA, 2580 bp, Artificial Sequence
  derived and/or modified sequence
atgggaccgtggggttggaaactgcgctggaccgtggcgcttctcttggccgccgctggtaccgctgtgggcgatcgatgcgagcgcaacgaattccagtgtcaggacggcaagtgtataagctacaagtgggtgtgcgacggaagcgctgagtgccaagatggctccgatgagtcgcaggagacctgtctctccgtcacgtgcaagtcaggagacttcagttgtggaggtagagtaaataggtgtatcccgcagttctggcgttgcgatgggcaggtggactgtgataacggcagcgatgaacagggctgccccccaaagacatgctcgcaagacgagtttaggtgtcatgatgggaagtgcatctcccggcagtttgtctgcgactccgatcgagactgtctggacggctccgacgaagccagttgtcctgtgttgacatgcggtcccgcttctttccagtgtaatagttcgacatgcattccacagctgtgggcatgcgataatgaccctgactgcgaggatgggagtgacgaatggccccagcgatgtcgaggcctgtatgtgttccagggcgactcatctccgtgctcagcttttgagttccattgcctgtccggtgagtgtattcattcctcttggcgctgcgatggcggccctgactgcaaggataagagcgatgaggaaaactgtgctgtggctacttgcagacctgacgaatttcagtgttcagatggtaactgtatccacgggtctagacaatgtgatagggaatacgactgcaaggatatgagcgacgaggtgggatgtgtcaacgtgactttgtgtgaagggcctaacaaatttaaatgtcactcaggtgaatgtatcactctagacaaggtctgcaatatggcacgtgactgcagggactggtcagatgaacccatcaaagaatgtggtactgcggagtgcctggataacaatggcggatgttcacacgtctgtaacgacctaaagatagggtatgagtgcttatgtcccgatggcttccaactggtggcccaacgtcgttgcgaggacatcgatgaatgtcaagatccagacacctgctcacagctctgcgtgaatttggagggcggctataagtgtcaatgcgaagagggtttccagctggacccacatactaaggcctgtaaggccgtgggttccatagcgtacctcttttttacaaatagacacgaggttaggaaaatgactctggacaggagtgagtacacgtctctgattccaaatctgcggaacgtcgtagccttggataccgaggttgcatccaaccgcatctattggtctgaccttagtcagaggatgatctgctctacccagctcgacagagcgcacggtgtgagcagctatgatacagtgatttcccgggacatccaagccccagacgggctggccgtagactggattcactctaacatctactggacagattcagtgctcgggaccgtttccgtggcagacactaagggcgtcaagagaaagaccctcttccgagagaatggatctaagccccgagctatcgtcgtcgatcccgtgcacggattcatgtactggacggactggggcacacctgcaaagatcaagaagggcggactgaacggcgtggacatctactcactcgtgacagaaaatatccagtggccgaacggcataactctcgaccttctgtccggccggttatactgggtcgactctaaactgcacagtatctcatccatcgatgttaacggtggcaaccgtaaaaccattttagaggacgaaaaacggctggcacaccccttcagtctcgcagtttttgaagataaggtgttttggaccgacatcatcaatgaggccattttctctgcaaataggctgacaggatctgacgtgaacctgctggccgagaatctgctgtcacctgaggacatggtgttgtttcacaacctgactcaacccaggggcgtcaactggtgtgaacgcaccaccttatctaacggcggctgtcaatacctgtgcttgccagccccacaaataaacccccactcaccgaaatttacatgcgcctgccccgatggaatgctgcttgcccgtgacatgcgaagctgcttgacagaagcagaagcggccgtggcgacacaagaaaccagcaccgtgaggctcaaggtgagctcaacagccgttcgaacacagcacacgacaacccgccctgtgccagacacttctagactgcccggcgccactcctggactaacaaccgtggaaatagtgaccatgtcacaccaggcccttggagacgtggccggacggggaaacgagaagaagccctcctccgtgcgagcactctccattgtgctcccaattgtgctgcttgtttttctgtgtctgggtgtgttcttgctctggaagaattggcggctcaaaaacataaactccataaacttcgataacccagtctatcagaagactacagaggacgaagtacacatctgccataaccaagatggatactcttacccaagcagacaaatggtcagtttagaggacgacgtagcc

SEQ ID NO: 11211 - DNA, 2580 bp, Artificial Sequence
  derived and/or modified sequence
atgggcccatggggctggaagctaagatggacagtagccctcctcctggcggcagccggtacagcagtaggagacagatgcgaaaggaacgagttccagtgccaggacggaaaatgtatctcatacaagtgggtttgtgacggcagtgccgagtgccaggacggctccgatgaatcccaggaaacctgcttgtctgtgacctgtaaatctggggatttttcatgcggtggacgtgtgaatagatgcattccccagttttggaggtgtgacggccaggtcgactgtgataatggatccgatgaacagggctgccccccaaagacgtgctcccaggatgagtttagatgtcatgatgggaagtgcatctctcggcagttcgtttgcgacagcgaccgggactgtcttgacggttcagatgaggcctcctgtcctgtgcttacgtgcggcccagccagtttccagtgtaatagttccacctgtatcccccagctgtgggcttgcgataatgacccggattgtgaagatggctctgatgaatggccccagagatgtcgcggattatatgtattccagggagattcctctccctgctccgcatttgaatttcactgtctgtccggtgaatgtattcattcaagctggaggtgtgacggaggcccagattgcaaggacaaatctgacgaggagaattgcgcagtagctacgtgccgacccgacgaattccagtgctccgatggaaattgtattcacggctctcggcaatgcgatcgggaatatgattgtaaggacatgtctgatgaggtgggttgcgtgaatgtaaccctgtgcgaaggccctaacaaatttaaatgccatagcggggagtgtatcacactggataaagtatgtaacatggcccgggactgtagggattggtcggacgagccaattaaagagtgcggtacagccgagtgtttagacaataacggcggctgttctcacgtatgcaacgatctgaagataggctatgaatgcctatgcccagacgggtttcagttggtggctcagaggcggtgcgaggacatcgacgaatgtcaggaccctgacacctgttcgcagttatgtgtgaacctggaaggtgggtataagtgccagtgcgaggaaggattccagctggaccctcataccaaggcctgtaaggccgtaggcagcatagcatacctcttcttcacaaatcggcacgaagtgcggaaaatgaccctcgataggagcgaatacactagcttgatccccaacctccgtaatgtcgtcgcactggacactgaagttgcctcgaaccgaatttactggtccgatctttcacagagaatgatatgcagtacccagcttgacagagcccacggggtctcctcctacgacacagtcatcagtcgcgatattcaagctccagacgggctggccgtggactggatccacagcaacatatattggacagactcggtcctcggtactgtatctgtggctgacaccaaaggtgtgaagcgcaagacactgttccgtgaaaacggctctaagcctcgcgctatagtggttgaccctgtacacggcttcatgtactggaccgattgggggacccccgcaaagattaagaagggcggactaaacggcgttgacatctattcactggttaccgagaatatccaatggcctaatgggattactcttgacctgttgtcaggtcggctgtactgggtggattccaagctgcattctatttcctccatcgacgtcaacggtggaaacagaaaaacgatcctagaagatgagaaacggctagcgcaccctttctctctggcagtgttcgaggataaggttttctggactgatattattaatgaagcgattttcagcgccaatcggcttacgggctccgacgtaaaccttctggccgaaaatctcctctctccggaagatatggtgctgttccacaacttaactcagcctcggggtgttaattggtgtgaaagaaccacgctgagcaatggagggtgtcagtacttgtgcctgccagcgccacaaatcaatcctcacagcccaaaatttacatgtgcttgccccgacgggatgctcctggccagagacatgcgctcatgtctgacagaggcggaagctgctgtggctacacaagaaacctctaccgtccggctgaaagtgtctagcacggccgtgaggacccagcatacaacaacccgcccagtacccgacactagcagattgccaggggccacaccaggactcactaccgtcgagatcgttacgatgtcacatcaagcgttgggagatgtcgctgggaggggcaacgaaaaaaagccaagctctgtaagggccttaagtattgtgctcccaatcgtccttctagtgttcctgtgcctgggcgtgtttctgctgtggaaaaattggaggttgaaaaacatcaattctatcaacttcgacaatccagtctaccagaaaacgaccgaagacgaggtgcacatttgccacaaccaggatggctattcttatccttccagacagatggtgtcccttgaagacgacgtggca

SEQ ID NO: 11212 - DNA, 2580 bp, Artificial Sequence
  derived and/or modified sequence
atgggaccctggggctggaagttgcgctggaccgtggcgctcctcttggctgccgcggggaccgcggtgggagatcgttgcgagaggaacgagttccagtgccaggacggcaagtgcatcagctacaagtgggtgtgcgacggctccgccgaatgccaagacggctcagatgaatcccaggaaacttgtctctcagttacttgcaagagcggagactttagctgtggaggtcgagtgaaccggtgcattccgcagttctggagatgcgacggacaggtggactgcgataacgggtcggacgagcaggggtgtccaccgaaaacttgttcacaagacgaattccggtgtcatgacggaaagtgtatcagcagacaattcgtctgcgattcggaccgcgattgcctcgacgggtcggatgaggcatcgtgccccgtgctcacttgcggaccagcctccttccagtgcaattcaagcacctgtataccccagctgtgggcctgcgacaacgacccggactgcgaggatggttccgacgaatggccgcagcgctgccggggactttacgtgttccagggagactcctcaccttgtagcgctttcgagttccactgtctgagcggagaatgcattcactcaagctggcgctgcgacggcgggcctgactgcaaagacaagtcagacgaggaaaattgtgccgtggcgacctgccgcccggatgaattccagtgctctgacggcaactgtatccacggctcgcgccagtgcgaccgggagtacgactgcaaggatatgagcgacgaagtgggatgcgtgaacgtcaccctctgcgagggacctaacaagttcaagtgccactccggagagtgcatcaccctcgacaaagtgtgcaacatggcgcgggattgccgcgactggagcgacgagccgatcaaagagtgcggaacggcggaatgtctggataacaatggaggatgttcacacgtctgcaatgacctcaagatcgggtatgagtgcctctgcccggacgggttccaacttgtcgcgcagcggcgctgcgaggatattgatgagtgccaagaccccgacacctgctcgcaactgtgtgtcaaccttgaggggggatacaagtgtcaatgcgaggaaggattccagctggacccgcatactaaggcgtgtaaagcagtcggatcgatcgcctacctgttcttcaccaaccggcacgaagtccgcaagatgaccttggatcgctcggaatatacctcactcatcccaaacttgagaaatgtggtggccttggataccgaggtggcctccaaccggatctactggtcggacctgtcccaaagaatgatctgctcgacccaactggatcgggcgcatggcgtctcgagctacgacactgtcatctcccgggacatccaggcgccggacggcctcgcagtggattggatccactcgaatatctactggactgattcagttctgggaactgtgtccgtggccgacactaagggagtcaaaagaaagactctctttcgggaaaatggatccaagccacgggccatcgtggtcgatccggtgcatggattcatgtattggaccgactggggtacccctgctaagatcaagaagggaggcctgaacggcgtcgacatctactctctggtgacggagaacatccaatggcccaacggtatcaccctggacctgctgtcaggccgactgtattgggtggacagcaagctgcacagcatctcctcgatcgatgtgaacggtggaaaccgcaagaccattctggaagatgaaaagcgcctggctcacccgttcagcctcgctgtgttcgaggacaaggtgttctggaccgatatcatcaacgaagccatcttttcggcaaaccggctgaccggctccgatgtgaatctgctcgctgagaacttgctgtcaccggaagatatggtcctgttccataacttgactcagcctcgcggcgtcaactggtgcgagcgcaccactctgtcgaacggcggctgccagtacctctgcctccctgcaccacagatcaatccacactcgcccaagttcacctgcgcttgcccggatgggatgttgttggcacgcgatatgcggtcctgtctcaccgaagccgaagccgcagtggcaacccaggagacttccactgtcaggctgaaggtgagctcgacggcagtgagaacccagcacactactacgcgccctgtgccggacacttctaggctgcccggcgcgactcccggactgaccaccgtggaaattgtgaccatgtcacaccaggcccttggtgatgtggcgggtagaggtaacgaaaagaaaccatccagcgtcagggccctgtcaatcgttctcccgatcgtcctgctggtctttctctgcctcggggtgttcctgctgtggaagaattggagactgaagaacatcaattcgatcaatttcgataatcccgtgtaccagaaaactactgaagatgaggtgcatatctgtcacaatcaggacggatactcgtacccatcaagacagatggtttcgttggaggatgacgtggcc

SEQ ID NO: 11213 - DNA, 2580 bp, Artificial Sequence
  derived and/or modified sequence
atgggtccgtggggttggaaactgcggtggaccgtcgccctcctgctggctgcggcaggaaccgccgtgggggacagatgcgaacggaatgaatttcagtgtcaggatggcaaatgtatcagctacaagtgggtgtgcgatggttcagcggaatgtcaggacggcagcgacgaatcacaggaaacttgcctcagcgtgacttgcaaatcgggagacttctcgtgcggaggaagggtgaatcgctgtatcccccaattttggcgctgtgacggccaggtggactgtgataacgggtcggacgaacaaggctgtccgcccaagacctgctcacaggatgagtttcggtgccacgacggaaaatgtatcagtcgccaatttgtctgcgactcggacagagactgcctggacggatccgatgaagcctcctgcccggtgttgacctgcggcccagcctcgtttcaatgtaactcaagcacctgtataccgcagctttgggcgtgcgataatgacccggactgcgaggacgggtcagatgagtggccgcaacggtgccggggtctgtacgtgttccaaggagattcctctccttgttcagcattcgaattccattgcctttccggtgaatgcatccattcttcgtggaggtgcgatggaggcccggactgcaaagacaagagcgacgaagaaaactgtgccgtggctacttgccggccggatgagttccaatgcagcgatggtaattgcatccacgggtcccgccagtgcgacagagagtacgattgtaaggatatgagcgatgaagtgggttgtgttaacgtgactctgtgcgaaggaccgaacaagttcaagtgccattccggggaatgtatcactcttgacaaggtctgcaatatggcacgggattgccgcgattggtcagatgagccgatcaaggaatgcggcaccgccgagtgcttggacaataatggcgggtgttcccatgtgtgcaacgacctgaagatcgggtacgaatgcttgtgtccagatggatttcagctcgtggcccagagacggtgcgaggacatcgatgaatgccaggacccggacacgtgttctcagctctgtgtcaatctcgagggaggatacaaatgccagtgtgaggagggcttccagttggacccccataccaaggcgtgtaaggccgtcgggtcaatcgcatatctgttcttcaccaaccggcatgaagtgagaaagatgactctggaccgctcggagtacacttcgctcatcccaaacctccggaacgtggtcgccttggacactgaagtcgcatccaatcgcatctactggtcagacctttcccagcgcatgatctgctcaactcaactggatcgcgctcacggcgtcagctcgtacgacaccgtgatctcacgggacatccaggcaccagacgggctcgcggtggattggatccactcgaatatctactggaccgactcggtgctgggaactgtttcggtcgcagacactaagggggtgaaacgaaagacccttttccgggagaatggttctaagccgcgcgccattgttgtggacccggtgcatggtttcatgtactggactgattggggtactccagccaagatcaagaagggagggctcaacggcgtggacatctactcacttgtgaccgagaacatccaatggccgaatggaatcaccctggacctgttgtcgggtagactgtactgggtcgactcgaaattgcattcgatctcgtcaatcgatgtcaatgggggaaatcggaaaacgatcctggaggacgaaaaacggttggcccacccctttagcttggccgtgttcgaggacaaggtgttttggactgacatcataaatgaggccatcttctccgccaatcgcctgactggcagcgacgtgaacctgctcgcagaaaacctcctgagcccggaagatatggtccttttccacaatcttacgcagcctagaggtgtgaactggtgcgagcgcactaccctgtccaacggaggatgccagtatctgtgcctcccagcgccacaaatcaacccccattcgcccaaattcacctgcgcgtgccctgacggtatgctcctggctagagacatgcggtcatgcctcactgaagcagaggcggccgtggccactcaggagacttccacggtgaggctcaaggtgagctcgactgcagtgaggactcaacacaccactacgaggccagtgcccgatacttcccgcctgccgggcgctactccgggactgactaccgtggagatcgtcaccatgtcgcatcaggctctgggggatgtggcgggtcggggcaacgaaaagaagccgtcatccgttcgcgccctctccattgtgctgccaatcgtgctgctggtgttcctctgtctgggagtctttctgctgtggaagaactggcgactgaaaaacatcaactcgatcaacttcgacaaccctgtgtaccagaaaacgaccgaggacgaagtccacatctgtcataatcaagacggctactcgtatcccagcaggcagatggtgtcgctggaggatgatgtggct

SEQ ID NO: 11214 - DNA, 2580 bp, Artificial Sequence
  derived and/or modified sequence
atgggaccatggggctggaagcttcgatggaccgtggcgctactcctcgctgcagcagggactgcagtcggggatagatgtgaacgtaacgaatttcagtgtcaagacgggaaatgcatttcatacaagtgggtgtgtgatgggtcagcagagtgccaggacggatccgatgagagccaggagacgtgcctcagcgttacctgcaagtcaggtgacttctcttgcggaggacgggtgaacaggtgcatcccccaattttggagatgcgatggtcaagtggattgcgacaatggcagtgatgagcagggatgcccgcccaagacctgttcacaagatgaattcagatgccacgatggtaagtgcatatcccgccagttcgtgtgtgattctgatagggactgcttagacggttctgatgaggcgagctgtcctgtactgacttgtgggcccgcctctttccaatgtaacagctccacgtgtatcccccagttgtgggcatgtgataacgacccagattgtgaggatggtagtgacgaatggccccagaggtgcagaggcttatatgtgttccagggagactcatcaccctgttctgccttcgaattccactgtctgagcggcgagtgtatccactctagctggcggtgcgacggcggtccagactgcaaggataagtcagacgaggagaactgcgcagtcgccacctgtagacctgatgagttccagtgctcggatggcaactgtatacacgggagccgccagtgcgatcgagaatacgactgtaaagatatgtcggatgaagtaggatgtgtcaatgtgacactttgcgagggacctaataagtttaagtgtcactccggtgagtgcataacattggacaaggtgtgtaatatggccagagactgtagagactggagcgatgagccgatcaaggagtgcggaaccgctgaatgtctagacaacaatggcgggtgtagccacgtgtgcaacgatctgaaaattgggtacgagtgtctctgcccagatggctttcagctcgtcgcccaaaggcgctgtgaggatatagatgaatgtcaggaccccgatacatgctcgcagttatgtgtgaatctggagggcggctacaagtgtcagtgtgaggaggggttccagctcgatccgcatacaaaagcttgtaaggccgtgggctccattgcctacctcttctttaccaacagacatgaggttcggaagatgaccttggaccggtctgagtacacctctctgatcccaaacttgaggaatgtagtggcactggataccgaggtggcttccaataggatctactggtcggacctctcacagcgcatgatttgctcaacccagctggatcgcgcccacggcgtctctagctacgacactgtgatctccagagatattcaggctcctgacggacttgccgtcgattggatccactctaacatatactggaccgattccgttctcgggaccgtcagcgtggctgataccaagggagtgaaacggaaaaccttattccgcgagaacggatccaaacctcgggccatcgtggtggacccggtgcatggattcatgtactggaccgattgggggactccagccaagattaaaaagggtgggctcaacggggtcgacatttactccctcgttaccgagaacatccagtggccgaacggaattacacttgatcttctgtcaggaaggttatattgggtggactctaaactccatagcattagcagtattgacgtcaatggcgggaaccgaaagaccatcctagaggatgaaaagagactcgcacatccattttctctggccgtgtttgaggataaggtcttttggacagacattataaatgaagcaatatttagtgcaaatcgcctgactggcagcgacgtgaacctgctagcggaaaatctgctgtcaccagaagatatggtcctcttccataatctgacccagccccgtggagtgaattggtgcgagcgcacgactctctcaaatggcgggtgtcaatacttgtgcctgcctgccccacaaattaacccccactctccaaaattcacatgcgcctgtccagatggaatgctcctcgcgagggacatgcgttcttgtttaactgaagccgaagctgcagtagccacccaggaaactagcaccgtccgattaaaagtaagttccactgctgttcgcactcagcatactacaacgaggccagtccctgatacgagcaggcttccaggtgctactccaggccttactacagtcgaaatcgtgactatgtcccaccaggccctcggcgacgtggctgggaggggaaacgaaaagaagcctagtagtgtgagagccttaagcatagtcctgcctattgttcttttggtgtttctatgcttgggggttttcttgctgtggaagaactggagactgaagaatatcaactccatcaacttcgataatcccgtgtaccagaagaccacggaagacgaggtgcacatctgccacaatcaggacgggtattcttatccgagccgtcagatggtgtctcttgaagacgatgtggcc

SEQ ID NO: 11215 - DNA, 2580 bp, Artificial Sequence
  derived and/or modified sequence
atgggcccttgggggtggaagctgcggtggacagtggctctcctcctggctgctgccggaactgccgtgggcgatcgatgcgagcgcaacgagtttcagtgccaggatggtaaatgtatctcttacaaatgggtctgtgacgggagcgctgaatgccaggacggatccgatgagtcacaagaaacatgcctctccgtgacctgtaaatctggagactttagttgcggggggcgcgtgaatagatgcatcccacagttttggcggtgtgacggtcaggtggactgcgataatggcagcgatgagcagggttgcccccccaaaacatgcagtcaggatgagttcaggtgccacgatgggaagtgcatatctagacagttcgtgtgcgatagcgatcgcgattgcctggacggttctgacgaagcctcatgccccgtgctgacatgcggccctgcgtccttccagtgtaactcaagtacgtgcatcccacaactgtgggcctgcgacaacgatccagactgcgaggacggaagcgatgaatggccacagagatgtcgcggcctctacgtgttccagggggactcttccccttgtagtgcattcgagttccattgtctcagcggcgagtgtatccactccagctggcgctgcgacgggggacccgattgtaaagacaaatccgacgaggagaactgtgccgttgcaacatgtagaccagacgagttccagtgttccgacggtaactgcatccacggttcccgccagtgtgacagagaatacgactgcaaagacatgtcagatgaggtgggatgtgtcaacgtgacactgtgtgaaggccctaataaattcaaatgccacagcggcgagtgcataactctggataaggtatgtaatatggcccgcgactgtagggactggtctgacgagcctattaaggagtgcggcacagctgagtgcctcgataacaacggcggctgctctcacgtttgtaacgaccttaaaatcggctatgagtgcctttgccccgacggtttccaactggttgcacagcgccgctgtgaagacattgatgaatgtcaggatccagatacgtgcagtcagctgtgtgttaacctcgagggagggtacaaatgtcaatgtgaagaaggattccagctggatccacataccaaggcttgcaaggcagttggctccatagcctatctcttcttcaccaataggcacgaggtacgcaaaatgacgctcgatcggagtgaatatacgtctctgattcccaatctgcgcaatgttgtcgcactggatacagaagtggcttcaaaccggatttattggtctgaccttagccagcgcatgatctgctccactcagcttgacagggcccatggcgtatcatcatatgacactgtgatttcacgggacatccaggcgcccgatggcctggccgttgactggatccacagcaatatctattggacagatagcgtactgggtaccgtgtctgtagccgatacaaagggagtgaagaggaagaccctgtttcgagaaaacgggtctaagcctagggctatcgtagtcgaccctgtccacggttttatgtactggactgactggggcactcccgcaaagatcaaaaagggcgggttgaatggcgttgacatatatagcctggtgaccgagaacatccaatggcctaatggaataacacttgacttgctgagcggcagactgtactgggttgactctaagctgcacagtatttcttctatcgatgttaacggcgggaaccggaagacaatactggaggacgagaaaagattggcccatcctttctctcttgctgtgtttgaggataaagttttttggaccgatattattaacgaagccattttctcagcaaatagactgactggttccgacgtcaacctgctggccgagaacctgttgtctccagaagatatggtcctgtttcacaacctgacacaaccaagaggagtcaactggtgtgagaggacgactctctccaacggcggctgtcagtacctgtgcctgcctgcaccacagatcaaccctcattcccccaagttcacttgtgcctgccccgacggaatgcttttggctcgggatatgcgaagttgccttacagaggcagaggccgcggtcgcaacgcaagaaacatcaacagttcgactgaaggtatctagcaccgccgtccggacacagcacactacaaccagacccgtcccagacaccagtagacttccaggcgctacacccggcttgactacggtggagattgtcaccatgtctcatcaggcccttggagatgttgcgggacgaggcaacgaaaaaaaaccctcttccgtgcgagccctcagcattgtacttccaatcgtgcttctggtgtttctgtgcctgggcgttttcctcctgtggaagaattggcgcctgaaaaatattaactcaattaatttcgacaaccccgtgtaccagaaaacaacagaggacgaggtccatatatgtcacaaccaagatggctattcatacccaagtcgacaaatggtctccttggaggacgatgtggcg

SEQ ID NO: 11216 - DNA, 2580 bp, Artificial Sequence
  derived and/or modified sequence
atgggtccgtggggttggaagctgcggtggacggtggccctgctactggcagcagccggcaccgccgtgggtgaccgctgcgagcgcaatgagttccaatgccaggatggcaaatgcatcagctacaagtgggtgtgcgacggctcggcggaatgccaagatggctccgacgagagccaggagacgtgtctgtcggtgacctgcaaaagcggagatttcagctgcggcggccgagttaatcgctgcattccccagttttggaggtgcgatggacaggtggactgcgataatggctccgacgagcaggggtgcccgccaaagacctgttctcaggatgaattccgttgtcatgatggcaagtgtatctctcgccagtttgtctgtgatagcgatagagactgcttggatggcagcgacgaggcaagttgcccagtgctgacgtgtggaccagcttccttccagtgtaattcgagtacgtgcatcccccagctatgggcgtgtgataacgatccagattgcgaggacggcagcgatgaatggcctcagcggtgccgcggactgtatgtctttcaaggcgacagctcgccatgctcggcgtttgagttccattgcctgtccggcgagtgcatacacagctcctggcgttgtgacggcggacccgactgcaaggataagtcggacgaggagaattgtgctgtggcaacgtgccgcccagacgagttccagtgctcagatggcaattgcatccatggctcccggcaatgcgatagagagtacgattgcaaagacatgagtgatgaggtcggctgcgtgaacgttaccctatgtgagggccccaataagtttaagtgccacagcggcgagtgcattaccctcgataaggtctgcaacatggctcgtgactgtagggattggtcggatgagcccatcaaagagtgcggcactgccgagtgcctggataataacggcggctgttcccacgtgtgtaatgatctgaaaataggctatgagtgcctctgcccagacggctttcagttggtggcacagcggcgctgcgaggacatcgatgagtgccaggaccctgacacttgctcccagctctgcgtgaatcttgagggtggctacaagtgccaatgcgaggagggcttccagttggacccccacaccaaagcctgcaaggctgtcggctcgatagcctacctgttcttcacaaaccgacatgaggtccgcaagatgaccctggacagaagcgaatacacatcgctaatccccaacctacgaaacgtggtggcacttgacacagaggttgcatcgaatcgtatatactggagcgacctgagccaaaggatgatttgctccacccagcttgaccgcgcgcatggcgtcagtagctatgacacagtgatcagccgtgacattcaagcccccgacggactggctgtcgattggatccattcgaatatctattggactgattctgtgttgggaactgtaagcgtcgctgataccaagggagtcaagcgcaagacgctatttcgagagaacggcagtaagccacgcgccatcgtggtggacccggtgcacggcttcatgtattggacagactggggaacgcccgccaagattaaaaaaggcggactgaatggcgtcgatatctactctctagttaccgaaaatatccagtggccaaatggtattaccctagatctgctgagtggacgcctgtattgggtggatagtaagctgcactctatctcatctatagatgtgaacggtggcaatcggaaaacaatcttggaggacgagaagcgcttggcccaccccttttccttggcggtattcgaggataaagttttctggaccgatatcataaatgaggcaattttcagtgccaaccgtctgacaggttccgatgttaatctattggctgaaaacctgctgtctccggaagatatggtcctattccacaatttgactcaaccacgtggcgtcaactggtgtgagcgaactactttaagtaacggcggctgccaatacctttgcttaccggcacctcaaatcaacccacatagtccgaagttcacgtgcgcttgccccgacggtatgctgctcgcacgtgatatgcgcagctgtctaactgaagccgaggcggccgtagcgacgcaggagacctccaccgtgcgcttaaaggtctcctctacggcggttcgcacacagcatactaccaccaggccagtacccgacacgtcgaggctgcctggagccaccccgggcttgacgactgtggagattgttacgatgagccaccaggctcttggtgacgtcgcaggtcggggcaacgagaagaagccaagctcggtgcgcgctctgtccatcgttttgcctattgtcctactggtattcttgtgccttggggtatttctcctctggaaaaattggcgcctaaagaacataaattcgatcaatttcgataatcctgtgtatcagaagaccacagaggatgaggtgcacatatgccataaccaggatggctacagctacccctcgcgacagatggtatcactggaggacgatgtggcg

SEQ ID NO: 11217 - DNA, 2580 bp, Artificial Sequence
  derived and/or modified sequence
atgggcccttggggttggaaactgcgctggacggtcgccctcttgctggccgctgctgggactgcggtgggcgatcgctgcgagagaaacgaattccagtgtcaggatggaaagtgtatttcctacaagtgggtctgtgatggctcggccgaatgccaggatggctccgatgagagccaggaaacctgcctgagtgtgacctgtaagtctggagacttctcctgcggcgggcgtgtgaatcgctgtattcctcagttctggcggtgtgatggccaagtcgactgtgataatggcagtgacgagcagggttgcccaccaaaaacatgttcccaggatgagttccgatgccacgatggcaaatgtataagccgccaatttgtttgtgattctgacagagattgtctggatggatctgacgaagcaagctgccccgttctgacctgcggcccagcttcttttcagtgcaacagctcaacatgtatcccacaactgtgggcctgcgataatgatcctgactgtgaagatggctccgacgaatggcctcagcgctgccgtggcctgtacgttttccaaggtgattcctcaccgtgctccgcattcgagttccattgtctcagtggtgagtgcatccactcctcttggcgatgcgacggggggccagattgtaaggacaaatctgacgaagagaactgtgcagtggccacatgtcgcccggatgagttccagtgcagtgatggcaattgtatacacgggagccggcaatgtgacagagagtacgactgcaaagacatgagtgatgaggtcggctgtgttaatgtgactctgtgcgagggtcctaataaattcaagtgccactccggcgagtgcattactctcgataaggtttgcaatatggctagagactgccgcgactggagcgatgaaccgataaaggagtgtgggacagcagaatgtctggacaacaatggggggtgttcacatgtgtgtaatgatctaaaaatcgggtatgagtgtctgtgcccggatgggtttcaactggtggcccagaggcgctgcgaggatatagatgaatgccaggaccccgacacatgttcccagctgtgtgttaatctggagggcggttataagtgccagtgcgaagagggttttcaacttgatcctcacaccaaggcctgcaaagccgtgggttcaattgcatacctattttttactaaccggcacgaggtgcgtaaaatgacattggatcgcagtgagtacacatctctaattccaaacctccggaacgtcgtggcacttgacacagaagtagcgtcgaaccggatttattggagtgacctctctcagagaatgatatgctccacacaactggaccgggctcatggcgtgtcatcttatgacactgttatctcacgagatattcaggcccccgacggactagccgtggactggatccattccaatatttactggacagattccgtgctcgggaccgtttcggtggccgatacaaagggcgtgaagcgcaaaacccttttcagagagaatggatcaaagcctagggcaattgtcgtggatcccgtgcacggatttatgtattggacagattggggcactcctgctaagattaagaagggtggcctgaatggcgtggacatttatagccttgtcacagagaacatccagtggcctaacgggatcaccctggacctgctttcagggaggctatattgggtcgactcaaagctgcactccataagctcgatagacgtgaatggggggaaccgtaagacaatattggaagacgagaaacggttggcacacccctttagtctcgccgtgttcgaggataaagtgttctggactgacattataaacgaggcaattttttctgctaaccggctgaccggtagtgatgtgaacttgctggccgaaaacctcttaagtcctgaagacatggttctgttccataacctgacacagcccagaggagtgaattggtgcgagcggaccactctctctaacgggggctgccagtacctgtgtctgccagcaccgcagatcaatccccatagtcctaaatttacgtgcgcttgtcccgatgggatgcttctcgcccgagacatgaggagttgcctcactgaggcagaggctgcagtggccacccaggaaacatccaccgtgcggctgaaagtgtctagcaccgcggttaggacccagcacaccactacacgacctgtgccagatactagccgattaccaggggcgacccccggtctgaccactgtggaaatcgtaactatgagtcaccaggccttgggagacgtggctggccgaggaaacgagaaaaagccctcgagcgttagagccctgtcgatagtcctgccaattgtgctcctggtctttttgtgcctgggtgtttttctcctctggaagaattggcgactaaagaatattaattcgattaacttcgacaatccggtgtatcaaaagactacggaggacgaagtacacatttgtcataatcaggacgggtactcttatccttcccggcagatggttagcctggaagatgatgtggcc

SEQ ID NO: 11218 - DNA, 2580 bp, Artificial Sequence
  derived and/or modified sequence
atggggccctggggctggaaacttcggtggaccgtcgcgcttttgctggctgccgcaggtactgcagtgggagatcggtgtgaacgaaatgaattccaatgtcaagacggcaagtgtatttcctacaaatgggtgtgcgatggatcggcagaatgccaggatggttccgatgagtcgcaagagacttgtttgagcgttacgtgtaaatccggcgatttttcatgtggaggacgtgtgaaccgctgtattccgcagttttggaggtgcgacggtcaggtggattgtgacaacggatccgatgagcaagggtgtcctccaaagacctgctcgcaagatgagttccgatgccacgatgggaagtgcatctcacgtcagtttgtgtgtgattcagatcgcgactgtctcgatggaagcgacgaagccagctgtccggttcttacttgcgggccagcatcctttcaatgtaactcttcgacttgtattccccagctgtgggcatgtgataatgatccggattgtgaggatggatcagatgaatggcctcagcgctgtcggggactgtacgtgttccagggtgattcctccccgtgttcagcctttgaatttcactgtcttagcggagagtgcattcacagctcgtggagatgtgatggaggtcctgactgcaaggacaagagcgatgaagagaattgtgcagtggcaacttgccgcccagatgaatttcaatgttcagatggaaactgcattcacggatccagacagtgtgacagagagtacgattgtaaggatatgtcagatgaagttggatgtgtgaacgtgactctttgcgaaggaccgaacaaattcaagtgtcattcaggagaatgtattacgctggataaggtgtgcaatatggcgcgggattgtagagattggtccgatgagcccatcaaggaatgtggtaccgccgaatgtcttgacaacaatggtggttgttcgcacgtctgtaatgacctgaaaattggttacgaatgtctgtgtccagacggctttcaacttgtggcacagcgccgctgtgaagatattgatgagtgtcaagatcccgacacttgtagccagctttgtgtgaatctcgaaggcgggtacaagtgccagtgcgaggagggattccagctggatcctcatacgaaggcatgcaaggcggtgggatcaattgcatatctctttttcaccaaccgccacgaagtccgaaagatgaccctggaccgctcggagtacacttcccttattccaaacctgagaaatgtggtcgcactggacaccgaggtggcatcgaacagaatttactggagcgatctgtcccagaggatgatttgttcgactcagctcgatcgcgctcatggtgtgtcgtcctacgataccgtcatctcgcgcgatattcaagcacctgatggcctggcagtggattggattcactccaacatttactggactgactccgtccttggaactgtctcagtggcagatacgaaaggagtgaagcgcaaaacgctgtttcgtgaaaacggcagcaaaccacgggcaatcgtggtcgaccccgtgcatggatttatgtattggaccgactggggaacccctgcgaaaatcaaaaaggggggactcaatggggttgacatttactcattggtgactgagaacatccaatggcccaacggaattactcttgacctgctgtcgggccggctttactgggtcgattcaaagctccattccatatcgtcgattgacgtgaatggaggtaacaggaaaactattttggaggatgaaaagagacttgcacatcccttttcgctggcagtgttcgaggataaagtgttctggactgatatcatcaatgaagccatcttctcggcaaacagacttaccgggtccgatgtgaaccttctcgccgaaaatctgcttagccccgaggatatggtgctctttcataaccttacgcagcctcggggagtgaactggtgcgaacgtactaccctttcgaatgggggctgtcagtacctttgtctgccagcccctcagatcaacccacattcgcccaagtttacctgcgcctgtcctgacggtatgttgctggccagagacatgcgaagctgtctcaccgaggcagaagcagcagtggctacgcaggaaaccagcactgtccgtcttaaagtgtcgtctactgctgtgagaacccaacacaccactacccggccagtccctgacacttcacgactgcccggagccactccgggacttactactgtcgaaatcgtcacgatgtcccatcaggcactgggggacgttgccggtcgcggaaatgaaaagaagccttcaagcgttagagcactgtcgatcgtgttgccaattgtgctgctcgtattcctgtgcctgggcgtgtttctcctttggaagaattggcgtcttaagaacatcaatagcataaactttgataaccccgtctatcagaaaaccactgaagatgaagtgcacatatgccataatcaagatggttactcgtacccgtccagacagatggtgtccctcgaagatgatgtggca

SEQ ID NO: 11219 - DNA, 2580 bp, Artificial Sequence
  derived and/or modified sequence
atgggcccttggggatggaaactgcggtggacagtggcattgttactcgctgccgcagggacagccgttggtgatcgctgtgagcgcaatgaattccagtgccaggatgggaaatgtatttcttacaagtgggtctgcgacgggtcagcagaatgccaagacggttcagatgaaagtcaggagacctgcctgagtgttacatgtaagtctggtgatttctcgtgtggcggtcgggttaatcggtgtatcccacagttctggaggtgcgatggacaggtggactgcgataatgggtccgacgaacagggatgtcctcccaagacttgctctcaggatgagttcagatgtcacgatgggaaatgcatttctaggcagttcgtgtgtgactcagaccgagattgccttgacggctctgacgaagcttcctgccctgtgttgacttgcgggcccgcgtcttttcaatgtaactcaagcacttgtatcccccagctgtgggcctgcgacaatgacccggactgcgaagacggcagtgacgagtggcctcagcggtgtagagggctgtatgtgtttcagggggactcatctccttgctctgcttttgaattccactgcctgagtggggagtgcatccacagttcttggaggtgtgacgggggccctgattgtaaggacaagtctgacgaagagaactgtgctgtggccacgtgcaggccggacgaatttcagtgtagtgacggaaattgcatccacggaagtcgtcagtgcgatcgagaatacgactgcaaagacatgtccgatgaagtgggctgtgttaatgtcaccctctgtgagggtcctaataaattcaagtgccattccggcgagtgcatcacgctcgataaagtgtgtaatatggccagagattgtcgcgattggtccgacgagccgattaaggagtgcggaacagctgagtgcctcgataacaacgggggctgttctcacgtgtgcaatgacttgaagattggatatgagtgtctgtgtcccgatggttttcaattggtggcacagaggcggtgcgaggacatcgatgaatgccaagatcccgatacatgtagtcagctctgtgtgaacctggagggcggttataagtgccagtgcgaagaggggttccaattagaccctcacacaaaggcttgtaaggcggtgggttctatcgcctacctatttttcactaacagacatgaagtgcggaagatgacgctagatcggtccgaatacacctctctcatcccaaatttgcgtaatgtggtggctctcgatactgaagtagccagcaacagaatttattggtctgacctctcccaacgcatgatctgctctacacagttggacagggcacacggtgtgagctcttatgataccgtcatctcacgcgacatccaggcacctgatggtctcgcagtggactggattcattcaaacatctactggacggactccgtgttgggaaccgtgtctgtagctgatacgaagggggtgaaacgaaagacactgtttagagagaacggctccaaaccgcgggctatcgtcgttgatccagtgcatgggtttatgtactggacagactggggaacacctgccaaaattaaaaaaggcggactgaatggcgttgatatctattccttggttactgagaatatccagtggcccaatggcatcaccctggatttattgagcgggagactctactgggtggactctaaattgcattctatctcttccatcgacgtgaatggcggcaaccgcaagactatcctggaagacgagaagcgccttgctcatccgttctcactggcagtattcgaggataaagtgttctggacagacatcatcaacgaggcaatcttctccgctaacaggctcacgggcagcgatgttaatcttctcgctgagaacctgctctctcctgaggatatggtgcttttccacaacctgacccagccccgtggagtgaactggtgcgagcgtacgacgctgtctaacggcggatgtcagtacctttgcctgcccgcccctcagattaacccacactcccccaagtttacgtgtgcgtgtccagatggaatgctcctggctcgtgacatgcgcagttgccttaccgaggcagaggccgccgtggctactcaggagacatcgactgtccgtctgaaagtgtcatcaacggcagtgcggacgcagcacaccactactaggccagtccctgacacaagtcgcctacccggggcgaccccaggactgacaacggttgagattgtcaccatgtcacatcaggccttaggagacgtcgcaggtcgaggcaacgagaaaaaaccgagctcagttagggccctaagcatcgtcctacctatagtcttgcttgtcttcctttgtcttggggtgtttcttctctggaaaaactggagactcaaaaacattaactccataaatttcgacaacccagtgtaccaaaagactaccgaggacgaagtgcacatttgtcataatcaggatggttactcctacccttctaggcagatggtgagcctggaggatgatgtcgcc

SEQ ID NO: 11220 - DNA, 2580 bp, Artificial Sequence
  derived and/or modified sequence
atgggtccatggggatggaagttgagatggaccgtggcactgctcctggccgccgctggtactgccgtcggggatcgctgcgaacgcaatgagttccagtgccaggatggaaagtgcatctcgtacaaatgggtgtgtgacggatcggctgagtgccaggacgggagcgatgaatcgcaagagacttgcctgtcagtcacttgcaaatcgggggacttctcgtgcggaggccgtgtgaacagatgcatcccgcaattctggcggtgcgacgggcaggtggactgcgataacggtagcgacgagcaaggatgcccgccaaagacttgctcacaagatgaattccggtgccacgacgggaaatgcatctcccggcaattcgtgtgcgattcggaccgagactgcctggacggttccgacgaggcatcctgtcccgtgcttacttgtggccccgcctcctttcaatgtaactcatcgacttgcatcccgcagctgtgggcttgcgacaacgaccctgactgtgaggacggatccgacgagtggcctcagcgttgtcgcggactctacgtgtttcagggcgactcaagcccatgcagcgccttcgagtttcactgcctgtctggagaatgcattcattcatcatggcgctgcgacgggggacccgattgtaaggacaagtcagatgaagagaactgcgccgtcgcaacctgccgcccagacgaattccaatgctccgacggcaactgcatccatgggagccgccagtgcgacagggaatacgattgcaaagatatgagcgatgaagtggggtgcgtgaacgtgactctgtgcgaaggacctaacaagttcaaatgccactccggagagtgcatcactctggataaagtatgcaacatggctcgagattgccgcgactggtccgatgagccgatcaaagaatgtgggactgcagagtgcctggacaacaacgggggatgttcccatgtctgcaacgacctcaagatcgggtacgagtgcctctgccctgacggcttccagctcgtggcgcagaggagatgtgaggacattgatgaatgccaagatccagacacctgttcgcagctgtgcgtgaacctggaaggaggttacaagtgccagtgcgaagaaggtttccagctcgacccgcacaccaaggcatgcaaggcggtgggaagcattgcataccttttctttactaatcggcacgaagtccggaagatgacgctggaccgctcggaatacacgtcgttgattcctaatctcagaaatgtggtcgccctggatactgaagtggcgtccaacagaatctactggtcagatctgtcacaacggatgatctgcagcacgcagcttgatagagctcacggagtgagctcctacgacaccgtgatcagcagagacatccaagcaccggacgggttggccgtcgattggatccacagtaacatttactggaccgacagcgtgctcggaactgtgagcgtggcggacactaagggagtgaaacgcaagactttgttccgggagaacgggagcaagccacgggccatcgtggtggacccagtccacggattcatgtactggactgattggggaacgccggcgaagatcaagaagggaggccttaacggtgtggacatctacagccttgtcaccgaaaacatccagtggccaaacggaatcacgctggatctgctgtcgggtagactgtactgggtcgactcgaagttgcatagcatatcctcgatcgatgtcaatgggggtaatcgcaagactatcttggaggatgaaaagcggctcgcgcatcctttttcattggcggtgttcgaagataaggtgttctggaccgacatcatcaacgaagcaatctttagcgcaaaccgcctgacggggtcagacgtgaacttgctggcggaaaatcttctttcacctgaagatatggtcctgttccacaacctgacccagccgcggggcgtgaactggtgtgaacgcaccactctgtccaacggaggctgtcagtacctctgcctgccggccccacaaatcaacccgcactcgccaaaattcacttgcgcatgtccggacggaatgctgcttgcccgcgacatgagatcgtgcctcaccgaggcggaagccgctgtcgccacccaggaaacctccactgtcagacttaaggtgagctcgactgccgtgcgcacccagcacaccactacccgcccggtccctgataccagccgcctcccgggtgccactccgggccttaccaccgtggaaatcgtgaccatgtcgcaccaagccctcggagacgtggccggacggggaaacgagaagaagccaagctccgtgagggcactctccattgtcctgccgatcgtcctgctggtgttcctgtgcctcggggtgtttctcctgtggaaaaactggcggctcaagaacatcaattcaatcaacttcgacaatccagtgtaccaaaagactactgaggatgaagtccatatctgccataaccaggacggatactcctatcccagcagacagatggtgagcctcgaggacgacgtggcg

SEQ ID NO: 11221 - DNA, 2580 bp, Artificial Sequence
  derived and/or modified sequence
atggggccatgggggtggaagctcaggtggaccgttgcgttgctcttggccgccgccgggacagccgttggggatcggtgtgagcgcaacgagtttcagtgccaggatgggaagtgcattagctataaatgggtatgtgacggcagcgccgaatgtcaggatggatccgatgagtcacaggagacttgcctgtctgtcacatgcaagtcgggagatttcagttgcgggggccgcgtgaataggtgtatccctcagttttggcggtgcgacgggcaggtcgattgtgacaatggctccgatgagcaggggtgccctcctaagacctgctcccaggacgaatttcgatgccacgacgggaaatgcattagccggcagtttgtgtgcgacagcgatcgggactgccttgatggtagcgatgaagcctcgtgccccgtgctgacctgtggccccgcctcttttcagtgcaattccagcacctgcatcccacagctttgggcatgcgacaacgatccagactgtgaggatggatcggacgaatggcctcaaaggtgtcggggcctctatgtgttccagggagattcttcaccctgtagtgcgttcgaattccattgcctgtctggcgagtgtatccactcatcgtggcggtgcgatggaggtcccgattgtaaggacaaatccgatgaagaaaattgtgctgtggccacttgtaggcccgatgagtttcagtgcagtgatggaaattgcatacacggttcacgtcagtgtgatcgcgagtacgattgcaaagacatgagcgacgaagtgggatgtgtgaacgtcacattgtgcgaaggaccgaataagtttaaatgtcattccggagagtgcataaccctggataaagtgtgtaacatggcaagggactgccgcgactggagcgacgagcctataaaggagtgtggcactgccgagtgcctggataataatggcggttgctcgcatgtgtgtaacgatctgaaaatcggatatgaatgtttatgccctgacgggtttcaactcgtagcccagcggaggtgcgaagacatcgatgagtgtcaggatcccgatacatgttctcagctatgtgttaatcttgagggtggatataagtgtcaatgcgaggagggctttcagctggacccccatacaaaagcatgcaaggctgttggcagtattgcttacctgttcttcacaaacaggcacgaggtccgtaagatgaccctcgaccggtcagaatacacttcacttattccaaatctgagaaatgtggttgccctggatacggaagttgcgtcaaataggatttattggtccgatttatctcagagaatgatttgttcaacacaactagacagggcccatggcgtgtcttcatatgataccgtgatcagccgcgacatccaggcacccgatggccttgctgttgactggattcactctaatatttactggacagactccgtgctcggaacagtaagtgtggccgatactaagggagtaaagcgcaaaactctgttccgggaaaacggctccaaaccccgggctatagtcgtagacccagttcatggtttcatgtattggacagactggggtacacctgcgaagatcaaaaaggggggcctaaatggagttgatatctactctctggtgacggagaacatacaatggcccaatgggattactctggatctactgtccggcaggctgtactgggtagactcaaagctccattctatcagctctatcgatgtcaatggcgggaatcggaagaccatcctggaagacgaaaaacgtcttgcacatcctttttcattggcagtgtttgaggacaaagtattttggacagacattatcaatgaggctatcttttcagctaatagactgaccggttctgatgtgaacctcctcgccgagaacctccttagtccggaagatatggtgctcttccacaatctcactcagccccggggggtcaattggtgtgaacgcaccacgctttccaacgggggctgccagtacctttgccttcctgcccctcagattaatcctcactctccaaagttcacgtgtgcctgcccagacgggatgttgctggcccgcgacatgcgatcgtgccttaccgaagcggaggccgctgtggctacacaggaaacctctactgttagattgaaggtgtcgtccacagccgttaggacacagcatacgaccacccgccccgtcccggacacaagccggctgccaggagcaactccagggctgaccaccgtagagattgtaaccatgagtcaccaggccctcggggacgtggccggaagggggaacgaaaaaaaaccatcgtccgtgcgcgctctgtcgatcgtactacccattgtactgctggttttcctctgcctgggcgtattcctattgtggaagaactggcgactgaagaatataaactccatcaacttcgataatccagtttatcagaaaacaacagaagacgaagtgcacatctgtcacaatcaagatggatatagttaccctagtagacaaatggtaagcctggaggacgatgtagcc

SEQ ID NO: 11222 - DNA, 2580 bp, Artificial Sequence
  derived and/or modified sequence
atgggaccatggggctggaaacttcgttggaccgtcgcacttctgcttgccgcagcgggaactgccgtgggtgatcggtgcgaacgaaacgaattccaatgtcaagatggcaagtgcattagctacaaatgggtgtgcgatggttcagcggaatgccaagatggatcggatgagtcgcaagagacttgtcttagcgtgacttgcaagagcggagatttttcctgcggtggaagagtgaataggtgcatcccacagttctggcgttgcgacggacaagtcgattgtgataacggatccgacgaacagggttgccctccaaagacctgctctcaagatgagttcagatgtcatgatggaaagtgtatttcaagacagtttgtgtgtgattccgatcgggactgtcttgatggttccgacgaagcctcttgtcctgtgcttacctgtggtcctgcatcctttcaatgtaacagctcaacttgtattccccagctttgggcatgtgataacgatccagattgcgaagatggaagcgatgagtggccgcaacgctgtcgaggtctgtacgtgtttcaaggagactcctccccatgctcggcatttgaatttcattgtctttccggcgagtgtatccacagctcgtggcgctgtgatggaggccctgattgcaaggacaagagcgacgaagaaaattgtgcagtggccacgtgtagaccggatgagtttcagtgtagcgatggaaactgtattcacggatcgagacaatgtgatcgcgaatacgattgtaaagacatgtcggacgaagtgggttgtgtcaacgtgactctgtgtgaaggccccaataagtttaagtgtcattcgggtgaatgcattacccttgacaaggtctgtaacatggcacgagactgccgagattggtctgacgaaccgatcaaggaatgcggtaccgcggaatgtttggataacaacgggggatgttcgcatgtgtgtaatgatcttaagattggatacgaatgtctctgtcccgatggttttcaactcgtggcccaacgaagatgtgaagatatcgatgaatgtcaagatcctgatacctgttcgcaactgtgcgtgaacctggaaggtggctacaaatgccaatgcgaagaaggatttcagcttgatccgcataccaaggcctgtaaggccgtcggaagcatcgcatacctgttcttcaccaaccggcatgaggtgagaaagatgacccttgatcggagtgaatacacttcactcatacctaaccttagaaacgtggttgcccttgatacggaagtggcaagcaaccgcatctactggagcgatctttcccagagaatgatttgctcgactcaactcgaccgagcgcacggggtttcatcctacgataccgtcatttccagggacattcaggcaccagacggactggcggtcgactggattcattccaatatctactggactgactcggtgctcggtactgtgtcagtggcggacactaagggtgtgaagcgcaagacgttgtttcgagagaatggttcgaagccacgggctatagtcgtcgatcctgtccatgggtttatgtactggactgattggggtactccggcaaagattaagaaggggggactgaatggagtggacatttactcccttgtgaccgaaaacattcagtggcctaacgggattaccctggatctgctgtcaggaaggctgtactgggtggatagcaaacttcattccattagcagcattgatgtgaatggtggaaacagaaagaccatcctggaagatgaaaagaggttggcacatcccttttcgctggccgtgttcgaagataaagtcttttggacggacattatcaatgaagcaatcttttccgcaaacagactgacgggttcggacgtcaacctgcttgccgaaaatctgctctccccggaggacatggtgctctttcacaatctcacccaaccacgcggagtgaattggtgtgagagaactactctctcgaatggagggtgccagtatctctgtctgcccgccccgcagataaacccccattcaccaaagtttacttgtgcatgtcctgatggcatgctcctggctagagatatgcgctcctgccttaccgaagcagaagctgccgtggctacccaagaaacctctaccgtgcggctgaaggtgtcctcaactgcagtgcggacccagcatactaccacccgccctgtgccagatacctcgagactgccgggcgccacgccaggacttaccaccgtggagatcgttaccatgtcgcatcaagcacttggtgacgtcgcaggacgcggaaacgaaaagaagccctcgagcgtgagagcactgtcgattgttctgccaattgtcctgttggtattcttgtgtctcggagtgtttctgctgtggaaaaactggagactcaagaacataaacagcatcaattttgacaatcctgtgtaccaaaagactactgaagatgaagtgcacatttgtcacaatcaagacggttacagctacccgagccggcaaatggtcagcctggaggacgacgtggcc

SEQ ID NO: 11223 - DNA, 2580 bp, Artificial Sequence
  derived and/or modified sequence
atgggtccgtggggatggaagctgcgttggactgtcgcgctgctgcttgcagcagcaggcaccgcagttggtgatagatgcgagcgtaacgaatttcagtgtcaagatggaaaatgtatcagctacaagtgggtctgtgatggaagcgcggaatgtcaagacggatcagatgaatcccaggaaacctgtctgtcggtgacttgcaaatcgggtgacttctcgtgtggtgggagagtgaatcgatgcatcccccagttttggcggtgcgacggacaggtggactgcgataatgggtccgatgaacaaggttgtccgcctaaaacctgtagccaggacgagttccgctgtcatgatggcaagtgtattagccgtcaattcgtctgtgactcagacagagactgtcttgacggctcggatgaagcatcctgcccagtgcttacctgcggtccggcatcatttcagtgtaattcctcaacctgcatcccacagctttgggcctgtgataacgatcccgattgcgaagatggaagcgatgagtggccccaaagatgccggggactctacgtgttccaaggagactcgtcaccttgttcagcattcgaatttcactgcctttccggcgagtgtattcactcgtcgtggcgctgcgatggagggccagattgcaaggacaagtccgacgaagagaattgtgcagtcgcgacgtgtagacctgatgagtttcaatgctctgatggaaactgcatacacggttcccggcaatgtgatagagaatacgactgtaaagatatgtccgacgaagttggctgcgtgaacgtgactctttgtgagggcccaaacaagttcaagtgtcattcaggtgaatgtataaccctggacaaggtctgtaatatggcccgtgattgcagagactggtcggacgagcctattaaggagtgtggaaccgcagagtgcctggataacaacgggggatgtagccatgtgtgtaatgacttgaaaatcggctacgaatgtttgtgccctgatgggttccagcttgtggcacagcgacgttgcgaagatattgatgaatgccaggaccccgacacttgtagccaactttgtgtcaatctggaaggtggctacaaatgccaatgtgaggaaggctttcaactcgatcctcatactaaagcgtgtaaagccgtcggcagcatcgcttacttgtttttcaccaacagacatgaggttagaaagatgactttggatagatcggagtacacctcgcttattcctaacctccgcaacgtggtggctcttgacaccgaagtggcctcgaacagaatctactggtccgacctctcacagcgtatgatttgctccacccagctcgatcgggcgcatggagtgtcaagctacgatactgtgatttcgagagatatacaagcacctgacggactggcggtggattggatccattcgaatatctattggacggatagcgtgctcgggactgtgtccgtggcagacactaagggtgtcaagcggaaaacgctgttcagggaaaacgggtcgaagccccgggccattgtggtcgatcctgtgcatggctttatgtactggactgattgggggactccagcaaagataaagaagggagggctgaacggagtcgacatctatagcctggtgaccgagaatatccaatggcctaatggaattacgctcgacctcctgtccggccgactttactgggtcgattctaaacttcactctatctcgtccatagacgtcaacggtggtaatcgtaagaccatcttggaggatgagaagaggcttgcccatcccttttcactggctgtgttcgaagataaggtgttttggactgacattatcaatgaggcaattttctccgccaacagactgaccggttctgacgtgaaccttcttgcagaaaacctcctttcgcccgaagatatggtgctgtttcataatctgactcagccaagaggcgttaactggtgtgaaagaacgaccctgtcgaatggcggctgtcagtacctctgtctcccagcaccgcaaatcaatccgcactcgcctaagttcacctgcgcatgcccagacggaatgctccttgcacgggatatgcggtcgtgtctgactgaagcagaagccgcggtggccacgcaggaaacctcgaccgtgcgccttaaggtcagctccaccgctgtgcgtactcaacacaccactacgcggcccgtcccggacacgagccgtctccccggagccaccccaggcttgaccactgtggagattgtgaccatgtcacaccaagcccttggtgacgtcgcgggaaggggaaacgaaaagaagccatcatccgtgagagctctgtccatcgtcctccctattgtgctgctggtgttcttgtgtcttggggtgttcctgctgtggaaaaactggaggcttaagaacataaacagcattaactttgataaccccgtgtaccaaaaaaccaccgaggatgaagtgcatatatgtcataaccaagacggttacagctacccttcacgccaaatggtttctctggaagatgacgtcgca

SEQ ID NO: 11224 - DNA, 2580 bp, Artificial Sequence
  derived and/or modified sequence
atgggaccttggggttggaagctgcggtggaccgtggcactgttactcgccgcagctggcaccgctgtgggtgatcgctgtgagcggaacgagtttcagtgtcaggatggtaaatgcatttcctacaagtgggtatgcgatgggagcgcagaatgccaggatggatctgacgaatctcaggagacctgcctctctgttacctgcaagagtggtgactttagctgtgggggtcgtgtgaatagatgcatcccacagttttggcgctgcgatggccaggttgattgtgacaacgggagcgacgagcagggctgcccaccgaagacctgctcccaggatgaattcagatgtcatgacgggaagtgtatttctcgtcagttcgtgtgtgactcagacagagattgtttagacggatcagacgaagcctcatgcccggtattgacctgcggccccgcctctttccaatgtaactcctccacctgcattccgcagctttgggcatgcgataatgacccggactgcgaagacgggtctgacgagtggccacagcgttgtcgcggcctctacgtgttccagggagactccagtccctgtagcgcctttgagtttcattgtttgtccggagagtgcatccatagctcctggcggtgcgatggaggcccggactgtaaggataagagtgacgaagagaattgtgcagtagcaacatgcagaccggatgagttccagtgctcagatggcaattgtatccacggttccagacaatgcgatagggaatacgactgtaaggatatgtccgatgaggtcggttgcgtcaatgtcaccctgtgcgaaggtccaaacaaatttaaatgtcatagtggagagtgcataaccttagataaggtatgcaacatggccagggactgtagagattggagcgatgagcccattaaggagtgtggcacggcagagtgtttggacaataatggcggctgctcccacgtatgcaatgatctgaaaataggttacgaatgtctttgtcctgatggcttccagctggtcgcccagaggcgttgtgaggacatagacgagtgtcaggaccccgatacttgcagtcaactctgcgtcaatctggagggtgggtacaagtgccagtgtgaggaaggatttcaactcgatccgcacacgaaggcatgcaaggcagtgggaagtattgcctatttgttcttcaccaataggcacgaggtgcggaagatgacgctcgatcggagcgagtatacaagtcttattccaaatttgaggaatgtggtcgcactcgataccgaagtagcctccaatcggatttattggagcgacctctcgcagcggatgatttgctcgacacagttggatcgggcccatggtgtgtcttcttacgacaccgtgatttcccgcgacatccaggctccagatggattggccgtcgattggattcattcgaacatttattggacagattccgttctcggcacagtttcagtcgccgataccaagggtgtaaaacgtaaaactctgtttcgcgagaacgggtccaagcctcgggccatcgtggtggaccccgtgcacggtttcatgtattggactgattgggggacaccagccaaaatcaagaaaggggggctgaatggcgtggatatttactctttagtgacggagaatattcaatggcctaacggcatcaccctggacctgctcagcggacggctgtattgggttgatagtaagctgcacagcatctcatcaattgatgtcaatggtgggaaccgcaagacgatactggaagacgagaagagactggctcaccccttttcattggcagtattcgaggataaggtattctggactgatatcattaatgaggcaatcttttctgccaacaggctcacagggagcgacgtcaatttattagctgagaacctgctgtcacccgaggatatggtccttttccataatctcacccagccccgtggtgtgaattggtgcgagagaaccaccctgtcaaatgggggctgtcagtacttatgtttacccgccccccagattaacccccacagtcccaagtttacttgtgcatgccctgacggcatgctgttggccagagacatgcgcagctgcttgacagaggcagaagcagcggttgctacacaagagactagcacagttcggctgaaggtatctagcactgccgtgcgaacccagcacacaacaacccggcccgtccccgacacctcgaggctgcccggcgctacgcctgggctgacaaccgttgagatcgtcacaatgtcccatcaggctctcggtgatgttgctggccgaggaaatgaaaaaaagccttccagtgtacgggcactgagtatcgtgctaccaatcgtgctcttagtgtttctgtgcctcggggtgttccttttgtggaaaaactggaggctaaagaacattaattctatcaatttcgacaatcccgtgtatcaaaaaacaacagaggacgaagtacacatttgccataatcaagacgggtacagttatcccagtcgccagatggtctctttggaggacgacgtggca

SEQ ID NO: 11225 - DNA, 2580 bp, Artificial Sequence
  derived and/or modified sequence
atgggaccatggggatggaaattacgatggacagttgctcttttattagcagcagctggtacagctgttggtgacaggtgtgagcgtaatgaatttcaatgtcaagatggaaagtgtataagttataaatgggtttgtgatggttcagcagaatgtcaagatggatcagatgaaagtcaagaaacttgtcttagcgtgacttgtaaaagtggagacttctcttgtggaggtagagttaatagatgtattccacaattttggagatgtgatgggcaagtagattgtgacaatgggtcagatgagcaaggatgtccacctaaaacatgttctcaagatgaatttagatgtcatgatggaaaatgtattagtagacaatttgtatgtgatagtgatagagattgtttagatggaagtgatgaagctagttgtccagttttaacttgtgggccagcaagtttccaatgtaattcaagtacttgtataccacaactttgggcttgtgataatgatccagattgtgaagatggaagtgacgaatggccacaacgatgtagaggtctttatgtttttcaaggagattcatctccatgttcagcatttgaattccattgtttgtctggagaatgtattcattccagttggagatgtgatggaggtcctgattgtaaggataaatctgatgaagaaaattgtgcagtcgcaacttgtagaccagatgaattccaatgttccgatggaaactgtattcatggaagtagacaatgtgatagagaatatgattgtaaggatatgtcagacgaagtaggatgtgtcaatgttacattatgtgaaggacctaataaatttaaatgtcactcaggagaatgtataacattagataaggtttgtaatatggctagggattgtcgagattggtcagatgaaccaattaaagaatgcggaacagctgaatgtcttgataataacggaggatgtagtcatgtgtgtaacgacttaaaaattggatatgaatgtttatgtccagatggatttcaattagttgcacaaagaagatgtgaagatattgacgaatgtcaagatcctgatacttgttcacaactatgtgttaacttggaaggaggatacaaatgtcaatgtgaagaaggtttccaacttgatccacatactaaagcatgtaaagctgtaggatcaatcgcatatttatttttcacaaacagacatgaagtaagaaaaatgacacttgatagatctgaatatacgagtttaataccaaacttacgaaatgtagttgcacttgataccgaagttgcatcgaacagaatatattggtctgatttatcacaaagaatgatttgttcaactcaattggatagagctcatggagtttcatcttatgatactgttatttcaagagacatacaagctccagatggacttgctgttgattggattcattcaaatatctattggacagactctgtcttaggaacagtatctgttgctgatacgaaaggtgtaaaaaggaaaacattatttagagaaaacggaagtaaaccaagagctattgttgttgatcctgttcatggatttatgtattggaccgattggggaacaccagctaaaataaaaaaaggtggacttaatggagttgatatttattcattagttactgaaaatattcaatggccaaatggaattacattagatttattatcaggaagattatattgggttgattcaaaattacattcaatcagttcaattgatgtaaatggaggtaacagaaagactatattagaagatgaaaaacgattagctcatccatttagtttggcagtttttgaagacaaagtattttggacagatattattaatgaagctatctttagtgcaaatcgtctcactggatcagatgttaatcttttagcagaaaatttattgtcaccagaagatatggtactttttcataatcttactcaacctagaggtgttaattggtgtgaaagaactactttatcaaatggaggttgtcaatatttgtgtcttccagctccacaaataaacccacattcaccaaaattcacatgtgcttgtccagatggaatgttattagctagagatatgagatcatgccttactgaagcagaagcagctgttgctactcaagaaacttcaacagtccgattaaaagtaagttcaacagcagttagaacacaacacacaaccacaagaccagttccagacacatcaagattacctggagcaacacctggattaacaaccgttgaaatagttacaatgtctcatcaagcattaggagatgtagctggtagaggaaatgagaaaaaaccatcttctgttagagctttatcaattgtcttaccaattgttcttttagtttttctttgtcttggagttttcttactttggaaaaattggcgtttaaaaaatattaactcaattaattttgataatcctgtttatcaaaaaacaactgaagatgaggttcatatttgtcataatcaagatggatattcatatccatctcgacaaatggtttcattagaagacgatgtagct

SEQ ID NO: 11226 - DNA, 2580 bp, Artificial Sequence
  derived and/or modified sequence
atgggaccttgggggtggaagttgcggtggaccgttgcactgttattggcggctgccggaaccgccgtcggagatcgctgcgaacggaacgagttccagtgccaggacgggaagtgcattagctataagtgggtttgtgacgggagtgcagagtgccaggatgggtccgatgagtcacaggagacatgtctctctgtcacgtgtaaatctggtgacttttcttgcgggggcagggtgaatagatgtatccctcagttttggaggtgcgacggacaggtagactgcgataacggatccgatgagcagggctgcccgcccaaaacttgttcccaagatgaattcaggtgtcacgacggcaaatgcattagtcggcagtttgtgtgcgactctgatcgtgactgcttggacggcagtgacgaggcatcatgcccagtactaacttgtggccctgcatcattccagtgcaattcaagcacatgcatccctcagctatgggcttgtgacaatgaccctgactgcgaggatggctcggatgagtggcctcagcggtgtagagggctctatgtgtttcagggggattcatcgccctgtagcgcattcgagtttcactgcctatcaggcgagtgtatccactctagttggcgctgtgacggcggaccggattgcaaagacaagtctgacgaggagaactgcgccgttgcaacgtgcaggccagatgagtttcagtgctctgacgggaactgcattcatgggtcccgacagtgcgatcgagaatacgactgcaaagatatgagcgacgaggttgggtgtgtgaacgtcaccctctgcgaaggtccaaataagtttaaatgccattccggcgaatgtattactttggacaaggtatgcaacatggcacgcgactgtcgcgactggagcgacgaaccaatcaaggagtgtggaactgccgagtgtttggataataacgggggctgctctcatgtgtgtaacgaccttaaaatcgggtatgagtgtttgtgcccagacggattccagctcgtggctcagcgcagatgcgaggacattgatgagtgtcaagaccccgacacttgctcacagttatgtgtcaaccttgagggaggatacaaatgccaatgtgaggaagggttccagctcgatccacataccaaggcttgcaaggctgtgggttcaattgcttatttgttcttcacaaatcgacacgaagtacggaaaatgaccctggataggagtgagtataccagtctgatcccgaacttaagaaacgtggtggcactcgacacagaagtcgcctcaaaccgcatctactggtccgacttatcccaaagaatgatttgttccacacagttggaccgggcccacggagtttcctcatacgataccgttatcagtcgagatatccaggcccccgacggactggcggttgactggatccatagtaatatttattggactgatagcgtacttggaactgtctcagtcgcagacacaaaaggagttaaacggaaaacactcttcagagagaacgggtctaagccacgggctatcgtcgttgatcccgtacacgggtttatgtattggaccgattggggcaccccagcaaagatcaagaagggtggcctcaatggcgtggatatttacagtctggtcactgaaaatatccagtggcctaacgggattaccctcgacttgttgtcagggaggctctattgggtggatagcaagctgcacagcatcagctcaatcgacgtgaacggcggcaaccggaaaactattttagaggatgagaaacggttggcccacccttttagccttgccgtgttcgaggataaggttttctggacggatatcattaatgaggccattttcagtgctaaccgactgacgggatccgacgtgaacctgctggctgaaaacctgctgtcccccgaggacatggtactgtttcacaatctcacgcagcccagaggtgtgaattggtgcgagcgaactacactctctaatggcggctgtcaatatttgtgcctacctgcaccacagatcaatcctcactcgccaaagtttacgtgcgcctgcccagatggcatgcttctggccagggacatgcgatcctgtttgactgaagccgaagcagctgtagccacacaggagacctccactgtgcgtttgaaggtctcgagtaccgccgtgcgtactcagcatactacgactaggccagtgcctgacacgtcacgtctgcccggcgccacgcctggtctgaccacagtagagatagtgacaatgtcgcaccaggccctcggagacgttgcaggccggggcaatgagaagaaaccgagctctgtcagggctcttagtattgtattgcccatcgtcttacttgtattcctatgcttgggagtctttctcctttggaagaattggaggctgaagaacataaatagcatcaattttgataatccagtataccagaaaacgaccgaggacgaagtgcacatatgccacaatcaggacgggtacagctacccatctcgacagatggtatctctcgaagatgacgtggcc

SEQ ID NO: 11227 - DNA, 2580 bp, Artificial Sequence
  derived and/or modified sequence
atgggaccttgggggtggaaattaaggtggacagtggcccttcttcttgccgccgccggaactgcagtgggggatcgctgtgagcgaaatgaatttcaatgtcaggatggaaaatgcattagttacaaatgggtatgcgacggatccgccgaatgccaggatggaagtgatgagagtcaagagacatgcctatctgtcacatgtaaatctggggatttctcctgcggagggcgcgtgaataggtgcatcccacagttctggagatgcgatggacaggtcgattgtgacaatgggtcagacgaacagggatgtccacctaaaacttgctcgcaggacgaatttcggtgtcacgatggaaagtgtatcagtaggcaattcgtgtgtgattcagatagggactgccttgatgggtccgatgaagcttcctgtccagtactcacatgtgggcctgcctctttccagtgtaattcatctacttgcatccctcagttatgggcctgtgataatgatccagattgcgaggatggatccgatgaatggccccagcgttgtaggggactgtatgtctttcagggagattcctcaccatgctctgccttcgaatttcattgcctttcaggagaatgcattcactcttcctggcggtgtgatgggggacctgattgtaaagacaaatctgatgaagaaaactgcgcagtagcaacttgccgcccagatgaatttcagtgctctgacgggaactgtattcatgggtcccgacagtgtgatcgtgaatatgattgcaaggatatgtcagatgaagtagggtgcgtcaatgtgacactatgtgagggaccaaataaatttaaatgccactctggagagtgtatcactctagataaagtgtgtaatatggctcgcgactgccgggattggtccgatgagcccataaaagaatgtggaacagctgagtgtctagataacaacgggggatgcagtcatgtatgtaacgatcttaaaataggatacgagtgtctctgtcctgatgggttccagctcgtagcacagcggcggtgcgaggatatagatgaatgtcaggaccctgatacatgctcccagctgtgtgtcaatctcgaagggggatataaatgtcagtgtgaagaaggattccagttagacccacacacgaaggcttgcaaagcggtggggtctatcgcgtatttattctttacaaatcgccatgaggtgagaaaaatgacgcttgatcgctctgagtatacatctctgatccccaatcttagaaatgttgttgctcttgacacagaagtagcctctaatagaatttactggagtgatttatcgcagagaatgatctgcagtacacagctcgatcgggcacatggagtgagttcctatgatacagtgatatctcgcgatatacaggcccctgatggactcgctgtggattggatacattcaaatatctactggacagattctgtgctcggaactgtgtcggtggctgacactaaaggggtgaaaagaaaaacactcttcagggaaaatggatcaaaaccccgggctatcgtcgttgatcccgttcacggatttatgtattggactgattgggggacacctgctaaaatcaagaaaggaggactcaacggggtggatatttactcactcgtcacagaaaacatccagtggcccaatgggataacactagatcttctttcagggaggctctattgggtggattcaaaacttcattctatctcctctattgatgtgaatggaggaaatcggaaaactattctcgaagatgaaaaaagactagcacaccctttctccctggccgtatttgaggataaggtcttctggacagatataattaatgaggccatctttagtgccaaccgcctgacagggtccgacgtgaatctgctggcagaaaatctgctaagtcctgaagatatggtgctctttcataatctgacacagccaagaggagtgaactggtgtgaaaggacaactctatctaacggagggtgtcagtatctgtgcctgccagccccgcaaatcaacccacattccccaaaatttacttgtgcttgtcctgatgggatgctgctggcccgggacatgcgatcatgtctaactgaggccgaagcagcagtggccactcaggaaacatctacagtcagacttaaagtctcttcgacagctgtcaggactcagcatacaactactcggcccgtccccgacacttcacggcttccaggggcaacaccaggactgacgactgtcgaaatcgttacaatgtctcatcaggccctgggagatgtggccgggagggggaacgaaaaaaaaccttcatctgtgcgagctctttccatcgtcttgccaatcgttctgctggtgttcctgtgcctcggggtgtttctcctgtggaaaaattggcggctcaaaaacataaattctataaattttgacaaccctgtctatcagaaaacaactgaggatgaggtacatatatgtcataatcaggacggatattcttatccttcccgccagatggtatctctggaagatgatgtagca

SEQ ID NO: 11228 - DNA, 2580 bp, Artificial Sequence
  derived and/or modified sequence
atgggcccgtgggggtggaaactccgatggacagtcgccttgctgctggcggcggcgggaactgcggtcggggatagatgtgagcgcaacgagtttcaatgtcaggacggcaagtgtatttcatacaaatgggtatgcgatggtagcgcggagtgtcaagacggctcggatgaatctcaggagacatgtctctcggtgacttgtaagagtggtgattttagttgcggtgggcgagtcaatcgttgcattccacagttctggcgctgcgacggacaggttgattgtgataatggcagcgacgagcaaggctgcccgcctaagacgtgctcgcaagatgagtttcggtgtcacgatggtaaatgtatctcacgccagtttgtatgcgattcggaccgggactgtctcgatggttctgacgaagcttcgtgccccgtgctcacctgtggtcccgcttcattccagtgtaattctagcacctgcataccccagttgtgggcatgcgataatgatccagattgtgaagatgggtccgacgaatggccccaacgttgccgaggcttgtacgttttccagggagactcatccccatgctcagcctttgagttccactgcctttcaggcgagtgcatccattcttcttggcgttgcgatggcggacctgattgcaaggacaagagcgatgaggaaaattgcgcagtagccacatgtcgcccagacgaattccagtgttcggatggtaattgtatacatggatctaggcaatgcgatcgagagtatgattgtaaggacatgtcggatgaagtcggctgtgttaacgtcacattgtgtgagggacctaataagttcaagtgtcattcaggagagtgcattactttggataaggtttgcaatatggcccgggattgcagagactggtcggacgagcccatcaaggaatgtggtactgcagagtgcctagataacaacggcggatgctcgcatgtctgtaacgatctcaaaatagggtacgagtgtctctgcccagacggattccagcttgtggctcaacggcgatgcgaggacatagatgaatgccaggatcctgacacctgcagccagctgtgtgtgaacctagagggcggatataagtgtcaatgcgaagagggtttccagctcgatccacacactaaggcctgtaaggcagtcgggtcaatcgcgtacctgttttttacgaaccgtcatgaagtccgtaagatgactttggacaggtcggaatacacctctctgatccctaatttacgcaatgtggtggcgctcgacactgaagtcgcatcgaatagaatctattggtcggacctctcgcagcgcatgatttgctccacgcagctcgatcgtgcacatggcgttagctcatatgatacggttatttctcgagatatccaagcaccagacggacttgccgtggattggatccattccaacatttactggactgattcggttctaggcacagtctccgttgcggatacaaagggggtcaagcggaagaccctgtttcgggagaacgggtccaaaccacgggcaattgttgttgatccagtgcatgggttcatgtactggaccgattggggaacccctgctaagattaaaaagggtggtcttaatggagtcgacatctactctcttgttacggagaacattcaatggccgaatgggattaccttggatctcttatccggtagattgtattgggtagatagtaagctacacagcattagttcgatcgatgttaatggtgggaacaggaaaaccatccttgaggatgagaagagacttgctcatcccttctcgttagccgttttcgaggacaaggtcttctggaccgacatcatcaacgaagcaattttttcagctaataggttgacaggctcagacgttaatctcctcgcggaaaatttgttgtctccagaagatatggtcctattccataacctcacccagccccgaggcgttaactggtgcgagaggaccacactgtcgaacggcggttgtcaatacctctgtctgccagcgccccagattaacccgcatagccccaagttcacgtgcgcttgtcctgatggtatgcttctggctcgtgatatgcgaagctgtctgacagaggctgaggctgcagtcgcgacacaggaaacttcaaccgttaggcttaaggttagttccacagccgtcagaacccagcacacgacaactcgaccggtgcccgacaccagcagacttcctggcgctactcctggattgaccactgttgaaatcgtaacgatgtcacaccaagctctcggcgatgtggcaggacgcggaaatgaaaagaagccaagttcagtgagggcgttgagtattgtgcttcccatcgtcctccttgtttttctatgtttaggcgtcttcctgctgtggaaaaactggcggctaaagaacatcaattccattaacttcgataatcccgtatatcaaaaaaccacggaggacgaggtccacatctgtcacaatcaggacgggtatagctacccttctcgccagatggttagccttgaggacgacgtggcg

SEQ ID NO: 11229 - DNA, 2580 bp, Artificial Sequence
  derived and/or modified sequence
atggggccctggggctggaaactgcgttggaccgtcgccctgctcctggccgcggccggcacggccgtgggagaccgttgtgaaagaaacgaattccagtgccaggacggaaaatgtatttcatataaatgggtgtgcgatggtagtgcagaatgccaggacggaagcgatgaaagccaagaaacctgtctgtctgtgacatgtaagagtggtgacttttcctgcggtgggcgagtgaaccggtgcatacctcagttttggcggtgtgatggacaggtcgattgtgacaacggcagcgacgaacagggatgccccccaaagacatgttctcaggatgaatttcgctgtcatgacggaaaatgcatcagccgccaattcgtgtgtgactcggaccgtgactgcttggacggctctgatgaggcatcctgtcctgttctcacttgtgggcccgcctcgttccagtgcaactcctcgacatgcatcccacagttgtgggcctgcgataacgatccagattgcgaggatggatctgacgagtggcctcagcgttgtagaggcctctatgtattccagggcgactcttcgccctgctcagcttttgaattccattgcctctctggcgagtgtatccacagcagttggcgatgtgacggggggccagactgtaaggacaagagtgatgaggagaattgcgcggttgctacctgcaggcccgacgagttccagtgttccgacggcaactgtattcacggttccagacagtgcgatcgagaatacgactgtaaggatatgagcgacgaggtgggatgtgtcaacgtgacgctgtgcgaaggaccaaataaattcaaatgccacagcggagagtgcattaccctggacaaggtgtgtaacatggcccgggactgcagagattggtccgatgaacccattaaggagtgtggcacagcggagtgcttggacaacaacggaggatgctcacatgtgtgtaacgacctcaaaattgggtatgagtgcctgtgccctgacggcttccaactggtcgctcaaaggaggtgtgaggatattgacgaatgtcaggaccctgacacctgttcacagttgtgcgtgaacctcgaagggggctacaagtgtcagtgtgaggagggattccaacttgaccctcacactaaggcctgtaaagctgtggggtccatagcctatctgtttttcacaaatcgccatgaggtgagaaaaatgactttggacagatctgaatatacttccctgatcccaaatctgcggaatgtcgtggccctcgataccgaggttgccagtaatcggatatactggtcagacctgagtcagcgaatgatctgctctactcaattagacagggcccacggcgtttcctcgtacgataccgttatctcaagagatattcaggcccctgacggtttagcagtggactggattcactcaaatatttactggacagattcagtcttgggcacagtgtcagttgcggataccaaaggcgtgaagcgaaagactctattccgagaaaacggctccaagcctcgggcaatcgttgtcgaccctgtgcatgggttcatgtattggactgactggggcacccctgcaaaaataaaaaagggtggcctcaatggggttgatatctattcactggtcaccgagaatatccagtggcccaatgggattacccttgacctgctgagtggacgactttattgggtggactctaagctgcacagcatctcctcaatcgatgtcaacggcggcaaccgaaagacgattttagaagacgaaaaacgcctggcccacccattttctcttgcagtctttgaggacaaggtattttggaccgatatcatcaacgaagctatcttcagcgctaatcgcctgaccgggagtgacgtgaacctcctcgcagagaacctcctctctccagaagacatggtcttattccacaaccttactcagccacgcggggttaactggtgtgaaaggacgaccctgagtaacgggggatgtcaatacctgtgcctgccagcgccacaaattaacccccacagtccaaaattcacatgtgcgtgtcccgatgggatgctgctggctcgggacatgagatcgtgcctcacggaagccgaagccgccgttgctacccaggaaacatctaccgtaagactgaaagtcagttctaccgctgttcgcacacaacacacgacaaccaggccagttcccgacacctcccgccttccaggggcaaccccagggctgaccacagtagagatcgtgactatgagtcaccaggccctgggggacgtggctgggagggggaacgaaaaaaagcctagtagcgtgcgcgccttgtcaattgtgttaccgattgttctgctggtgtttttgtgcctcggcgtgttccttctgtggaaaaactggaggcttaaaaatattaacagcatcaacttcgacaacccggtctatcagaagacaacagaagatgaggttcatatctgtcataatcaggacggatattcctacccctcaagacagatggtgtcgctggaggatgatgtggcg

SEQ ID NO: 11230 - DNA, 2580 bp, Artificial Sequence
  derived and/or modified sequence
atggggccctgggggtggaaactcaggtggacagttgccctactgctagccgcagccggaactgcagtaggagataggtgtgaaaggaatgaattccagtgccaggatgggaaatgcatttcctataaatgggtgtgtgatgggagtgctgaatgtcaggacgggagtgatgaatctcaggaaacttgtctgagtgtcacttgcaaatctggagattttagttgtggggggcgtgttaatcggtgcatcccacagttttggcggtgtgacggacaggttgattgcgacaatggatcggatgagcagggatgccctccaaaaacttgttctcaggatgaatttcggtgtcatgatggaaagtgtatatctcgacagttcgtttgtgacagtgatcgagattgtcttgatgggtctgatgaagcatcttgtcctgtgttaacatgtggaccagcctccttccagtgtaacagtagtacatgcataccccagctctgggcctgtgataacgatcccgattgcgaagatggatctgatgaatggcctcagaggtgccggggactttatgtgtttcagggggattcctctccatgctcagcttttgaattccattgcctctcaggggaatgtatccactctagttggcgctgcgatggggggcctgattgtaaagataaatccgatgaagaaaactgcgccgttgccacatgtcgacctgatgaatttcaatgcagtgatggaaactgcatccatggaagtagacagtgtgaccgggaatatgattgcaaagacatgtcagatgaagtgggatgtgttaatgtcacactgtgtgaaggacccaacaaatttaagtgccactcaggggagtgcataacactggataaggtttgcaacatggccagggattgtcgggattggagtgatgaacctataaaagaatgcggaacagcagaatgtcttgataacaacggggggtgcagtcatgtatgcaacgatttaaaaatcgggtatgagtgtctatgcccagacgggttccagcttgtggcccagcggagatgtgaagacatcgatgaatgtcaggaccccgatacatgctcgcagctgtgtgtcaaccttgaaggaggatataaatgccagtgtgaagaaggatttcagcttgatcctcacactaaagcctgtaaggccgtgggatccattgcatacctattcttcacaaaccgccacgaggtgcgcaaaatgactctagatcgatccgaatacacaagtttgatacccaatctcaggaacgttgtggcccttgatacagaagtggcctccaatcgtatatattggtcagacttaagtcagaggatgatttgcagtactcaacttgacagggcacatggagtatcatcctacgatacagtaatatcccgggatatccaggcccccgatggactcgctgtagattggatccactctaatatttattggacagacagtgtgcttggaacagtatccgtcgctgatacaaaaggagttaaacggaaaacactatttagagaaaatgggtcaaagcctcgggccatcgtagtggatcccgttcatggatttatgtattggacagattgggggacacctgccaaaataaaaaaaggaggactgaatggagtggatatctattcgttagtaacagaaaatatccagtggcccaatggaataacactcgatctgctgagtgggcggctttattgggttgatagtaaattgcactctatctcttctatcgatgtgaacgggggaaatcgcaaaactatcttagaagatgaaaaacgcctcgcccatcccttcagtcttgctgtgttcgaagataaagttttctggactgatataataaacgaggccatattttcagctaaccgcctcactgggtcggatgtaaatctgcttgcagagaatcttctatcacctgaagatatggtcctgttccacaaccttacgcagcctagaggggtgaactggtgtgagcgaacaactttatccaatgggggatgtcagtatctctgcctacccgccccccagatcaacccccattcccccaaatttacatgcgcctgccccgatggaatgctccttgctagagatatgcgcagttgtctaacagaagcggaagccgctgtggctacacaggaaactagtacagtgaggctgaaagtgtcatctactgcggtccggacacaacacactactacacgacccgtccccgatacatcacgactccccggggctactccagggctaactactgttgaaatagtgactatgtcacatcaggccctcggagatgtcgccgggcgaggaaatgaaaaaaaaccttcatctgtcagggcgctttcaatcgtgctaccaatagtgctgcttgtcttcctctgtctcggagtattcctgctttggaaaaactggcgcttgaaaaatatcaattctatcaacttcgacaatcccgtgtatcagaaaactacagaagatgaagtgcatatctgtcataaccaagatggatattcatatccttcacggcaaatggtctccctagaagatgatgtggca

SEQ ID NO: 11231 - DNA, 2580 bp, Artificial Sequence
  derived and/or modified sequence
atggggccttgggggtggaagttgcgatggaccgtggccctgctgctggcggctgccggaactgctgtgggagatcggtgcgaacgcaacgagtttcagtgtcaggatggaaaatgcattagctacaaatgggtctgcgacgggtcggccgaatgccaggatggttccgatgaatcccaggaaacttgtctgagcgtgacttgcaaatcgggcgatttttcatgcggcggccgggtcaaccggtgcattccacagttttggcggtgcgacggacaggtcgactgcgacaacggatccgatgagcagggctgcccaccaaagacctgttcgcaggatgagttccggtgccacgatgggaagtgcatctcccgccagttcgtgtgcgattcagaccgagattgcctcgacggctccgatgaggcttcgtgtccggtcctgacctgcggaccggcttcatttcagtgtaactcttcaacttgcattccccagctgtgggcctgcgataacgatccggactgcgaggacggttccgatgagtggccacaacgctgccggggactctacgtgttccaaggcgactcgtccccgtgtagcgcctttgaattccattgcctgtcgggcgaatgcatccacagctcgtggagatgcgacggcggtcctgattgcaaggataaaagcgacgaggaaaattgtgctgtggcaacgtgccgcccagacgaatttcagtgttccgacggtaattgtattcacggttcccggcagtgcgatcgcgagtatgactgcaaagacatgtctgacgaggtgggctgcgtgaacgtgaccctttgcgaaggacccaacaagttcaagtgccacagtggggaatgtatcaccctggacaaggtttgtaatatggcgcgagactgccgcgattggtcggatgagccgattaaagagtgcggaacggcagagtgcctcgataacaacggtggatgctcacacgtttgcaacgacctgaaaatcggttacgagtgtctttgcccggatggtttccagctggtggcacagcggagatgtgaggacatcgacgaatgtcaggacccggacacttgttcccagctctgtgtgaacctcgaaggaggatacaaatgccagtgcgaggaaggattccagctggatccccacactaaggcatgcaaggccgttggttcaatcgcgtacctgttcttcaccaatcggcacgaagtccgcaagatgactttggaccggtcagaatacacttcgctcattcccaacctcagaaacgtcgtggcgcttgataccgaggtagccagcaaccgcatctactggtcggacctttcacaacggatgatctgcagcacccaactcgatcgcgcgcatggagtttcgagctacgacacggtcatctcccgggacattcaggcgccagacggactggccgtcgactggatccattcaaacatctactggaccgactcggtgctgggaaccgtctccgtggcggacaccaagggtgtcaaacgcaagactctctttagagaaaacggaagcaagcctagagcgatcgtggtcgacccagtgcatggcttcatgtactggacggactgggggaccccggccaagatcaaaaagggaggactgaatggcgtggacatctattcgctggtgactgagaacatccaatggcctaacggcatcactctcgacctcctgtcggggcgtttgtactgggtggattcaaaactgcatagcatatcctccattgacgtgaatggcggtaaccgcaagaccatccttgaggacgagaagcgccttgcacacccattcagccttgccgtgttcgaggacaaggttttctggaccgacatcattaacgaagccatcttctccgcaaaccgcctgaccggctcggatgtgaacctcctggccgaaaatctgctttccccggaggacatggtgttgtttcataacctgactcaacctcggggagtcaactggtgcgagcgcactactctgtctaacggcggatgtcagtacctgtgtttgccggcaccgcaaatcaatcctcactcgccgaagtttacctgtgcctgcccggacggaatgttgctggcccgagacatgagatcgtgtttgactgaggcggaagcggcggtcgccacccaagaaacttcgactgttaggctgaaagtcagctcgaccgcggtgcgcactcaacacaccaccacgcgtccagtgccggatacttcacgcctgccaggtgcaacgccaggactgacgactgtagaaatcgtcaccatgtcccaccaggcactcggtgatgtggccggacgcggtaatgaaaagaaaccgtcatcggtgcgcgctctcagcatcgtgctgcctatcgttttgctcgtgttcctgtgcctgggagttttccttctctggaagaattggaggctcaagaatatcaattccatcaatttcgacaacccggtgtaccaaaagaccaccgaggacgaagtccacatctgccataatcaagacggctacagctatccaagcagacaaatggtaagcctggaagatgacgttgcc

SEQ ID NO: 11232 - DNA, 2580 bp, Artificial Sequence
  derived and/or modified sequence
atggggccgtggggttggaagctgagatggactgtggcactgctgcttgcggcagctggtactgcagtcggtgaccggtgtgagagaaacgaatttcaatgtcaagatggaaagtgtattagctacaagtgggtctgtgacggttcagcagaatgccaggacggcagcgatgaaagtcaagaaacctgtctgtcagtgacgtgtaagtcgggggacttctcctgcggtggcagggtcaaccgctgcattcctcaattttggaggtgcgacggacaagtggattgtgacaacggatcggatgaacaaggctgtcccccaaagacgtgcagccaagacgagttcagatgtcacgatggtaaatgtatctcaaggcaatttgtgtgtgactcggacagagattgtttggacgggagcgatgaagcctcttgtccggtgctcacttgtgggccagcttcctttcagtgtaactccagcacctgtatccctcagctttgggcctgtgataatgaccctgactgtgaggatggatccgatgagtggccacaaaggtgtagaggtttgtacgtgtttcagggtgacagctccccctgctcggcattcgaatttcattgtctttcaggggaatgtattcattcgtcctggagatgtgacgggggacctgactgtaaggataagagtgatgaagagaattgcgccgtggcaacgtgccggcctgatgaatttcagtgttcagatggtaactgcatccatggctcgcgacagtgtgatagagagtacgactgtaaagacatgagcgatgaggtgggttgtgtgaatgtgaccctttgcgaaggacccaacaagttcaagtgtcactcgggcgaatgcattaccttggataaggtttgcaacatggcgagagactgccgtgattggtcagatgaacctatcaaggagtgcgggaccgccgaatgtcttgataacaacggtggttgttcgcatgtgtgcaatgatcttaagattggctacgaatgcctctgccctgatgggtttcaacttgtcgcacaaaggaggtgtgaggatatcgacgagtgtcaggacccagatacttgctcccaactttgtgtgaacctcgaaggtggttacaaatgccagtgtgaagagggcttccaactggatccccataccaaagcatgtaaggcagtgggatcgatcgcctacttgtttttcactaatcgccacgaggtccgaaagatgaccctcgatcgctctgaatacacttcattgatccctaatcttagaaacgtcgtcgcactggataccgaagtcgcatctaatcgaatttactggtcagatttgagccaacgcatgatttgctccactcaacttgatcgtgcacatggcgttagctcgtacgacaccgtcatatcgcgagacatccaagcgccagacggacttgctgtggactggattcattcaaacatctattggaccgacagcgtgctggggacggtgtccgtcgctgatactaaaggggtcaagagaaagactttgttccgagagaacggatcaaagcctagggcgattgtcgtggatccagtgcatgggtttatgtattggacggattggggaacgcctgcaaagattaagaaggggggtcttaatggagtggacatttactcgctggtgactgaaaacatacaatggcctaatgggattacccttgaccttctctccggacgattgtactgggtggattccaagctgcattcgatctcctcgatcgacgtgaatggaggaaaccgaaaaaccattcttgaagatgagaaacgtctggcacatccatttagcctcgccgtgtttgaagataaggtgttttggactgatatcataaacgaagcaatattctccgctaataggctgaccggttcggacgtcaaccttctggcggagaacttgctgagccctgaggatatggtcctctttcacaatctgacccagcctagaggcgtcaactggtgtgaaagaactacgctgtccaacggtgggtgtcagtacctctgccttcccgcaccacagattaatccgcactcgcctaagtttacctgcgcatgccctgatggaatgctcctcgcacgagatatgaggtcgtgtctgaccgaagctgaagccgcagtggcgactcaggaaacctcgactgtgaggcttaaagtgagcagcacggcggtgagaacccagcacaccaccaccagacctgtgccggacacctccaggcttccaggagctaccccaggcctcacgactgtcgagattgtcaccatgtctcaccaagccctgggggacgtggcgggcaggggtaacgaaaagaagccgtcaagcgttcgcgcactcagcattgtgctcccaatagtccttctggtgttcctttgcctgggagtgttccttctgtggaaaaactggcgcttgaaaaacatcaattcgatcaacttcgataacccagtgtaccagaaaactaccgaggacgaggtccacatttgtcataaccaagatggatactcctatccctcccgtcagatggtcagccttgaggacgatgtcgcc

SEQ ID NO: 11233 - DNA, 2580 bp, Artificial Sequence
  derived and/or modified sequence
atgggtccttggggatggaagctccgctggacggtcgccctcttgcttgccgccgccggtactgcagtcggtgaccggtgtgagcggaacgaatttcaatgccaagacgggaagtgtatttcatacaagtgggtgtgtgacggatcagccgaatgtcaggatggttcggatgaatcgcaagaaacgtgcctttcagtcacctgtaaatcgggagacttttcgtgtggaggacgcgtgaacagatgtataccgcaattctggcgttgtgacgggcaagtggattgtgataacggcagcgatgaacaaggatgtccccctaagacctgctcccaagatgaatttagatgtcatgatggaaaatgcattagtcgacagtttgtctgtgacagcgatcgtgattgtcttgatggctccgatgaggcatcttgtccagtgctcacgtgtggcccggcttccttccagtgtaacagctcaacttgtataccccaactgtgggcatgcgataacgatccagattgtgaggacggctcggatgagtggccacaaagatgccggggcttgtacgtgtttcaaggagacagctcgccatgttcggccttcgagtttcactgtctttcgggtgagtgcatccattcgtcatggagatgcgacggtgggcctgattgtaaggacaagagcgatgaagagaattgtgcagtcgcaacctgccgcccggatgaatttcagtgctctgacggtaactgtatccatgggagccgccaatgtgatcgtgaatacgattgcaaagacatgtcagatgaagtaggttgcgtgaatgtgacgctttgcgaaggccctaataagtttaagtgtcattccggtgaatgcattaccctggataaagtttgcaatatggcccgagactgtagggattggtccgatgagcctatcaaggagtgcggcaccgcggaatgtctggacaataacggtggttgctcacatgtctgtaatgacttgaagattggatatgaatgtctttgtcctgatggatttcaactggtggcacagcggcgctgcgaggacattgatgaatgtcaagaccccgacacctgctcgcagctgtgcgtcaacctggaaggtggatacaaatgtcagtgtgaagagggattccaacttgatcctcataccaaggcgtgcaaggcagtgggatcaattgcataccttttcttcactaataggcacgaagtgagaaagatgacgctggataggtcggaatacaccagcctgatcccaaaccttagaaacgtggtcgccttggacactgaagtggcgtcaaatcgcatttactggtccgacttgtctcaacggatgatttgctcgactcagctggatagagcacacggtgtcagttcttacgacaccgtgatctccagagacatccaggcccccgatggcctggccgttgattggatccattccaacatttactggaccgattctgtgctcggaactgtgtccgtcgcagatactaagggtgtgaagcgtaagaccctctttagagagaacggttccaaaccgcgagcaatcgtcgtggatccagtgcatggattcatgtactggaccgactgggggactccagccaagatcaaaaaggggggcctgaatggcgtggacatttactcacttgtgaccgaaaacattcagtggcctaatggaattactcttgatctgctctctggtcgcctgtactgggtcgacagcaaactgcattcgataagctccatcgatgtgaacggtgggaaccgaaagactatccttgaagatgaaaagagactggcacaccctttttctctcgcagtgtttgaagataaagtgttttggaccgatatcataaatgaagctatcttttccgcaaatcgtcttaccgggtctgatgtaaacctcctggcggagaatctgctgtcgcccgaggacatggtcctgtttcacaatcttacgcagccccgaggggtcaactggtgtgaacggactactctcagcaacggcggatgccagtacttgtgcctccctgcacctcaaatcaacccccactcgcccaagttcacctgcgcttgcccagacggcatgcttcttgcaagggatatgagatcgtgtctcaccgaagctgaggcggcggtcgccacccaggaaacctcgactgtgagacttaaagtctcatccaccgcagtgaggacgcagcataccaccacccgcccagtgcctgatacctcacgactccccggagcaactccaggactgaccactgtggaaatagtgactatgtcacaccaggcactgggtgatgtcgcaggtaggggcaacgagaaaaagccaagctccgtgagagcgttgtctattgtgcttcctattgtccttctcgtgtttctgtgtctgggagtgttccttctttggaagaactggcggctcaagaacattaactcaataaacttcgataatccagtataccagaaaacgactgaggatgaggtccatatttgtcataaccaagatggatattcctacccttcgcgccagatggtgtcactggaggatgacgtcgca

SEQ ID NO: 11234 - DNA, 2580 bp, Artificial Sequence
  derived and/or modified sequence
atgggcccttggggatggaagttgcgatggactgttgccttactgttagccgctgctggtactgcagttggcgacagatgcgagcgaaatgaatttcaatgtcaggatggaaagtgcatctcatacaagtgggtttgcgatggttcggctgaatgtcaggatggaagtgatgagtcacaagaaacctgtctctcagtgacctgcaaatcgggcgatttctcttgtggcggtcgagttaatcgatgcattccacaattctggagatgtgatggtcaagttgattgcgacaacggaagcgatgagcagggctgtccccctaagacttgtagccaggacgaatttaggtgtcacgacgggaaatgcatatctaggcaattcgtctgcgactctgatagagactgcctggacggttcagacgaagctagctgtcccgtgctcacctgtggacccgcttcgtttcaatgtaattccagtacttgtatcccgcaactttgggcatgcgataacgatccggattgtgaagacggttcggatgaatggccccaacgatgccgagggttgtacgtgttccaaggtgactcatctccttgttctgccttcgaatttcactgcctcagtggtgagtgcattcattcatcgtggagatgtgatggaggacctgattgcaaagataagtccgatgaagaaaactgtgctgttgcgacatgtcggcctgatgagtttcagtgtagcgatggaaattgcattcacgggtccagacaatgtgatcgcgaatacgattgtaaggatatgtccgacgaggttggatgcgtcaatgtgaccttgtgcgagggtcccaacaagttcaaatgccactctggtgaatgtataactctggataaagtttgcaacatggctagggactgcagagattggtctgatgagcctattaaggaatgtggaacagccgaatgtttagacaataacggtggctgtagtcatgtatgcaatgatcttaagatcggttatgaatgcttatgtcccgatggctttcaacttgttgcccaaagaagatgcgaagacattgatgagtgtcaggatccagatacttgcagtcagctttgcgttaaccttgagggcggttataaatgccagtgtgaggaaggatttcagctagatcctcataccaaagcttgcaaggccgttggatcgattgcgtatctttttttcaccaatagacatgaagtacggaaaatgacactcgatcgtagcgaatatacatcattaattccaaatctccgtaacgtcgttgctcttgatacagaggtggctagtaataggatctattggtcggatttgagccaaaggatgatctgttctacccagctggatcgagcacacggagtttcctcttatgatacagtgatcagtcgggatattcaagcccccgacggcttggctgttgactggatccattcaaatatatattggacagatagcgtacttggtactgtttctgttgctgatactaaaggagtgaaacgtaagactttgtttagggagaatggatcgaaacccagagcgatagttgtcgatcctgtgcacggtttcatgtactggaccgattggggaactccagctaaaattaaaaaaggagggttgaacggcgttgacatctactcgttagtgactgaaaacattcagtggcctaatggtatcactttagatcttctctcaggaaggttgtactgggtggatagcaagcttcactccatcagctctattgatgtcaacggaggaaatcgaaagactattctagaagacgaaaaacgtcttgctcacccattctctctggccgtgttcgaagataaggttttctggactgacataataaatgaggctattttctctgctaaccgactaacgggatctgacgttaatctcctagctgagaatttgcttagcccggaggacatggtgctcttccataacttgactcagcccaggggcgtcaactggtgcgagcgtacgacgctgtctaatggtggttgccagtacctctgtttgcctgcaccacaaattaatccgcacagcccaaagtttacatgcgcttgtccagatggaatgcttttggcgagggatatgagaagttgtttaaccgaggccgaggctgctgttgcgacacaagaaactagcacggtccgtttgaaagtaagttcaactgccgtccgtacgcagcacaccacgaccagaccagtcccagataccagtcgtctccctggtgccacaccggggctaactacggtggagattgttaccatgtcccatcaagcgttgggtgacgttgcaggccgcggcaatgaaaagaaaccttcatctgttcgagctctctcaatcgttctccctatagttctgttggtgtttctttgcctgggtgtcttcttgctttggaaaaactggcgcttgaagaacattaactctattaattttgacaacccagtttatcagaaaaccaccgaagatgaggtccacatatgccataatcaggatggctattcctatccaagccgtcagatggtgtcattagaggacgacgtagca

SEQ ID NO: 11235 - DNA, 2580 bp, Artificial Sequence
  derived and/or modified sequence
atggggccctggggctggaagttgcgctggacagtcgcgttgttactcgctgcagccgggacagcagtgggggaccgttgtgaacggaatgagttccaatgccaggacggaaagtgtatttcatataaatgggtgtgtgatggtagtgctgagtgccaagacggtagcgacgagtcacaagagacttgtctgtctgtgacctgcaaatccggggattttagttgtggcggcagagttaaccggtgtataccacaattctggagatgcgatgggcaagtcgactgcgacaacggttcggatgagcaaggatgcccccctaaaacatgtagccaggatgagtttcggtgtcatgacgggaagtgcatttcgagacagttcgtgtgcgacagcgacagggattgtttggacggctctgatgaagcatcttgcccagtgctgacatgtggtcccgcgagcttccagtgcaactccagtacttgcatccctcaactgtgggcctgtgacaatgatccagactgtgaagacggctctgacgagtggccacagagatgccgcggtctctatgtgttccaaggcgatagttccccctgcagcgcatttgagtttcattgtctcagcggagagtgcatccacagttcgtggcggtgcgatggaggccccgactgcaaggacaagtccgacgaggagaactgtgcagtcgctacatgccggccggatgagtttcagtgcagcgacgggaattgcatccacggatctcggcagtgcgatcgggagtacgattgtaaggatatgagtgatgaggtgggctgtgttaatgtgaccttatgcgagggaccaaacaagtttaaatgccactcaggagaatgcatcacgctggacaaagtctgcaatatggctcgggattgccgagattggagcgacgagcccataaaggagtgtgggacagccgaatgtctcgataacaatggaggctgttcccacgtctgcaatgatctaaagataggctacgaatgcctgtgtcccgacggctttcagctggtagcccagcgccgatgtgaagatatcgatgaatgccaggacccggatacatgcagccagctatgcgtgaacttggagggcggttacaagtgccagtgcgaggaaggttttcaacttgatccccacactaaggcctgtaaagccgtgggcagcatcgcctatctgttcttcaccaaccgtcacgaagtccgaaagatgaccttggacagaagtgagtatacctctctcatccctaacctgcggaatgtcgtggcactggatacagaggtggcctctaaccggatctattggagcgacctgagccagcggatgatctgcagcacacagttggatcgcgctcatggcgtcagcagctatgataccgtgattagccgagacattcaggcccctgatggcctagccgtggattggatccattccaatatctactggaccgattcggtccttggcacagtctctgtggcggacaccaagggggtgaaacgcaaaactctatttcgggagaatggctctaagcccagggccatagtcgtggatcctgtgcatggattcatgtactggacagactggggtactcccgctaagatcaaaaaaggaggtctcaatggcgtggatatttattcactagtgaccgagaacattcagtggccaaacggcattactctagacttgttgagcggtcgactctactgggtggacagcaagctgcattctatctcaagcatcgacgtgaacggagggaatagaaagaccatccttgaagacgaaaaaagattggcacacccttttagcctcgcggtgttcgaggacaaggtgttttggactgacatcatcaacgaagccatttttagtgcaaaccggctgactgggagcgacgtgaatttgttggccgaaaatctcctatccccggaggacatggtgctgtttcacaacctgacccagccaaggggcgtcaattggtgtgagcggactacccttagcaacggcggatgccagtacctgtgcctgccagccccgcagatcaatccacactctcccaaattcacatgcgcatgtcctgatggtatgttacttgccagagacatgaggagctgcctcacagaagcagaggccgccgtggcgactcaggagacatcaactgtacgcttaaaagtatcatctaccgctgtccgcacacagcacacgaccacgcggcccgtgccggacacctctcggctgcccggggccacaccaggcctgaccacagtcgaaatcgtgaccatgtcgcatcaggccctcggagacgtcgccggtcgcggcaacgagaagaagcccagttccgtccgtgccctttcgattgtccttcctatcgttctcctcgtgttcctgtgtctaggcgtgttcctactgtggaagaactggcgactcaaaaacatcaattcgatcaactttgataaccccgtataccagaagacaacagaagacgaggttcacatttgtcacaaccaggatggttacagctacccgtcgcggcagatggttagcctcgaggacgacgtcgct

SEQ ID NO: 11236 - DNA, 2580 bp, Artificial Sequence
  derived and/or modified sequence
atggggccctggggctggaaattgcgttggactgttgcattgctgctggcagctgcaggaactgccgttggagaccgctgcgaaagaaacgagtttcagtgccaggatggaaaatgtatttcttacaaatgggtctgcgatggttccgctgagtgccaggatggatcagatgagagccaggaaacctgtctgagcgttacgtgcaagtctggagactttagttgcggaggccgggtcaaccgatgcatccctcagttttggcgatgtgacgggcaagtagactgtgataatgggagcgatgagcaaggttgcccacctaagacgtgcagccaggacgagtttagatgtcacgatgggaagtgtatatctcggcaatttgtgtgtgacagcgatcgggattgcctggacggaagtgatgaggctagttgtccagtgctgacctgtggccctgccagcttccagtgtaattcttctacatgtatcccgcaactgtgggcctgcgacaatgacccggattgtgaggatgggtcagacgagtggccccagcgatgtcgaggactttacgtgttccaaggcgactctagcccctgtagcgcctttgagtttcactgccttagcggagaatgtatacatagctcctggcgatgcgacggcgggcccgattgtaaagataagagcgacgaggagaactgcgccgtcgcaacttgccgacccgacgagtttcagtgctccgacggtaattgtattcacggctcacgccagtgtgatcgcgaatacgactgtaaagacatgtccgatgaggtgggatgtgttaacgtgaccctctgcgaagggccaaacaagttcaaatgccacagcggtgagtgtattacgctcgacaaggtatgcaacatggcgcgggattgtagagattggtccgatgaaccaataaaagagtgtgggactgctgagtgcctcgataataatggcggatgctctcatgtttgcaatgatctgaagataggctacgaatgcctgtgcccggatggattccagcttgtggcacagcggcggtgcgaggacatagacgagtgtcaggaccccgatacgtgtagccaactctgcgtgaatttggaaggaggctataagtgtcagtgcgaagagggcttccaacttgaccctcataccaaagcctgcaaagcagtggggagtattgcttatctgttctttaccaacaggcatgaggtccggaaaatgaccctggaccggtccgagtatacttcactaattccaaacctgaggaatgtcgtcgcccttgacaccgaagttgcctcaaacagaatctactggagcgatctaagccaaaggatgatctgctctactcagctcgaccgggcgcacggagtttcatcctatgatacagtgattagtcgggatatacaggcccccgacggactggccgtggattggatccactcaaatatttactggaccgattctgtgctgggcacagtgtctgttgcggatactaaaggcgtgaagcggaaaaccctttttcgcgagaatggcagcaagccgagagccatagtcgtggacccagtgcacggcttcatgtactggacggactggggcactccagccaagataaaaaagggagggttgaacggtgtggacatctattctcttgtgaccgaaaatatacagtggccaaatgggatcacccttgacttattatctggcagactgtattgggtcgatagtaagttgcactctatttcgtctattgacgtgaatgggggaaatcgcaaaaccattctcgaagatgaaaaacgccttgcccaccccttttcactggcggtcttcgaggataaggttttttggacggacatcatcaatgaggccatttttagtgctaataggttgaccggaagcgacgttaatctgcttgccgaaaacctcctaagtcccgaggacatggttctgtttcacaatctcacccagccccggggggtgaattggtgtgaaaggaccaccttatccaacggggggtgtcagtacctctgtctccctgctccgcagataaatccccattcccctaagtttacgtgtgcgtgcccggatggcatgttactggctagggatatgcgatcatgcttgaccgaagcagaagccgccgtggcgacacaagaaacttcaacggtccgactgaaggtatcgagtacagccgtgcgtacccaacacaccactacccgcccggttcccgacacttcccgcctccccggcgctacacctggcctgacaactgtggagatcgtcacaatgagccatcaggcgttgggggacgtggcgggcagggggaatgaaaaaaaaccatcgtccgttagagcattatccattgtgctgccaatcgtacttcttgtttttctgtgccttggagtgtttcttttgtggaaaaactggcgcttgaaaaatattaattctattaacttcgataatcccgtctaccagaagacaacagaagatgaggtgcacatctgccacaatcaggatggatactcttacccaagccggcaaatggtgtccttggaggatgatgtggcc

SEQ ID NO: 11237 - DNA, 2580 bp, Artificial Sequence
  derived and/or modified sequence
atgggaccctgggggtggaagctcagatggaccgttgccctgctgctggccgctgcgggaacggcagtgggagacaggtgtgaacgcaatgagttccaatgccaggatggaaaatgcatcagttacaagtgggtctgtgacggttcggcggaatgccaagacggatcggacgagagtcaggaaacctgtctctccgtgacctgcaaatccggtgatttcagctgcggaggaagagtcaataggtgtatcccgcaattctggcgctgtgatgggcaggtcgactgcgacaatggcagcgacgaacaggggtgtccacccaagacgtgctctcaagacgagttcagatgccatgacggcaaatgcattagtcggcagtttgtctgtgattcggatcgcgattgtctggatggatccgatgaggcctcctgtccggtgctgacttgtggaccggcctcatttcaatgcaactcctcaacctgcatcccgcaactgtgggcctgcgacaacgacccagattgcgaggacggcagcgacgagtggccacagagatgcagaggactctatgtgttccagggagactcctcgccgtgctccgccttcgaattccattgcctgagcggcgaatgcatccacagctcatggcgctgcgacggaggaccagactgcaaggacaagagcgatgaagagaattgcgccgttgctacctgtcggcccgacgagttccagtgctcggatggcaattgtatccacggatcgcgtcagtgcgacagggaatacgactgcaaagacatgtccgatgaagtgggatgcgtcaatgtcaccctgtgcgaagggccgaataagttcaagtgccacagcggcgaatgtataactctggataaggtgtgcaacatggctagagactgtcgggattggtccgacgaaccgatcaaggaatgcgggacggcagaatgcctcgacaataacggaggatgttcacacgtgtgtaacgacctcaagatcgggtacgagtgcttgtgcccagatggcttccaattggtcgcccaacgccgctgcgaggacatcgatgagtgtcaggacccggatacgtgctctcagctctgtgtgaatctcgagggcggttacaaatgtcagtgcgaagaaggcttccaacttgatccacataccaaggcgtgcaaagcggtgggatccatcgcgtacctgtttttcacgaaccgccacgaggtgcggaagatgactctggacagatcagaatacacttcactcatcccaaacctgcggaacgtggtggctcttgacaccgaagtggcctcgaaccgtatttactggtccgacctgagccaacggatgatttgctccactcagctcgaccgggcacatggagtctcttcgtacgacactgtcatctcccgcgacatccaggcccctgacggccttgcagtcgattggatacacagcaatatctactggacggatagtgtcttgggaaccgtttccgtggcggacaccaagggcgtcaaacgcaagaccctgttccgcgaaaatggatccaagccgcgagccatcgtggtagatcccgtccatggatttatgtattggactgattggggcactcctgccaaaatcaagaagggtggcctgaatggtgtggacatttactcgctggtgaccgagaacatccagtggccaaacgggatcaccctggatttgctctcaggccggctctactgggtggattccaagctgcacagcatctcgtccatcgacgtgaacggtggcaaccgcaaaactatactcgaagatgaaaagagactggcgcacccgttcagcctggccgtctttgaggacaaggtgttttggactgatatcatcaacgaggcaatcttcagcgctaacaggctgactggttcggacgtgaaccttctcgcggagaacctgctgtcgcctgaggacatggtcttgttccataacctgacccagccacgcggagtcaactggtgcgaacggaccactctgtcaaacggagggtgccagtacctgtgcctgcccgcgccgcagatcaacccgcactcgcccaaattcacttgcgcatgcccggatgggatgctcctcgcacgagacatgagatcctgcctgaccgaggcggaagcagcggtagccacccaagaaactagcaccgttcggcttaaggtgtcgtcaactgccgtgagaactcagcacactactacccgccctgtgccggatacgagccgcctgccgggggccacccctggacttactacggtggagatcgtaaccatgtcccaccaggctctgggagacgtggccggacgaggaaacgaaaagaaaccttcatcagtgagggcactgtcgatcgttctgccgatcgtgttgttggtgttcttgtgcctgggggtttttcttctctggaagaattggcggctcaagaacattaactctatcaactttgacaatccagtctaccaaaaaactaccgaggacgaagtgcatatctgccacaatcaggacggctactcatacccgtcacggcagatggtgtcgctggaggatgacgtggcg

SEQ ID NO: 11238 - DNA, 2580 bp, Artificial Sequence
  derived and/or modified sequence
atgggaccttgggggtggaaactacgctggacagtcgccctgttactagccgcagctgggacagctgttggagaccggtgcgaaagaaacgaattccagtgtcaggatgggaagtgcataagctataagtgggtttgcgatgggtctgctgaatgtcaagacggttccgatgaatctcaggaaacttgtctctcagttacctgtaaatccggtgacttttcatgtggaggtcgggtgaacagatgtataccgcagttttggagatgtgatggccaagttgactgtgataacggctccgacgagcagggctgccctcccaagacctgttcacaggacgagtttcgctgccatgacgggaaatgcataagtcgtcagttcgtgtgtgactccgacagggactgtctggatggcagtgatgaggcatcatgcccggttctgacttgtggtcctgcctcctttcagtgtaactcatctacatgtataccccagctgtgggcatgcgataatgatcccgactgtgaggacgggtccgacgagtggccccagagatgccggggcctgtatgtctttcagggtgacagttctccatgttccgctttcgagttccactgcctgtctggcgaatgtatccactctagctggcggtgtgacggcggccctgactgtaaggacaagagcgatgaagagaattgtgccgtggccacttgcaggcccgatgaatttcagtgctctgatggtaactgcattcacggaagcaggcagtgtgaccgggagtatgactgtaaggatatgtccgacgaggtggggtgcgtgaacgtgactttgtgcgagggtccaaataaattcaagtgccactccggagagtgtatcaccctggataaggtctgcaatatggcccgcgactgccgggactggtctgatgagccaattaaggagtgcggcacagctgagtgcctggataataacggcgggtgtagccacgtgtgcaacgacctgaagataggctacgagtgcctttgcccggacggtttccagctggtggcacagcgacggtgcgaagatatagatgagtgccaagatccagatacttgtagccagctgtgcgtcaatctggaaggagggtacaaatgtcagtgcgaagagggcttccagctagacccacacacaaaggcttgcaaggctgttggcagcatagcatatctttttttcactaaccgtcatgaagttcgaaagatgaccctggaccgaagcgagtacacaagtttaatacccaacctgcgaaatgtggtcgccctggacacagaagttgccagtaacagaatatattggagcgacctgtctcagaggatgatttgctccacccagctcgatcgcgctcacggcgtttcctcctatgacaccgtgattagtcgtgacatacaggcccccgatggcctggctgttgattggatacatagtaacatatactggactgacagtgtcctcggcacagtatccgtggctgacaccaaaggtgtgaagagaaagactctattcagagagaatggcagcaaaccaagagccatagtagttgaccccgtccacggttttatgtactggaccgactggggcactccagctaagattaaaaagggtggtctgaacggcgtggatatctactctctggtgacagagaacatccaatggcccaacgggattacactggaccttctctcaggaaggctttactgggtcgattccaagctgcacagtatctctagcatcgatgtgaatgggggaaataggaaaaccatcttagaagacgaaaaacgattggcacacccattctccctggctgtattcgaagacaaggtcttctggaccgatatcatcaatgaggcaatattctctgctaatcggctgaccggatctgatgtgaacctgctggccgaaaacttgctgagccccgaggacatggttctatttcacaatctaactcaacctcggggcgtgaattggtgcgaacgaaccacccttagcaacggcgggtgtcagtacttatgtctgccagccccacagatcaacccccatagtccaaagtttacctgcgcctgtccagacggtatgttattagcccgggatatgcggtcctgtctcacagaagcagaagccgccgtggctactcaggagaccagcactgtgcgcctaaaagtttcatctactgccgtgcgtacacagcataccacaactcgccccgtcccagatacaagccgactgccaggagccaccccagggttgaccaccgttgagatcgtgaccatgtctcaccaggctctgggagacgtggccggaaggggcaacgaaaagaaaccttccagtgtgcgcgccttgagcatagttttacctattgtgctgctggttttcctgtgtctgggcgtgttcttgttgtggaagaattggagactgaaaaacatcaacagtataaactttgacaaccctgtttatcaaaaaacaacagaagacgaggtccacatctgccataatcaggatggctattcctacccttctcgacagatggtctctctggaggacgacgtggca

SEQ ID NO: 11239 - DNA, 2580 bp, Artificial Sequence
  derived and/or modified sequence
atgggaccatggggatggaaactgagatggaccgtggcgctgctgctggctgcggctgggaccgccgtgggagatcgatgtgaacgcaacgagtttcaatgtcaggacggcaagtgtatctcctataagtgggtgtgtgatgggagcgcagagtgccaggatggctccgacgaatcccaagaaacctgtctttccgtcacctgcaagagcggagacttcagctgcgggggacgcgtgaaccgatgcatccctcagttttggcgctgcgacggtcaggtcgactgcgataacggttccgacgagcagggttgcccaccaaagacgtgctcacaggacgaatttaggtgtcatgatggcaaatgcatcagccgccaatttgtgtgcgacagcgatcgcgactgcctcgatgggtcggatgaagcctcctgtccagtgctgacttgcggacctgcgagctttcagtgcaactcctccacttgcattccccaactttgggcctgtgacaacgatccggattgcgaagatggctcggacgaatggccacagcgatgccgaggactttacgtctttcagggagactccagcccgtgttccgcgttcgagtttcattgcctctcgggcgaatgcatccattcctcctggcgttgcgatggtggaccggattgcaaggacaagagcgatgaggagaactgcgctgtcgccacttgcagaccggatgaattccagtgctcagacggtaactgcattcatggctcacgccaatgcgatcgcgagtacgactgcaaggacatgagtgatgaggtcggatgtgtcaacgtcaccctgtgcgaaggcccgaacaagttcaagtgccattcgggggaatgcatcaccctcgataaggtgtgcaacatggcacgcgactgccgggattggtcggatgagccaatcaaggagtgcggaacggccgaatgcctggataacaacgggggttgctcccacgtgtgtaacgacctcaagatcggatacgaatgcctgtgccccgatggcttccaactcgtggcccagagacggtgtgaggacatcgacgagtgccaggacccggacacttgctcacaactgtgtgtcaaccttgagggtggatacaagtgccagtgcgaagagggcttccagctcgacccacacactaaagcatgcaaggcagtgggttcgatcgcgtatcttttcttcacgaatagacacgaggtgcggaagatgacccttgaccggtcagaatacactagcttgatcccaaatctcagaaacgtggtggccctcgacaccgaagtggccagcaatcgcatctactggtcggacttgtcacaacggatgatctgttccactcaactggatagagcccacggggtgtcatcgtacgacaccgtgatctccagagatatccaggccccggacggtctggcggtggattggatccattcaaacatctactggactgactccgtgctcggaaccgtcagcgtcgccgatactaaaggagtgaaaaggaaaactctgttccgggaaaacgggagcaaaccacgggcaatcgtggttgatcccgtgcacggcttcatgtactggacggactggggaactccagccaagataaagaaagggggactgaacggagtggacatatactctctggtgaccgagaacatccagtggccgaatggaatcaccctggatctgctgagcggtcgcctgtactgggtggactctaagttgcactcgatctccagcatcgatgttaatggaggaaatcggaaaaccatcctggaagatgaaaagagattggcccatccgttcagcctggcagtgttcgaagataaagtgttctggacggacatcattaatgaggcgattttctcagccaacagactgaccggaagcgatgtcaacctcttggccgagaatctcttgtcgcctgaagatatggtcctgtttcacaatctgacccagccacggggagtgaactggtgcgaaagaactactctgtctaacggaggctgccagtacctgtgccttccggccccgcaaatcaatcctcactccccaaaattcacctgcgcgtgtccagatgggatgctccttgcgcgggatatgcggtcatgtctcactgaggccgaagctgccgtggctactcaagagacttcaactgttcggctgaaagtctcgtccactgcagtgaggactcagcacacgacgacgcgcccggtgcctgatactagccgactccctggagccacccccggactcactactgtggaaatcgtgactatgtcccaccaggcactcggagacgtggccggccgggggaatgagaaaaagccaagcagcgtccgcgccctgtcgattgtgcttcccatcgtcctcctggtctttctctgtctcggagtattcctgctgtggaagaactggagactgaagaacatcaacagcatcaatttcgacaatcctgtctaccaaaagactaccgaggatgaagtgcatatctgccataatcaggatggatatagctacccttcacggcagatggtgtctttggaggatgacgtggca

SEQ ID NO: 11240 - DNA, 2580 bp, Artificial Sequence
  derived and/or modified sequence
atggggccgtgggggtggaagttgcggtggaccgtagccctgctgctggcagcagcaggcactgccgtgggcgacagatgcgagcggaatgaatttcagtgccaggatggcaagtgcatcagttacaagtgggtgtgcgatggtagtgccgaatgccaggatgggtcggacgaatctcaggaaacttgcctctctgtgacatgcaaatcaggagatttcagctgcggcggccgtgtcaatcgttgcatccctcaattctggcgttgcgacggacaggtcgattgcgacaacgggtccgacgaacaggggtgccccccaaagacctgctcgcaggatgagtttcgctgccacgacggcaaatgtatctcaagacagttcgtttgcgatagcgatcgggattgtctggacgggtccgacgaggcttcctgtcctgtcctcacgtgcggccccgcgtctttccagtgcaattccagcacatgcatcccacagctctgggcttgcgacaacgatcccgactgcgaggacgggagcgacgaatggccccagaggtgtaggggtttatacgtgttccagggagattctagtccctgcagcgctttcgagtttcactgtttgagcggagaatgtatccatagctcctggaggtgcgatgggggtcccgactgcaaagacaagtccgacgaggagaactgcgcagtcgcgacttgtaggcccgacgaatttcagtgctcagacgggaactgcattcacggaagcaggcagtgcgatcgcgagtatgattgtaaggacatgtctgatgaggtcgggtgtgtaaatgtcaccctgtgcgaaggtccaaataagttcaagtgtcacagtggggaatgcatcacactggataaggtctgcaatatggctagggactgtcgagactggagcgacgaacctattaaagagtgcggaaccgccgaatgtctggacaataatggagggtgttctcacgtgtgcaacgatctaaagataggctacgaatgcctgtgccctgatggattccaactcgttgcccagcggcgctgcgaagatattgacgagtgccaggatccagatacctgttcccagctgtgcgtcaacttagaggggggttacaaatgtcagtgcgaagagggctttcagctcgatcctcataccaaggcctgcaaagcagtgggctcaattgcttacctcttctttacaaaccggcatgaggtgagaaagatgactcttgataggtctgaatacacctccctgattccgaacttgcgaaacgttgtcgcgctggatactgaggtcgccagtaataggatatattggtcagacctgagtcagaggatgatctgtagcactcagctggaccgggcccatggggttagctcatacgataccgttatctccagagatatccaggcgcccgacggattggcggtcgattggatacactccaatatctactggaccgactcagtgctgggtaccgtctctgtggcggatactaagggtgttaagaggaagaccctctttcgagagaatggatctaaaccaagagcaatagttgttgaccctgtgcatggatttatgtattggactgattggggaacgcccgcaaaaatcaaaaaaggaggattgaacggtgtagacatctatagtctagttacggagaacatccagtggcccaatggaattaccctcgacctcctgtcaggacgcctctattgggtggactccaaactgcatagcattagcagtatcgatgtcaacggagggaacagaaagacaatcttggaggatgagaagaggcttgcccatccattttccttagccgtgtttgaggacaaagtcttttggaccgacattatcaacgaggctatatttagcgcgaataggctcactgggtctgatgttaacctgttggcagagaacttgctaagtcccgaagatatggtcctattccacaatttaacccagccaagaggcgtcaactggtgtgagaggactaccctgtcaaacggagggtgtcagtacctgtgcctgcctgctccccagatcaatccccacagccccaagttcacctgtgcatgccctgacgggatgctcctggcgcgcgacatgcgctcctgtctgaccgaagcagaagcggccgtggcaacccaggaaacaagtactgtcaggcttaaagtctccagcaccgccgtgcgcacgcagcacaccaccacaaggcctgttcccgacacctcccggcttcctggggctacccctggtctgaccacagtcgagatagtgactatgtctcaccaggcactgggcgatgtggctggcagaggcaatgagaagaagccttcctcggtacgagccctatctatagtcctgccaatcgtcctgctcgtgttcctgtgccttggtgtgttcctgctgtggaagaactggcgattaaagaatataaacagcattaactttgataacccagtctaccagaaaacaaccgaggatgaggtgcacatttgtcacaaccaggacgggtactcttaccctagtaggcagatggtgtccctggaagatgacgtcgct

SEQ ID NO: 11241 - DNA, 2580 bp, Artificial Sequence
  derived and/or modified sequence
atgggaccttggggatggaaattaaggtggactgttgcgttacttttggcggccgcgggaaccgcggtcggcgaccgctgtgagcgaaatgaatttcaatgccaggatggaaagtgcataagctacaaatgggtttgtgatggatcagcagaatgtcaggatggaagcgacgaatcgcaggagacttgtttgtcagtgacttgcaaaagtggagactttagctgcggaggaagagttaatcgctgtattcctcagttctggaggtgtgatggccaggtggactgcgataacgggtctgatgagcaaggatgcccaccgaaaacgtgttcacaggatgaatttagatgtcatgatggaaagtgcatctctcgccaatttgtctgtgactcggaccgcgattgcctggacggctccgatgaggcaagctgcccggtcctcacgtgtgggcctgcctccttccaatgcaattcatcgacctgcatacctcagttgtgggcctgcgataatgatccagattgtgaggacgggtctgacgagtggcctcagcgttgccgagggctttatgtgttccagggggattcatcaccgtgttcagcgtttgaatttcattgcttatcgggagagtgtatccattcatcatggcgctgcgatggcggaccggattgtaaagataaatcagatgaggagaactgcgcagtcgctacttgcagaccggacgagtttcagtgcagcgacggcaattgtatccacggctcccggcagtgcgacagagaatacgattgtaaagatatgagcgatgaggttggatgcgtcaacgtcacattatgtgagggtcccaacaaatttaaatgccacagtggggagtgcattacacttgataaggtctgcaacatggcgagagactgtcgcgattggagcgatgaaccaattaaagaatgtggtacggcggagtgcctcgacaataatggaggttgttctcatgtatgcaacgatttgaaaatcggttatgaatgtttatgtccggatggctttcaactggtggctcaaagaagatgtgaggatatcgatgaatgccaggatccggatacctgctcgcaattatgtgtcaaccttgaaggggggtataaatgccagtgtgaggagggatttcagcttgatcctcacacgaaggcttgcaaagcagtcggatcaatcgcttaccttttctttacgaatcgccacgaagtacggaaaatgaccttagatcgttctgaatatacgtctcttattccgaatctaagaaatgtggtcgcgctcgatactgaggttgctagtaaccggatatactggtcagatctgtcacagcggatgatctgcagcactcagcttgaccgggcccatggggtttctagctacgatacagtcatcagccgcgatattcaagctccggatggcctcgctgtagattggatccactcgaatatttattggacagattcggtcctgggaacagtctcggtagcagatacaaaaggtgtgaaacgcaagactttgtttcgtgaaaacggctcaaagccacgcgccatcgtggtagatccggtacacggcttcatgtattggacagattggggaacaccggcaaagattaaaaagggtggattgaacggggtggatatttattcccttgtcacggaaaacattcaatggcctaatggaatcacactcgatttacttagtggtcggctttactgggtggattcaaagttgcacagcattagctcaattgacgttaatggcgggaatcggaaaacaatcctagaagacgaaaaaagacttgcgcacccgttttctcttgcggtgtttgaggataaggtattctggacagatatcatcaatgaagctattttctctgccaatcgcttgacgggatccgacgtaaacttgctagcggaaaatttactttctccagaggatatggtactgttccataatctaacacaaccgagaggtgtcaactggtgtgagcggacaacactctcaaatgggggctgccagtatctgtgtttgccggccccgcagataaatcctcatagtccgaagttcacgtgcgcctgtccggatggcatgctcctcgccagagatatgcggagctgtttgacagaggcggaagctgcggttgcgacccaagaaacgagcacggtcagacttaaggtctcttcaacggccgttcggacacagcataccacaacccgcccggttccggatacaagtcgtttgcctggagctacgccggggttaacaactgtcgaaattgttactatgtcccatcaggcattgggcgatgtcgcagggcgagggaatgaaaaaaaaccgtcatctgtccgtgctttaagcattgtgctcccgatagtgttgctggtctttctttgcctcggcgtttttctactctggaagaattggcggcttaaaaacattaactctatcaactttgacaatcctgtgtatcagaagacaacggaagacgaagttcatatatgccataatcaagacggttattcctatccgagcagacaaatggtttctctagaagacgacgttgcc

SEQ ID NO: 11242 - DNA, 2580 bp, Artificial Sequence
  derived and/or modified sequence
atggggccctgggggtggaagctccgctggaccgtcgccctgctgctggcggcagccggcaccgctgtgggagatcgctgtgagcgcaatgagttccagtgtcaagatgggaagtgcatttcgtacaaatgggtttgtgacggtagcgcagaatgtcaggacggatccgatgaatcccaggagacatgcttgagcgtgacctgcaagtctggggatttctcttgtggggggcgagttaaccgatgcattcctcagttctggcggtgtgatgggcaggttgactgtgataatggaagtgatgaacagggttgcccacctaagacctgtagccaggacgagttcaggtgccacgacggtaaatgcatatccagacagttcgtctgcgattcagatagggactgtctcgatggtagtgatgaagcctcttgtcccgtgctgacttgcggccccgcatctttccagtgtaacagctcgacttgcatcccacagctgtgggcctgcgataatgatcctgattgtgaagacggcagcgatgaatggccccagcggtgtagggggctctacgtgttccagggcgacagctctccctgcagtgcgtttgagtttcattgtttgagcggggagtgcatccatagtagttggcgctgcgatggaggccccgactgtaaggataagtccgatgaagaaaattgtgcagtcgcaacttgcaggccagatgagtttcaatgctccgacggcaattgtatccacggaagtaggcaatgtgacagggagtatgactgtaaggacatgtcagatgaggtaggttgcgtgaacgttaccctttgtgaaggcccgaacaagtttaagtgtcacagtggcgaatgcataaccctggacaaggtgtgtaatatggcccgtgattgccgcgactggagtgacgaacccattaaagaatgcggcacagcagaatgtttagacaataatgggggatgctctcacgtatgcaacgacctgaaaatcggttatgaatgtctctgtcccgacgggtttcaactggtagctcagcggaggtgcgaggatattgacgagtgccaggaccccgacacatgctcccagttgtgcgtcaatttggaaggaggctataaatgtcagtgcgaggagggatttcagttggacccacacacaaaagcctgcaaggcggtaggcagtattgcatatctgttcttcaccaacagacatgaggttcgaaagatgactttagatcgatccgagtacaccagcctcatccccaacctccggaacgtagttgcactggataccgaggtggcgagtaaccgaatatactggtccgacctgagccagcggatgatatgtagtacccagttagatagggcccacggggtcagttcatatgacactgtaatcagtcgggacatacaggcccccgacgggctggcagtcgactggatacactctaatatctactggaccgattcggtcctgggaacagtatccgtggccgacactaaaggagttaaacgcaagacgctcttcagggagaacggtagcaaaccccgagctattgtggtggaccccgttcacgggttcatgtactggacagattggggaacccccgctaagattaagaaggggggcttgaatggggtcgatatatacagcctggtgactgagaacatccagtggcccaacggtatcactctcgacctgctgagtggccggctctattgggtggattccaaacttcactctattagctcgatcgacgttaatggaggaaatagaaaaaccattctagaggacgaaaagcgtctggcccacccttttagcctggccgtctttgaggataaggtcttctggacagatatcataaacgaagccattttctccgcaaatcgactgacgggaagcgacgtcaatctgttagccgagaatctcctctcccccgaagacatggtcttatttcacaatctgacccagccaaggggggtaaattggtgcgagaggaccaccctgtctaatggaggttgtcaatacctgtgcctgccagctcctcagataaacccacatagtcctaagtttacctgtgcgtgccctgacgggatgctgctggctagagatatgaggtcctgcctgaccgaggcagaggcagccgtggccacacaggagacctcaacggtgcgcctgaaggtctcttccacagctgtgcggactcagcacaccacaactcgcccggttcccgatacttcaaggttgcccggggcgaccccaggtctcaccaccgtggaaattgtcaccatgagccaccaggccctgggggatgtcgccggtcgaggtaacgaaaagaagccttcatctgttcgggctctctcaatagtcttgcccatagtgcttctcgtcttcctctgcttaggcgtattcctcctgtggaagaactggcgactgaaaaacattaacagcattaactttgacaatcccgtctatcagaagacaactgaagatgaggtgcacatctgtcacaatcaagacggttacagctatccttcgcggcaaatggtttcactagaagatgatgtggca

SEQ ID NO: 11243 - DNA, 2580 bp, Artificial Sequence
  derived and/or modified sequence
atgggaccgtggggctggaaacttagatggaccgtggcattgctcctcgcggccgccggcactgccgtgggagacagatgcgagcggaacgaattccagtgccaagacggcaaatgcatcagctataagtgggtgtgcgacggctcggccgaatgtcaggacggtagcgacgaatcgcaagaaacgtgcctgtcggtgacctgtaagtcaggcgacttctcatgcggcggacgggtgaatcgctgtattccccaattctggagatgcgacggacaggtcgattgtgacaacggatcagacgagcagggatgcccgccgaaaacgtgttcacaagacgaattccggtgccacgacgggaagtgtatctcacgccagtttgtctgcgattccgatcgggattgcctcgacggcagcgacgaggcttcgtgcccggtcctcacttgcggcccggcttcgttccagtgcaactccagcacctgcattccgcagctgtgggcctgcgacaacgatccagattgcgaggatggctctgacgagtggccacagagatgtcgtggactctacgtgttccagggggacagctcaccttgctcggcgtttgaattccattgcctctccggagaatgcatccacagttcctggcgctgtgacggcggcccagactgcaaagacaagtccgatgaagaaaactgtgccgtcgcgacctgccgacctgacgagttccaatgctcggacggtaactgtatccacggcagccggcagtgcgacagagagtacgattgcaaggacatgagcgatgaggtcggctgcgtaaacgtgactctttgcgaagggccgaataagttcaaatgccactccggggaatgcattactctcgacaaggtgtgtaatatggcccgcgattgccgggactggtcggatgagcctatcaaggaatgtggtaccgcggaatgcctggacaataatggaggttgtagtcatgtgtgcaacgacctgaagatcggatacgagtgtctctgtcccgacggatttcagctcgtggcgcaaagaagatgcgaagatatcgacgagtgccaagacccggacacctgctcccaactctgtgtgaacctcgaggggggatacaagtgccagtgcgaagaagggtttcagctggatccccacaccaaagcctgcaaggcggtgggctccatcgcgtacttgttcttcaccaatcgacacgaggtgaggaaaatgaccctggacaggagcgaatacacttcgctgattccgaacctgcgtaatgtggtcgccctcgatacggaggtcgcatcaaatcgcatttactggtccgatttgtcacagcggatgatctgttctacccaactcgaccgcgcccatggagtctcctcatacgacaccgttataagccgggacatccaggcaccagatggacttgctgttgattggatccactctaacatctactggaccgattcggtgctgggaactgtcagcgtggcggataccaagggcgtcaagagaaagacgctgttccgcgaaaatggatctaagccacgggccattgtggtggatccggtccatggattcatgtactggaccgactggggaacccccgccaagatcaagaagggagggctgaacggggtggatatctacagtctcgtgaccgagaacatccaatggccaaacggaatcaccctcgatctgctgtccggacgcctgtactgggtggactctaagctgcactctatctcatccatcgacgtgaatgggggtaatcgcaaaaccatcctcgaagatgagaaaagactggcgcacccgttctccttggccgtctttgaggacaaggtcttttggacggacatcataaacgaagcgatcttctctgcaaaccgcctgactggatcggatgtcaacctcctggccgagaatttgctgtccccagaagatatggtgctgttccataacctgacccagccgcgtggggtaaactggtgcgaacgcaccaccctgtccaacggcggatgccagtatctgtgcctgccagctccgcaaatcaacccacattcacccaaattcacgtgcgcttgccctgacggcatgctcttggcacgggacatgcgctcatgtctgactgaggctgaggcggccgtcgcgacgcaagaaactagcactgtgcgcttgaaggtgtcatcaaccgccgttcggactcagcatactaccactagacctgtgcctgatacttcgagactgccgggagccactccaggtttgactactgtggaaatcgtcaccatgtcgcatcaggctctgggtgatgtggccgggaggggaaacgaaaagaagccctcctcagtccgggcactctcaattgtgcttcctatagtgctgctggtctttctgtgccttggagtgttcctgctctggaagaattggcgattgaagaacatcaattccatcaatttcgacaatccagtgtaccagaaaactaccgaggatgaggtgcacatctgtcacaaccaggacgggtactcatacccgtcccggcagatggtgagcctggaagatgatgtggct

SEQ ID NO: 11244 - DNA, 2580 bp, Artificial Sequence
  derived and/or modified sequence
atggggccgtggggctggaaactgcggtggaccgtcgctctcttgcttgctgccgccggaaccgcggtcggcgacagatgcgaacggaacgagttccagtgccaagatggaaagtgcatctcttacaaatgggtctgtgatgggtcggccgaatgccaagacggatccgacgaaagccaagaaacctgtctgtcagtcacatgcaagtcaggtgatttttcttgtggcgggagggtgaatcgctgtatcccccagttctggcgatgcgatggacaggtggattgtgacaatggtagtgatgagcaggggtgcccgccgaagacgtgttcacaggacgagttccggtgtcatgatggcaagtgcatatcccggcagttcgtctgtgatagtgatcgagattgtctggacggttctgatgaggcaagttgccctgtcttgacttgcggacctgcgagttttcagtgtaactcgagcacgtgcattcctcaactttgggcatgcgacaacgatccggactgcgaggatggcagcgatgagtggccccagcggtgtcggggactctatgtgttccagggcgatagttcaccttgctccgcattcgagtttcactgtctgtcgggcgagtgcatccatagcagctggaggtgcgatggcgggcccgactgcaaggacaagtccgacgaagagaattgtgccgtggccacgtgtaggcccgacgagtttcagtgctctgatggaaattgcatccacggctccagacagtgcgatcgagagtatgattgtaaggatatgagtgacgaagtgggatgtgtgaacgtcacactttgtgaggggcctaataagttcaaatgccacagtggggagtgcatcactctggacaaggtatgcaatatggctagggactgtagggattggagtgacgagcccattaaggaatgtggcactgctgagtgcttagacaacaacggaggatgcagccatgtctgtaacgacttgaagatcgggtatgagtgcctctgtcctgatggattccaactggtggctcagcgcaggtgcgaggatatcgatgagtgtcaggaccccgacacctgttcacagctctgcgtgaatctcgagggaggctacaagtgccagtgtgaggagggcttccagttggacccacataccaaggcatgcaaagccgttggctctatcgcttacctcttctttaccaacaggcacgaggtccgaaagatgacattggatcgttccgaatacacctctttgattccgaaccttaggaatgtggtggccctggacaccgaggtcgctagcaacagaatctactggagcgatctctctcagaggatgatttgttccacccagttggaccgcgcacacggtgtatcaagctatgacaccgtgatcagccgcgacatccaagcacccgatggactagcagtggattggatccactcgaacatctactggactgactcggtgctagggacagtatctgtggcagatacaaagggtgtgaagagaaagactctgtttcgggagaatggcagcaagccgagagcaatcgtggtagatccagtacatgggttcatgtactggaccgactggggcactccagccaagatcaaaaagggcggactgaacggggtggacatttattccctggtgacggagaacattcagtggcccaacggaatcaccctggacttgctatccggtagactgtactgggttgacagcaaactgcatagcatctcatccatcgacgtcaacggcggaaataggaagacaatcctggaagatgagaaaagactcgctcatccgtttagcctagctgtttttgaggacaaagtgttctggaccgatattattaacgaagctattttctcagctaaccggctgaccgggtccgatgtgaatctgctagccgagaatctgttgagccccgaggacatggtcctgttccacaacctgactcaaccccgtggcgtgaattggtgcgaaaggacgacactgagcaatggtggatgccagtacctctgcctgccggcccctcagatcaacccccatagcccaaagttcacgtgtgcctgtccagatggaatgctgctggccagggacatgcgttcgtgcctcaccgaagcagaagccgcagtagctacccaggaaacctctaccgtgaggttaaaagtgtcctctaccgcagttcgcacccagcacacaaccacgcggccggtgcccgatacttctcgactcccaggggctactcccggcctgactactgtggagattgtcaccatgtcgcaccaggctttaggggacgtcgcagggagagggaatgagaaaaaaccttcctcagtgcgagccctctccatcgttctgccgattgtcctgctggtctttctgtgtctcggagtgttcctgctgtggaaaaattggcggctcaagaacatcaactccattaacttcgacaacccagtctatcagaaaaccaccgaggacgaggttcacatctgccataatcaagacgggtactcatatccaagccgccagatggtgtctctggaagacgacgtagct

SEQ ID NO: 11245 - DNA, 2580 bp, Artificial Sequence
  derived and/or modified sequence
atgggcccatgggggtggaagttgcgatggaccgtggcactcttgctggccgcagccggtactgcggtcggagacaggtgcgagcgtaatgaattccaatgtcaagatggaaagtgcatttcttacaaatgggtgtgcgatggatcagcggagtgccaggacggttcagatgaatcacaggaaacttgcctgtcggtcacttgcaaatccggggactttagctgcggaggacgcgtcaatagatgtatcccacaattctggcgctgtgacggacaagtggattgcgataacggctccgacgagcaggggtgcccgcctaagacctgctcccaagatgagttcaggtgccatgatggaaaatgcatttcccggcagttcgtatgcgattcagacagagactgcttggatggatccgacgaggcctcctgccctgtactcacttgtggtccagcgtcctttcagtgtaatagcagcacctgcatcccgcagctgtgggcctgcgataatgatcccgactgtgaagatgggagcgacgagtggccccaacgctgcagaggactgtacgtgtttcagggtgatagctccccgtgctctgccttcgaattccactgcctctccggtgagtgtattcattcaagctggaggtgcgacggcggcccggactgcaaggacaagtccgacgaagagaattgcgcggtcgcaacttgcagaccggacgaatttcagtgttcggacggaaattgcatccacgggagccggcagtgcgaccgggaatacgattgtaaggacatgtccgatgaggtcggatgcgtgaacgtgacgctgtgcgaaggaccaaataagttcaagtgccactcgggagaatgcatcactcttgataaggtgtgcaacatggcccgcgattgtagagattggagcgacgaaccaatcaaagaatgtggtacggcggaatgcctcgacaacaacggaggttgctcgcacgtctgtaacgacctcaagatcggatatgagtgtctgtgcccggatggctttcagctcgtggctcaacgccggtgcgaagatattgatgaatgtcaagacccggacacctgctcacagctgtgtgtcaatctcgagggaggctacaaatgccaatgcgaagagggattccaactcgatccgcacactaaggcctgcaaagccgtgggttcaatagcctacctgttcttcacgaaccgacatgaagtgcggaaaatgaccctggatcggtccgaatatacctcgctgatccctaacctccggaacgttgtggccctcgataccgaggttgcctcgaaccggatctactggtccgacctgagccaacggatgatctgctcgactcaattggacagagcccatggagtgtccagctatgacacggtgatctccagggacatccaagcccctgacggactggctgtcgactggatccattcgaacatctactggactgattccgtcctcggaactgtgtccgtggcggacaccaaaggagtgaagaggaaaactctgtttcgcgagaacgggtcaaaacccagagccatcgtggtggatcccgtgcacggtttcatgtactggactgactggggaacgccggccaagattaagaagggcgggctcaacggagtggacatctacagcctcgtgaccgagaacatccagtggccgaatggaatcacgttggacctgctcagcggacggttgtactgggtggattcaaagttgcactctattagctcaatcgatgttaacggcggaaatcgcaagaccatcctggaagatgagaaacggctcgcccaccctttctcgctcgcagtgttcgaggacaaggtgttctggaccgacatcatcaatgaagctattttctcagctaaccggttgaccggcagcgacgtcaacctgctggcagaaaacctgctgtcgccggaggacatggtgctgttccataacctgacccaacctcggggagtcaactggtgtgaacgcacgaccctttccaatggaggatgtcagtacctgtgcctccctgcaccacagatcaacccacactcgcctaagttcacgtgcgcgtgtcccgacggcatgctgctggcgcgtgatatgaggtcctgtctgaccgaagccgaggccgcagtggctactcaggagacgtcaaccgtcaggctcaaggtatcctcaaccgctgtgcgcacccaacacaccactacccgcccagtgccggacacctcacggctgcccggtgcgactccggggttgaccaccgtcgaaatcgtgacgatgagccaccaagccctgggagacgtcgccggacgcggcaatgaaaagaagccatcatcagtcagagcactgtctatcgttctgccgatagtgctcctggtgtttctctgcttgggagtctttctgctttggaaaaactggaggctgaagaacatcaatagcatcaacttcgacaatccagtttaccagaaaaccaccgaggatgaagtgcacatttgccacaatcaggatggctactcctacccttcgaggcagatggtgtcgcttgaagatgacgtggcg

SEQ ID NO: 11246 - DNA, 2580 bp, Artificial Sequence
  derived and/or modified sequence
atgggcccctggggttggaaattgcgctggacggtggcactgctccttgccgcagcaggcaccgccgtgggagatcggtgcgaacggaacgagtttcaatgtcaggacggcaagtgtatttcgtacaagtgggtgtgtgacggcagtgccgagtgccaagatggatcggatgagtcccaagaaacttgcttgtcggtgacttgcaagagcggagatttttcttgtggcggcagggtcaacaggtgcatccctcagttttggcgatgtgacggacaggtggactgcgataacggtagcgacgagcaaggatgtccgcctaagacttgctcgcaggatgaattccgttgccacgatggaaagtgcatttcccggcagttcgtgtgtgattctgacagggattgtttggatgggagcgatgaagcatcgtgtcccgtgctcacgtgtggtccagcatctttccaatgcaattcatcaacgtgtatcccccaactttgggcatgtgacaatgaccctgattgtgaggacggtagcgatgagtggccacaaaggtgtcgcggtctgtacgtctttcagggagactccagcccatgttccgcctttgagttccattgcctgtcgggtgaatgtatccactcctcctggcggtgtgatggagggcctgattgtaaagacaaaagcgacgaagagaactgtgccgtcgcgacctgtcgacctgatgaatttcaatgttcggatggtaactgtatacatggtagccgacagtgcgatagagaatacgattgtaaggatatgtcagatgaagtgggctgtgtgaacgtcaccctgtgcgaagggccaaataagttcaagtgtcattcgggagagtgtattacccttgataaggtgtgcaacatggcccgtgactgcagagattggtcagatgagcccatcaaggaatgtggaacggcagagtgtctggacaacaacgggggatgttctcacgtgtgtaatgacctcaagattggatacgaatgcctttgtccggacggattccagctcgtggcccaacggagatgtgaggatatcgatgaatgccaggacccggatacctgtagtcaactgtgcgtgaaccttgagggcggatacaaatgtcaatgtgaggaggggtttcagctcgatccccacacgaaggcatgtaaggcagtcggctcaatcgcatacctgtttttcactaaccggcatgaggtccggaaaatgactctggaccgctcagaatacacttcactgatcccaaacctcagaaacgtggtcgcacttgataccgaagtggcatcaaacagaatctattggtccgacctgagccagcggatgatttgctcaacccaacttgacagagcacatggagtgtcatcatacgacactgtcatctcccgcgatatccaggcacccgatggcctggccgtggactggatccactccaacatttactggactgactccgtcctgggaaccgtgtcggtggcagatactaaaggagtgaagcgtaagaccctgtttcgagagaatggatctaagcctagagcaatcgtcgtggatcctgtccacgggtttatgtactggacggattggggaaccccagcaaagatcaaaaaaggagggcttaacggcgtggatatctactcccttgtcactgaaaacatacaatggcccaacggtatcactctcgatcttctgagcggccgtctgtactgggttgattccaaacttcatagcatttcgtcaatcgatgtgaatggaggcaaccgaaagactattctggaagatgaaaagcgtcttgcacatccttttagcctcgcggtattcgaggacaaggtcttttggacggatatcattaacgaggcaatcttttcggctaacaggctgactggatcagatgtcaatcttcttgcagaaaaccttctgtcgcctgaagatatggtccttttccataacctgacccagccaaggggagtgaattggtgtgagaggactaccttgagcaatggaggatgtcaatacctctgtctgccagcgccacagataaatccacattccccaaaattcacttgcgcgtgccctgacggaatgcttctggcgcgcgacatgaggtcgtgtcttacggaagcggaagcagcagtggcaacccaggaaacctccaccgtgcgactcaaggtgtcaagcaccgcagtccggacccagcatactaccaccaggcctgtgccagacacttcaagattgccaggggccactcctggcctcactaccgtcgaaattgtcaccatgtcccatcaggcgctgggtgatgtcgcaggtaggggaaacgagaagaaaccctcgtcggtccgtgcactctcgatcgtgcttcctatcgtgctgcttgtctttctctgcctcggagtgtttcttctgtggaagaattggcggctgaagaacatcaacagcattaactttgataaccctgtgtaccaaaagactaccgaggatgaagttcatatttgtcataaccaggacggttactcctacccgtcgcgtcagatggtgagcctcgaagatgatgtggcg

SEQ ID NO: 11247 - DNA, 2580 bp, Artificial Sequence
  derived and/or modified sequence
atgggcccctggggttggaaacttcggtggaccgtcgccctcctgcttgcggcagcggggactgcagtgggagatcgatgcgagcgcaatgagttccagtgtcaagatggcaagtgcatttcgtacaagtgggtgtgtgacggttcagcagagtgccaggatggtagcgatgaatcccaggaaacttgtctttcggtaacctgtaagtcgggagatttctcatgtggtggaagagttaatagatgcattcctcagttttggcgatgtgatgggcaggtggactgtgacaacgggtcggacgagcaaggatgtccgcccaaaacttgttcacaggacgaatttcggtgccatgatggaaaatgtataagccgccaattcgtgtgtgattccgatcgtgattgtctcgatggcagcgatgaagcctcctgtcccgtgctgacctgtggcccagcctccttccagtgcaactccagcacctgtattccacagttgtgggcttgtgacaatgatccagattgcgaggacggttcagatgaatggccgcaacggtgccgcggtctttacgtgtttcagggtgattcatccccctgttctgcgtttgaatttcattgcctttcgggagagtgtattcactcgtcgtggagatgcgacggagggcctgactgtaaggataagtctgatgaagaaaactgtgcggtcgctacctgcagacctgatgaatttcaatgcagcgatggaaattgcatccatggttcgcgccagtgcgacagagaatatgactgcaaggatatgtcggatgaagtgggatgtgtgaatgtcaccctgtgcgaaggtccaaataagtttaagtgtcactcaggagaatgcatcactctggacaaggtatgtaacatggcgagggattgccgcgactggtcggatgagccaattaaggaatgtggcaccgcagaatgtctggacaacaacgggggttgttcgcacgtgtgcaatgacttgaagattggatacgaatgtctctgccctgatggcttccaactggtggcccaacgtcgttgtgaagatatcgacgaatgtcaggaccctgacacttgctcgcagctctgtgttaaccttgagggaggatacaaatgtcagtgtgaagagggcttccagctggatcctcataccaaagcatgtaaagctgttggttccatcgcctacttgttcttcaccaacagacacgaggtccgtaagatgactcttgatcgaagcgaatacacttccctgatcccaaaccttcgcaacgtggtcgccctggacaccgaggtcgcatcaaataggatttactggtcagatctctcgcaacgtatgatctgttccactcaactggatcgcgcacatggagtgagctcgtacgatactgtgatttcacgtgacatccaagcgccagatgggctggcagtggattggatccattcgaacatttactggacggattcagtgcttgggactgtgtctgtcgcagacaccaaaggagtgaagagaaaaaccttgtttcgcgaaaacggtagcaaaccgagagccattgtggtggaccccgtgcacggatttatgtactggaccgactggggtacccccgcaaagatcaagaagggaggactcaacggagtggatatctattcactggtgactgagaacatacagtggcctaatggtattaccctggatctgctgtcaggtagactctattgggtggactccaagctccactcgatatcctcgatcgacgttaacggtggaaaccgcaagacgattctggaagatgaaaagagacttgcccatccattttcgcttgccgtgtttgaggacaaggtcttttggactgatatcattaacgaggcaatattctcagcaaatagactcactggatcggatgttaacctgctggcggaaaacctgttgtccccagaggacatggtgctgtttcataacctgactcagccgcgaggagtgaattggtgtgagagaaccaccctgagcaacggaggttgtcagtatctttgtctgccagcccctcagatcaacccacattccccaaagttcacctgcgcatgccctgacggcatgcttcttgctcgcgacatgaggtcatgtcttaccgaagccgaggcagcagtggcaactcaggaaacttccacggtcagacttaaggtgtcgagcacggcagtgagaacccaacacaccacgaccaggcctgtgcctgacacctcgaggttgccaggcgcaacccccgggctgaccactgtggagattgtgaccatgagccaccaggcgctgggggatgtggcaggtagagggaatgaaaagaaaccgagcagcgtacgcgcattgtcgatagtcctgcctattgtgctcctggtctttctgtgcctcggcgtgttcctgctctggaagaattggagactcaaaaacataaactctatcaattttgataatcccgtgtaccagaaaaccaccgaggacgaagtccacatttgtcataaccaagatgggtactcatacccatcgcgccaaatggtgtcgcttgaagatgacgtggcg

SEQ ID NO: 11248 - DNA, 2580 bp, Artificial Sequence
  derived and/or modified sequence
atgggaccctggggctggaaacttagatggacggtggcccttttgcttgcagccgcggggacggcagtgggggatcggtgcgaacgaaacgaatttcagtgtcaagatgggaagtgcatttcgtacaagtgggtgtgcgatggttcggcagaatgtcaagacgggtcggatgaaagccaagaaacctgtctcagcgtgacttgtaagagcggcgatttcagctgtgggggaagagtcaatagatgcattccccagttctggcggtgtgatggtcaagtggattgtgataacggctccgacgagcagggttgcccacctaagacttgttcccaagatgagtttcgatgccatgacggtaaatgtatatcgaggcagtttgtgtgtgattcggatcgtgactgcctggatggatcagacgaagcatcatgtcctgtcctcacttgcggtcctgcatcatttcaatgcaacagcagcacctgtatcccacaactgtgggcatgcgataatgatcctgattgcgaggatggctccgatgaatggccacaacgttgccggggactttatgtgtttcagggagattcaagcccatgcagcgcctttgagtttcactgcctgtcaggagaatgtatccattcctcatggaggtgcgacggaggtcctgactgtaaggacaaatcggatgaagagaactgtgccgtcgcaacctgtcgtcctgatgagtttcagtgttccgatgggaattgtattcatggcagcagacaatgtgatcgggaatacgactgtaaggatatgtccgatgaggtcggttgcgtgaatgttaccctctgtgaggggcctaataagttcaagtgtcattcgggagaatgtattaccctggataaggtctgtaacatggcaagagattgccgcgattggtccgacgaacctatcaaggaatgtggcaccgcagagtgtctcgacaataatggcgggtgtagccacgtgtgcaatgatctcaaaattggctacgagtgcttgtgccctgatggatttcaacttgtggcgcagcgcagatgcgaggatatcgatgaatgccaggatcctgatacgtgctcacagctgtgtgtcaacctcgagggtggttacaagtgccagtgcgaggagggttttcaactggacccacatactaaggcatgtaaggcagtgggttctatcgcgtaccttttcttcaccaatagacatgaagtcagaaaaatgacccttgatcgatcagaatacaccagccttatccccaacctgcgtaatgtggtggcgttggacaccgaagtcgcgtcgaatcgaatttactggtccgaccttagccagcgcatgatttgttccactcagctcgatcgggctcatggcgtctcgtcatacgataccgtgatttcacgtgatattcaagcacctgatgggctcgcggtggactggatacactcaaacatttactggaccgactcggtcttgggcactgtgagcgtggccgacaccaaaggtgtcaaacgcaagactctgtttcgagaaaacggatcaaagccaagagcaattgtggtcgatccagtgcatggcttcatgtactggacggattggggtactccggccaagattaagaagggtggattgaatggagtggacatatactcgctcgttactgagaacatacagtggcctaacggtatcaccctcgaccttcttagcggacggctgtattgggtggatagcaaactgcactcgatctcatcgatcgacgtcaacggaggaaacagaaagactattcttgaggacgaaaaacgactcgctcatccgttttcacttgccgtgttcgaggataaggtgttttggacggacatcatcaatgaggccatcttttctgccaatcgcctcaccggatccgacgtgaaccttctggcagaaaatctgctctctccagaggacatggtcctctttcacaacctgacccaaccacgcggcgtgaactggtgtgaacggactactctctcgaacggtggatgtcaatacctgtgtctgcctgcgccacagattaaccctcattcgccgaagttcacttgtgcatgccctgatggtatgttgcttgcacgggatatgcgatcctgcctcaccgaagcagaagcagcagtggcaactcaagagacttcgaccgtgcgactcaaggtgtccagcactgctgttcggactcaacacaccaccaccagaccagtgccggatacgtcgcggttgccaggagcgactcccggactcactactgtggaaattgtcacgatgagccaccaggcactcggagatgtggcagggcgcgggaacgagaagaaaccaagctcagtgagggcactgtcaatagtgcttccaattgtgctgcttgtttttctctgtctgggcgtgttcctgctgtggaagaactggagattgaagaacattaactcgatcaatttcgataaccccgtgtaccaaaagaccacggaggatgaagtgcatatttgtcacaaccaagacgggtactcctacccttcccggcagatggtgagccttgaagatgacgtggca

SEQ ID NO: 11249 - DNA, 2580 bp, Artificial Sequence
  derived and/or modified sequence
atgggaccttggggctggaagctccggtggaccgtggcactgttgttggccgctgccggtacggcagttggcgataggtgcgaaagaaacgaatttcagtgccaggatggtaaatgtatcagttacaagtgggtgtgtgatggcagcgcagagtgccaagacggaagcgatgagtctcaggaaacctgtctgtcagtcacgtgtaaatcgggcgatttttcatgcgggggccgagtgaacaggtgtataccccaattttggaggtgcgacggccaagtggactgcgacaacggatcggacgaacaggggtgcccccccaaaacttgttcccaagatgagtttaggtgccatgatggcaaatgcatctctaggcaatttgtgtgtgactcagatcgggattgccttgacggcagcgatgaagctagctgtcccgtacttacttgcgggcctgcatcttttcagtgcaactcctccacttgcattccacagctgtgggcttgtgataatgacccggattgtgaggacggaagtgacgagtggccacagagatgtagaggcttgtatgttttccagggagacagtagcccgtgtagcgcttttgaattccactgcctctccggagaatgtatccatagttcctggaggtgcgatggtggtcctgattgcaaagataaaagcgacgaagagaactgcgctgtcgctacttgccggcctgatgaatttcagtgtagcgatgggaattgcatccatggcagcagacagtgcgacagagagtatgattgtaaagatatgagcgatgaggttggttgcgtgaatgtcacactctgcgaaggccccaataagttcaaatgccactccggcgagtgcattactttggataaggtttgcaacatggctcgcgattgccgggattggtccgacgaaccaatcaaagaatgtggcactgctgagtgcctggataacaacggagggtgcagccacgtctgcaacgatctgaaaattgggtacgagtgcctgtgccccgatggattccaattggtggctcaacgcaggtgtgaggatatcgacgagtgccaagacccagacacctgtagccagctttgtgtgaatctcgaggggggatataaatgccagtgtgaagagggctttcagctagatccacacactaaagcctgtaaagcagtgggatctattgcctacttgttctttactaacagacacgaggtgcgcaaaatgactctggatcgctctgagtacacatctctgatccctaatctgagaaacgtcgtggcactggataccgaagtggcgagcaacagaatctactggagtgacctcagccaacggatgatctgctctacccaattggaccgggctcatggtgtctctagttacgacaccgtcatcagtcgtgacatacaagctccggacggtctggcagtggattggatccacagtaacatctactggacagactcagtgttgggaacagtgagtgtagccgacactaaaggtgttaagcgaaagacgttgtttagggagaacggttccaagccgcgagctatcgtggtggatccagtgcacggcttcatgtactggacagattggggaactccagcaaagattaagaaaggtgggcttaacggggtggatatctactctcttgtcacagagaatatccaatggccaaacggcatcaccttagaccttctgtctggccggctctactgggttgactctaaactgcacagtatctcatctattgatgtgaatggaggaaacaggaaaacaattctggaagacgagaagaggctcgcccaccccttttcactagccgtgtttgaggataaggtcttttggaccgatatcatcaacgaggctatcttcagtgccaatcgactaacaggtagtgatgtgaacttgctggccgagaacctgctgagtcctgaggacatggtcctttttcacaacctcacacagccgaggggggtcaattggtgtgaaaggaccacactttcgaacggcggctgccagtatttatgtctgcctgccccacaaatcaacccacattcacccaaatttacctgtgcctgcccagacggtatgcttctggctagggatatgagatcatgcctgacagaggcagaggcggctgtggccacccaagagacatccacagtgcgcctcaaagtctctagcaccgctgtgagaacacagcacacaacaacacggccggttccggatactagtagactcccaggggctacaccaggactgactaccgtggagatcgtgaccatgtcccatcaagccttgggggatgtggccggcaggggtaatgagaaaaaaccatccagcgtgcgtgctctttctatcgtactgccgattgtccttttggtctttctgtgtctgggagtgtttctcctgtggaagaattggcgcctgaagaacattaattcaatcaacttcgacaaccccgtgtaccagaaaactacagaagacgaagtccacatttgccataaccaggacgggtactcttaccctagcaggcagatggttagcctcgaggacgacgtggca

SEQ ID NO: 11250 - DNA, 2580 bp, Artificial Sequence
  derived and/or modified sequence
atgggcccgtggggttggaagctgcggtggacggtggctctcctgctcgcggctgcaggaaccgcggtgggtgatcgctgtgaaaggaatgaattccaatgccaagatggaaagtgcatctcttacaaatgggtctgcgacggaagcgccgagtgccaggatggttcggatgagtcccaggaaacttgtttgtcggtgacctgcaaatcgggcgacttctcgtgtgggggaagggtgaacagatgcatcccccaattctggcgctgtgatgggcaagtggattgcgataatggatcggatgaacagggctgtccgcctaagacctgctcacaggatgaatttcgctgccacgacggcaagtgcatctcacgccagttcgtgtgcgattcggatagagactgcctcgacggttccgacgaggcttcctgcccggtgctcacttgtggccctgccagcttccagtgcaattcatccacctgcatcccacaactgtgggcgtgcgacaacgacccagactgcgaagatgggtctgatgagtggcctcagcggtgcagaggactgtacgtgttccagggagactccagcccttgctccgcgttcgagttccattgcctgtctggtgagtgtatccatagctcatggcgctgcgacggaggaccggactgcaaagacaagtccgatgaagaaaattgcgccgtggctacgtgtaggccagacgaatttcaatgttcggacggaaactgcattcacggctcaagacagtgtgaccgcgagtacgattgtaaggatatgagcgatgaggtaggatgtgtgaatgtgaccctgtgcgagggaccaaacaaattcaagtgccactccggcgagtgtatcactctggacaaggtgtgcaacatggcgcgcgattgtcgcgactggtcggatgagccaatcaaggaatgcggaaccgccgagtgcctggataacaacggaggatgttcccatgtgtgcaatgacctcaagatcggatacgaatgcctgtgcccggatggctttcagctggttgcgcagcggcgctgcgaggacatcgacgaatgccaggacccggatacctgttcgcaactctgcgtgaacttggaaggtggatacaagtgccagtgcgaagaaggattccaactggatccgcacaccaaagcatgcaaggcggtggggtcaatcgcctatttgttctttacgaatcggcacgaggtgcggaagatgactctcgacaggtcagaatacaccagcctgatccccaatctcagaaacgtggtggcactcgataccgaagtcgcctcgaataggatctactggagcgatttgagccagcgtatgatttgtagcacccagcttgatcgggcgcacggagtgtcatcctatgataccgtgatcagcagagatattcaagcccccgacgggcttgccgtggattggattcattcgaacatctactggactgattcagttctggggaccgtgtcagtggcagacactaaaggagtgaagcgcaaaaccctgttccgcgagaatggatccaagccacgagcaatcgttgtggacccggtgcacggatttatgtactggaccgactggggcaccccggccaaaatcaagaagggagggctgaacggagtggacatatactcactggtgactgaaaacatccaatggccgaacggcatcactctcgacctgctcagcggacggctctactgggttgattccaagttgcattccatttcgagtatcgatgtcaatggtggaaacagaaagactatcctcgaagatgaaaaaagactggcccacccgtttagcctggcggtgttcgaagataaagtgttctggactgacattatcaacgaagctattttctcagccaatcgcctgactggaagcgacgtcaatctgctggccgagaaccttctgtccccggaggacatggttctgtttcacaacctgactcaaccgcggggagtgaattggtgtgagcgcaccactctgtcaaacggaggatgccagtacctctgtctcccggctccgcagatcaacccacattctccaaaattcacttgcgcctgtccggatggaatgctgctcgcgagggatatgcgctcatgcctgactgaagcggaggcggcggtggctacccaggaaaccagcaccgtgcgcctcaaagtctccagcacggcggtccgcactcagcacaccaccactagaccggtgccggacaccagcaggctcccgggggccactcctgggctgactacggtggaaatcgtcactatgtcccatcaggcattgggagacgtagcaggccgcggcaacgagaagaagccttcgtcggtgcgtgcgctgtctatcgtgctgccgatcgtcctgttggtgttcctctgcctcggtgtgttcctgctgtggaagaattggcgcttgaagaatatcaacagcatcaatttcgacaatccggtctaccagaaaaccactgaagatgaggtgcacatctgccacaaccaagacggatacagctacccgtcaagacagatggtgtccctcgaggatgacgtggcc

SEQ ID NO: 11251 - DNA, 2580 bp, Artificial Sequence
  derived and/or modified sequence
atgggcccctggggttggaagctgcggtggacagtggccctgctactggccgcggccggaaccgcggtgggagacaggtgtgagaggaacgagttccagtgtcaggacggtaagtgcatctcttataaatgggtctgtgacggatccgcagaatgtcaggatgggtctgatgagtcgcaggagacctgtctgtctgtcacctgcaagtccggcgattttagctgcgggggacgggtgaacaggtgcatcccacagttttggcgatgtgatgggcaagtggattgtgataatggctctgatgagcagggctgtcccccaaaaacctgctcacaggatgaattccgctgccacgacggcaagtgtatttcaagacagttcgtttgcgacagtgaccgagactgtctggacggatcagacgaggcatcctgccctgtcctcacatgcggccccgccagcttccagtgcaattcttctacatgcatcccacagctttgggcttgtgacaatgacccagattgcgaggacggaagtgacgagtggccacaaaggtgccgcggtctgtacgtattccagggcgactcttccccatgctctgcgttcgagttccattgtctctcaggcgagtgcatccattccagttggcgctgtgacggtggcccagattgcaaagacaagtccgatgaagagaattgtgcagttgctacatgtcggccagatgaatttcagtgtagtgatggaaactgtatccacgggtctaggcagtgcgaccgagagtacgattgcaaggatatgtctgacgaagtgggttgtgtgaatgtcacactttgcgaaggacccaacaagtttaagtgtcacagtggagagtgtattacactggacaaggtttgtaacatggctagagactgccgggattggtctgacgaaccaataaaggagtgcgggactgctgaatgccttgacaacaacgggggctgcagccacgtttgtaacgaccttaaaataggctatgaatgcctctgccccgacgggtttcagcttgtcgcgcagcgtcgttgcgaggacattgacgaatgtcaggaccccgacacgtgtagtcagctgtgcgtaaacctggaagggggatataaatgtcagtgtgaggagggattccagctggacccccacactaaagcctgcaaagcagtgggcagcatcgcctacttgttctttacgaatcgacacgaggtaagaaagatgacacttgaccgatctgaatacacatcgctcattcctaatctgcggaatgttgttgctctggataccgaagtggccagcaatcgcatctactggagcgacctgtcgcaacgtatgatctgttccacacagctcgatcgcgctcacggggtatctagctatgacacggtgatatcgagggacatccaggccccggacggtctcgcggtggattggatccatagcaatatttactggacagattccgtacttggcacggtgtctgtcgcagacactaagggtgtgaagcgcaaaactctgtttcgggaaaacggatccaagccccgagccattgtggtcgaccctgtacatggctttatgtactggaccgattggggaacacctgccaaaataaaaaaaggcgggttgaatggggtcgacatttacagtctggtcactgagaacatacaatggccaaacggcatcactctggacctgctaagcgggcgcctgtactgggtggactctaaactccattccatctcctcaattgacgtaaatggggggaatcggaaaacaatcctggaagacgagaagcgcttagcccaccccttttctctggcagtttttgaggacaaggtgttttggactgacatcatcaatgaggccatcttctccgcaaatcgcttaacgggatctgatgtaaaccttctcgccgaaaacctgttgagcccagaagatatggtcttgtttcataatctgacccagccccgcggagtgaattggtgcgagcgcacgaccctgtccaatgggggatgccagtacctatgcctacccgccccccagattaatccccattctcctaaattcacttgcgcatgtccagatggaatgttactggcgagagatatgcgcagttgcttgacggaggccgaagcagccgttgccacccaggaaaccagtacagtgcgacttaaagtgtcgtcaactgctgtgcgcacccagcatactactacacgtcccgtacccgatacgtcacgcctgccaggcgctacccccgggctgaccactgtggaaatagtcacaatgtctcatcaggctttaggggacgtagcgggacggggtaacgagaaaaagccttcttctgtgcgcgctcttagtatagttctgcctatagtgctcctggtcttcttgtgccttggggtgtttctgttatggaaaaactggcggttaaagaatattaactcaattaacttcgacaatccagtgtatcagaaaaccaccgaggatgaggtccatatctgtcataatcaggacggatattcctaccccagccgacagatggtcagcttagaggatgacgtggcg

SEQ ID NO: 11252 - DNA, 2580 bp, Artificial Sequence
  derived and/or modified sequence
atggggccctgggggtggaagttgagatggactgtcgcactgctgttagcggcagccggcacagctgtaggtgacagatgtgagcggaacgaattccagtgtcaggatggcaaatgtataagctataaatgggtatgcgacggctccgctgagtgccaagatggaagtgacgaaagccaggagacatgtctttcggtgacatgtaaatccggggactttagctgcggaggcagagtgaatagatgtattcctcaattttggcggtgtgacggtcaggtagattgtgataatggctccgatgagcaagggtgtccccccaagacctgtagccaggatgaatttaggtgccatgatggtaagtgtatatccagacagttcgtttgcgattctgacagagattgtctggatgggtctgacgaagcttcctgccctgtgctgacgtgcggacccgcttcatttcagtgcaattccagcacatgtatacctcagctgtgggcatgcgataacgaccctgattgtgaagacggaagcgacgagtggccacagagatgccgaggtctttacgtgttccagggagattcttctccttgctcagcgtttgagtttcactgcctgtccggcgaatgtattcattcatcatggaggtgcgacggcgggcccgactgtaaggataaatccgatgaggagaattgcgcggtagctacttgcagacctgacgagtttcagtgtagtgacgggaattgtattcacggatctcgtcagtgcgatcgcgagtatgactgcaaagacatgagtgacgaagtagggtgcgtgaatgttacactgtgcgagggcccaaacaagttcaagtgccattcgggggaatgtattacgctcgacaaagtgtgcaatatggctcgagactgcagggactggagcgatgaaccaattaaggaatgtggcaccgccgaatgcctcgacaacaatggcggctgctcgcatgtctgcaacgatctcaaaatcggttacgagtgtctatgcccggacggatttcagttggttgcccagagacggtgcgaagatatcgacgaatgccaagaccccgacacatgcagccagctctgtgtgaacttggagggcggatacaagtgtcagtgtgaggaagggtttcagctggatccccataccaaagcttgcaaagctgtgggatccattgcctatctcttcttcactaatcgccacgaagtgcggaaaatgactctggaccgttcagaatatacctcccttatacctaatctccggaatgtcgtcgcgttagacacagaggtggcaagtaacagaatatactggagtgacctgagccagaggatgatttgttctacccagcttgatcgcgctcacggcgtcagctcatatgacacagtcatcagtcgggatattcaagcaccagatggattagcggtggattggatccactccaacatttattggaccgactcggttcttggtaccgtctcagtcgctgatactaagggcgttaagagaaaaactctttttcgggagaacggcagcaagccccgtgctatcgttgtggacccagtgcatgggtttatgtattggaccgattggggcacacctgctaaaataaaaaaaggtggattgaacggtgtcgacatttatagcctcgtaacggaaaacattcaatggccaaatggcattactctcgacctgttatcaggccgcctgtattgggtggattctaagctccattccataagttcaatcgacgtaaacggcggcaatagaaagaccatcctagaggatgaaaaacgtttagcccacccattttccctcgctgtgttcgaggataaagttttttggacagatatcataaatgaggccatcttctcagcaaacagactcacagggtcggacgtcaatctactagccgagaatctacttagccctgaagatatggtcctgtttcataacttaacccagccccggggagtgaactggtgtgagcgaacaacactgtctaacggcggctgccagtatctttgccttccggcgcctcagataaatccacattcccctaagtttacctgtgcctgtcccgacggcatgctgctggcacgggatatgcggtcttgtctcaccgaggctgaggcagccgttgccacgcaggaaactagtacagttcggctgaaagtctccagtaccgcagtcaggactcagcatactactactcggcccgtcccagatacatctcgcctgcccggagctacgccaggtctgaccactgtggagattgtgaccatgtcccaccaagcattgggggacgtcgcaggacgcggcaatgaaaagaaaccatcaagcgttagggccctctcgatcgtgctgccaatagtgcttctggtcttcctgtgcctgggggttttcctgctttggaagaattggcgccttaagaatatcaattctataaacttcgacaaccctgtataccaaaagaccactgaagatgaggtccatatttgccacaatcaagatggatattcctacccctccaggcagatggtgtctctggaggatgatgtcgct

SEQ ID NO: 11253 - DNA, 2580 bp, Artificial Sequence
  derived and/or modified sequence
atgggtccttggggatggaaactgagatggactgtggcgctgcttcttgccgccgcaggtactgcagtgggggaccgctgtgagaggaacgaattccagtgtcaggacggaaagtgtatctcctacaagtgggtgtgtgatgggtcagcagagtgtcaagatggatccgatgaatcacaggaaacttgtttgtcggtcacctgtaaatccggggatttctcctgcggtggcagagttaatagatgtataccgcagttctggcgatgtgatggacaggtggattgtgataacggatcagacgagcaaggatgccctccgaaaacttgttcccaagacgagtttagatgccacgatggtaagtgcattagcagacagtttgtgtgtgacagcgacagagattgtctcgatggttcggatgaggcttcgtgcccagtcctgacctgtggtccagcgtcatttcaatgtaatagctctacctgtattccccagctctgggcgtgcgataacgaccccgattgtgaggacggctccgacgaatggccacaacggtgccgcggactgtacgtgtttcagggtgattcgtccccttgttccgcgttcgagttccattgtctttcgggagagtgtatccactcgtcgtggcgctgtgatggtggacccgactgtaaggataagtcagatgaggaaaattgcgctgtggccacctgtagacctgatgagtttcagtgctccgacggaaactgtatccatggctcccggcagtgtgatcgggaatacgattgtaaggacatgtcggatgaggtcggctgtgtcaacgtgacgctgtgcgagggacccaataagtttaagtgtcattccggagagtgcatcactctggataaggtgtgtaacatggctcgagactgccgggattggtcggatgaaccaatcaaagagtgtggaactgctgaatgtcttgataacaatggcggttgtagccatgtctgtaatgacctgaagattggatacgaatgtctgtgccctgatggctttcaacttgtggcacagcggcgttgcgaagatatcgacgaatgtcaggatccggatacttgttcgcaactctgcgtgaaccttgaaggaggatacaagtgccagtgtgaagaggggttccaacttgacccacatactaaggcatgtaaagcagtggggagcatagcgtacctgtttttcactaaccgacatgaagtgcgcaaaatgaccctggacaggtcagaatacacctcactgattcccaatcttcgtaatgtggtggcactggatactgaagtggcaagcaaccgcatctactggtcggacctgtcgcagcggatgatttgttcgactcaactggacagagcacatggtgtctcctcctacgataccgtgatatcaagagatattcaggcgcccgatggtcttgcggtcgactggatacatagcaacatttactggactgattccgtgctgggcaccgtctcggtcgccgataccaagggggtcaaacgtaagaccctttttcgggagaacgggtcgaagcctcgtgccatagtggtggaccctgtccatggatttatgtattggactgactggggtacccctgcaaagataaagaagggcggcctcaatggtgttgatatctactcactcgtgaccgaaaacatccaatggccgaatggtattaccctcgatctcctgtcggggagactttactgggtggattcaaaacttcactcgattagctccatcgacgtgaacggtgggaacagaaagaccatattggaagatgaaaaacggctggctcatccattctcgctggccgtgtttgaggacaaggtgttctggaccgacataatcaacgaggccattttctccgccaaccgtttgaccggtagcgacgtgaatctgctggcagaaaatctgctctcccctgaggacatggtcctgttccataaccttacccaaccgaggggtgtcaattggtgcgagcgcaccacgctgtcaaatggtggttgtcagtatctctgccttcctgcaccacaaatcaatccacattcccctaagttcacctgcgcctgtcccgatggcatgctgctcgcacgtgacatgcgatcgtgcctgactgaggcagaagccgccgtggcaactcaagaaaccagcactgtgcgtttgaaggtttcgtcgacggcagtgagaacgcaacataccactacgcgcccggtccctgatacctcccggctccccggcgcaactccaggacttaccaccgtggaaattgttactatgtcccatcaggcgcttggtgacgttgcagggagaggtaacgagaagaagccctcatcggtgagagcactttcaattgtgttgcccatcgtccttctcgtgttcctgtgtctgggagtctttctcctttggaaaaactggcgacttaagaacataaactccatcaatttcgacaacccggtgtaccagaaaacgactgaagatgaagtccacatatgtcacaaccaggatggatactcgtacccctctcggcaaatggtgtcactggaagatgacgtcgca

SEQ ID NO: 11254 - DNA, 2580 bp, Artificial Sequence
  derived and/or modified sequence
atggggccgtggggctggaaactgagatggaccgtcgcgcttctgctggcggcggccggtaccgcagtcggcgaccggtgcgaaaggaatgaattccaatgccaagacggaaaatgcatttcctacaagtgggtgtgcgacggctcagcagagtgtcaggatggatcggatgagagccaggagacttgcttgtctgtgacctgcaagtccggtgacttttcttgcggaggccgcgtgaacagatgcatcccgcagttctggagatgcgatggtcaggtggactgcgataacggaagcgacgaacagggatgccctccgaaaacctgctcgcaagatgaattccgctgccatgacggcaagtgcatcagccgccaattcgtgtgcgattccgacagagactgcctggacggatcggacgaagccagctgccccgtgctgacttgcggcccggcctcctttcagtgtaattcaagcacctgcataccacagctctgggcatgtgacaatgatccggattgtgaagatggctccgacgagtggccacaacgctgccggggattgtacgtctttcagggcgactcgagcccgtgtagcgcgttcgagttccattgtttgtccggagagtgcatccattcgtcttggcggtgcgatggaggaccagactgtaaggacaaatcggatgaggagaattgcgcggtggcgacttgtcgcccggatgagtttcaatgctccgacgggaactgcattcacggcagccgccagtgcgatcgagaatacgactgtaaggatatgtccgacgaggtcggctgcgttaacgtgactctctgcgaaggaccgaacaagttcaagtgccattccggtgaatgtatcactctggacaaggtgtgcaatatggcacgggattgtcgggattggtctgacgagcccatcaaggaatgtggaactgccgaatgcctcgacaacaacggtggttgcagccatgtgtgtaacgacctgaagatcggctacgaatgcctctgcccagacggtttccagctggttgcacagcggagatgcgaagatattgatgagtgccaggatcccgacacgtgtagccagctgtgtgtgaatcttgagggcgggtacaagtgtcagtgtgaggaaggattccaattggacccgcacaccaaagcctgcaaggcggtgggctcgatcgcctacctgttcttcactaatcgccacgaggtgaggaaaatgactctggaccgctcggaatacacctcgctgatcccgaatttgagaaatgtggttgccctggataccgaagtggccagcaatagaatctactggtctgacttgtctcaacgcatgatttgttcaacccagttggaccgggcacacggagtctcctcctacgatactgtgatctcgcgcgacatccaggcaccggacggactggccgtcgattggattcacagcaacatctactggacggattcggttctgggaactgtgtccgtggcagacactaagggagtcaagaggaaaactctcttccgggagaatggctcaaagcccagggccatcgtcgtggatccggtgcatggcttcatgtactggaccgattggggaactcccgccaaaatcaaaaaaggaggactgaacggagtggatatctattcgctcgtgaccgagaatatacagtggccgaacggaatcaccttggatctgctcagcggaaggctgtactgggtcgatagcaagctgcacagtatctcatccatcgacgtgaatggtggcaacagaaaaaccatactggaggacgaaaagcgcctcgcgcaccctttttccctcgcggtgttcgaagataaggtcttttggacggatatcattaacgaagctattttctcagccaaccgcctgaccggttccgatgtgaacctgttggcagagaatcttctctcccctgaggatatggtgctgtttcacaatcttactcaaccacgcggagtgaattggtgtgaaagaaccaccctgtccaacgggggatgccaatacctgtgcctcccggcccctcagatcaacccgcacagcccaaagttcacttgtgcttgccctgatggcatgctcctcgcgagagatatgcgctcgtgtctcactgaagctgaagccgccgtggctactcaggaaacgtcgaccgtgcgcctcaaagtgagctcgaccgctgtgcggacccaacataccactactcggcctgtgcctgatacttcgaggctgcctggagctacgccgggccttacgacggttgaaatcgtcaccatgagccatcaagctctcggagatgtggcgggacggggaaacgaaaagaagccctcctcagtccgggcgctctccatcgtgctccccatcgtgcttctggtgtttttgtgtctgggagtattccttctgtggaagaattggcgcctcaagaacatcaactccatcaacttcgacaacccggtttaccagaaaactaccgaggacgaagtgcacatctgccacaatcaggacggctattcctacccttcacggcaaatggtatccctggaggacgacgtggca

SEQ ID NO: 11255 - DNA, 2580 bp, Artificial Sequence
  derived and/or modified sequence
atggggccgtggggatggaagctgagatggactgttgcactcctgctggcggcagccggaactgctgtgggtgatcgttgcgaaaggaatgagtttcaatgtcaagatggtaaatgtatctcgtacaagtgggtgtgtgacggatcagccgaatgccaagacggatcagacgagtcgcaagaaacctgcctgtccgtcacttgcaagtccggggacttctcctgtggcggacgggtgaatcggtgcattccgcagttttggcggtgcgacggccaggtggactgtgacaacggaagcgacgaacaggggtgtcctccgaaaacttgtagccaagacgagttccggtgtcacgatggtaaatgcatctcgcgccagttcgtgtgcgactcggacagagattgcctcgatggatccgacgaggcttcttgccctgtgctgacctgcggtccggcctcgtttcagtgcaactcgtccacctgcatcccgcaactttgggcctgcgacaatgaccctgactgcgaagatggatccgatgaatggcctcagcgctgtcgcggcctttatgtgttccagggtgattcatccccgtgttcagccttcgagttccactgcctgtcgggcgaatgcatccattcgtcctggcgctgcgacggcggccctgattgcaaagataaatcggatgaagaaaactgtgcggttgcgacgtgtagaccagacgaattccaatgctctgacggtaactgcatccacggatcgagacaatgtgatcgtgaatatgactgtaaggacatgagcgatgaggtcgggtgtgtcaatgtcaccctctgcgaaggtccgaacaaattcaagtgccatagcggagaatgcatcacgctggataaggtctgcaatatggcccgcgattgtcgggattggtctgacgaaccgatcaaagaatgcggaaccgcagaatgcctggacaataacgggggatgctcacacgtctgcaatgatctgaagattgggtacgaatgtctctgcccagacggcttccaactggtggctcagaggagatgcgaggacatagatgagtgccaggaccccgacacttgctcacaactgtgcgtcaatctcgagggaggatacaaatgccagtgtgaggaaggattccagctcgatccacacactaaggcatgtaaagccgtcggttcgattgcctacctctttttcactaatcgacatgaggtgagaaagatgactctcgatcgatcagaatacaccagcctcatcccgaaccttcggaatgttgtggcgctggatacggaagtggcctcaaaccgcatctactggtcggacctctcgcagcggatgatctgctcgactcaattggatcgtgctcatggagtcagctcctacgataccgtgatcagcagagacatccaggcccctgacggcctcgccgtggactggatccattcaaacatctactggaccgactcggtcttgggtaccgtctccgtggcggacaccaaaggagttaagcggaaaaccctttttcgcgagaacgggtcgaaaccgcgcgcgatcgtggtggacccagtgcatggttttatgtactggactgactggggaactccggccaagatcaagaagggaggcctcaatggggtggacatctactctctcgtgactgagaacatccaatggcccaacggcattaccctggacctgctgtcaggacgcctgtactgggtggattcaaagctgcatagcatcagctccatcgacgtgaacggaggcaatcgcaaaacgatactggaggatgagaagcggctggcgcatcctttctccctcgcagtgttcgaggacaaggtgttctggactgatatcatcaacgaggcaattttcagcgcgaataggctcactggctcggatgtgaacctgctggcagagaacctgttgagcccggaggatatggtcctgtttcacaatctgacccagccgcggggcgtcaactggtgcgaaagaacgaccctttcgaacggcggctgccagtacctctgcctgccggctccgcagatcaacccgcactctccaaagttcacttgcgcttgcccggacggaatgcttttggcccgggatatgagatcttgcttgactgaagcggaagccgccgttgcgacgcaggagacttcgactgtgcggctgaaagtctcctccactgcggtgcggacccagcacacgactacccgcccagtgccagacacctcaagacttccgggagctaccccaggcctcaccaccgtcgaaatcgtgaccatgagccaccaggctcttggtgatgtcgctgggcgcgggaacgaaaagaaaccaagctcggtgcgcgcgttgtccatcgtccttccgatcgtcttgttggtgtttctgtgcctcggcgtctttctgctgtggaagaattggcggctcaagaacatcaacagcatcaacttcgacaaccccgtctaccagaaaactacggaggacgaagtgcacatttgccacaatcaggacggatactcctacccgagccgacagatggtgtcactggaggacgacgtggcc

SEQ ID NO: 11256 - DNA, 2580 bp, Artificial Sequence
  derived and/or modified sequence
atggggccatggggatggaagctgcgatggaccgtcgccctgctgctggcagctgcaggaactgccgtgggtgatcggtgcgagcggaacgaattccagtgccaggacggtaaatgtatctcgtacaaatgggtgtgtgacgggtcggcagagtgtcaagacggctcagatgaatcacaggaaacttgcctctccgtcacttgtaagagcggggacttctcttgcggcggtcgcgtgaatagatgcatccctcagttctggcggtgcgacggacaggtggactgcgataatggaagcgacgagcagggctgtcctccgaaaacttgttcgcaggacgagttcaggtgccacgacgggaagtgcatatcccggcaattcgtgtgtgactcggatagagattgcctggacggatcggacgaggcctcctgccccgtgctcacttgtggacccgcgtccttccaatgtaactcctccacttgcatcccgcaattgtgggcctgcgataacgatccggactgcgaagatggtagcgacgagtggcctcaacgctgcaggggcctgtacgtgttccagggtgattcctcaccatgctccgcgtttgaattccattgcctttcgggagagtgcattcatagctcatggagatgcgatggcggaccagattgcaaggacaaatctgacgaggagaactgcgccgtggccacctgtcgcccagacgaatttcagtgttcagatgggaactgtatccatggttcgcgccagtgcgatcgcgaatatgactgcaaggacatgtcggacgaagtgggatgcgtgaacgtcacgctgtgtgagggtcccaacaagttcaagtgccattctggagaatgcatcaccttggataaagtgtgcaatatggcacgcgattgcagagactggtccgacgaaccgataaaagaatgtggcaccgccgaatgtcttgataacaacggaggatgctcccacgtgtgcaacgacctgaagatcgggtacgagtgcctgtgtccagatggcttccagctggttgcgcaacgccgctgcgaggacattgacgaatgccaagacccggatacctgcagccagctctgcgtgaacctggaggggggctacaagtgccaatgcgaggaaggattccagctggacccgcacactaaggcctgcaaggccgtcggatcgatcgcgtacttgttctttaccaacaggcacgaagtgcggaagatgactctggatagatcagaatacaccagccttatccctaacctgcgcaacgtcgtggcgctggataccgaggtggcaagtaatcgcatctactggagcgacctttcccaacgcatgatctgctccacgcaactggatcgcgcccacggcgtgtcgtcgtacgacactgtgatctccagggatattcaagcgcctgacgggctcgccgtcgactggatccacagcaatatctactggaccgactcggtactgggaactgtgtcggtggccgacacgaaaggagtcaagcgcaaaactctgtttcgggaaaacggatccaagccgagggcgattgtcgtcgacccggtgcacggattcatgtactggactgactggggaacgccggccaaaatcaagaagggagggctcaatggtgtggacatctacagcttggttactgaaaacatccagtggccaaacggcataactcttgatctgctgagcggaaggttgtactgggttgactccaaactgcacagcattagctcaatcgacgtcaacggaggcaaccgcaagaccattctggaggatgaaaagagactggcccacccttttagcctggcggtgttcgaggataaggtcttttggactgatatcatcaacgaggcaatcttctccgcgaatcgcctgactggatcagatgtgaacctgctggctgaaaacctgctgtcacctgaggacatggtcttgttccacaatttgacccagccaagaggtgtgaactggtgtgagcggactacccttagtaatggaggctgtcagtatttgtgcctgccggccccgcagattaatccgcacagccctaagttcacgtgcgcatgccccgacggcatgcttttggcaagggacatgcgctcgtgtctcacggaggcagaggccgccgtggctacccaggaaacctccacggtcagactgaaggtttcatcgaccgctgtgcgcacccaacataccaccactaggccggtcccagatacctcccgtctgccgggtgccaccccgggacttactactgtggaaatcgtgaccatgtcgcatcaggccctgggagacgtcgctggacgcggcaacgaaaagaaaccttctagcgtaagggcgctgtccatagtgctcccgattgtcttgctggtctttctttgcctgggcgtctttctgctctggaagaattggcggctcaagaatatcaactcaatcaatttcgacaatcccgtttaccaaaaaaccacggaggatgaagtccacatctgccataaccaggacggatactcgtacccatccagacagatggtgtccctcgaagatgacgtggcc

SEQ ID NO: 11257 - DNA, 2580 bp, Artificial Sequence
  derived and/or modified sequence
atggggccctgggggtggaaactcaggtggacagttgcactgctactcgcagctgccggtaccgctgtgggcgatcgttgtgagcgtaacgagtttcagtgccaggatgggaaatgcataagttacaagtgggtctgcgatggatctgctgagtgtcaagacggttctgatgaatctcaggaaacttgcctctcagtgacatgcaaatcaggtgatttctcatgtgggggccgtgtgaatcgatgtataccccagttctggaggtgcgacggtcaggtggattgcgacaacggtagcgacgagcaggggtgccccccaaaaacttgttcacaagatgaattccgatgccatgacggaaaatgcatctcccggcaatttgtctgcgattccgatcgggactgcctcgatggttctgatgaagcctcttgtcccgtactgacatgtgggccagcctcattccagtgcaacagttcaacctgtattccacaactatgggcctgcgacaatgaccccgattgcgaggatggtagtgatgaatggcctcaacggtgtagagggctgtacgtgttccagggtgattcttccccctgcagtgcatttgaatttcattgtctgtccggggaatgcattcactcctcatggcggtgtgacggcgggcctgactgcaaagacaaatcggacgaggagaattgcgccgtggcgacctgtcggccagatgagttccagtgtagtgacggcaattgcattcacggcagccggcagtgcgatcgcgagtatgactgcaaggacatgtcagacgaagtgggatgcgtgaacgtgaccctgtgcgaaggcccaaataaattcaagtgccactcgggcgagtgcattaccctggataaggtgtgtaatatggcgcgggactgcagggactggtccgacgagcccattaaggagtgtgggaccgcagagtgtctggataacaacggaggctgttcacacgtatgcaatgaccttaagatcggctacgagtgcctctgccccgatggtttccagttggtggcccaaaggcggtgtgaagacattgacgagtgccaggaccctgatacgtgttcacagctttgcgttaatcttgagggcgggtacaagtgtcagtgtgaagagggctttcagctcgacccccacaccaaagcctgcaaagcggtgggatcaattgcctacctcttttttaccaaccgacacgaagtacgcaagatgaccttagataggagcgagtacacatctctcatcccaaatctgcggaacgtagtcgcattggacacagaggtcgcttccaatcgcatttactggtccgatctctcacagaggatgatctgcagtacacagctagacagagcacacggcgtgtcgtcatatgatacagtcatcagtagagatatacaggctccagacggtttggctgtcgattggattcacagtaacatttactggaccgattccgtgctcggtactgtgagcgttgctgacacgaaaggagtgaagcgcaagacccttttccgagagaatggatctaaacctagggccatcgtggtggatcctgttcatggtttcatgtattggaccgactggggcactcccgcgaagatcaagaaaggcgggctgaacggtgtcgacatatatagtctggtaaccgaaaacatacagtggccaaatggaatcactctggacctcctttcagggcgtctgtactgggtcgattcaaagctgcattccatttcaagcatcgacgttaacggcggcaatcggaaaacgatcttggaggacgagaagcggctggcacacccgttttccctcgcagtgtttgaggataaagttttctggacagatataataaatgaagctatcttctccgcaaaccgtctaacaggcagtgatgtgaacctattagctgagaatctgctttctcctgaggacatggtcctgtttcacaatttgacccaaccaaggggtgtgaactggtgcgagaggacaactctgtccaatggcggctgtcagtacctctgccttcccgccccacagattaacccacacagtcccaagttcacgtgcgcttgccccgatgggatgctgttggcacgagacatgcgatcttgcttgaccgaggcagaggccgccgtcgccacccaggaaacaagcacggtaaggctgaaggtttcatccaccgccgtaagaacccagcacaccactaccaggccagtgccggacacaagccgcctgccaggagctacgcccggcctaaccacggtcgaaatcgtgacgatgtctcatcaggccttaggggacgtagctggccgtggaaatgagaagaaacctagtagtgtgagggcgctctccatcgtgcttcctatcgtcctactggtgttcctatgtctaggtgttttcttgctgtggaagaactggcgcctaaagaatatcaattcaatcaacttcgacaaccccgtgtaccagaagaccactgaggatgaggtgcacatctgccataatcaggatggatacagttatccttctcgccaaatggtgtccctcgaagacgatgttgcc

SEQ ID NO: 11258 - DNA, 2580 bp, Artificial Sequence
  derived and/or modified sequence
atgggtccttggggatggaaactgagatggacggtcgccctgcttctggcagccgccgggaccgcagtcggtgaccgctgcgaacgaaacgaatttcagtgccaagatggcaagtgtataagctacaaatgggtgtgtgatggtagcgccgaatgccaggacggaagcgacgagagccaagaaacctgccttagcgttacgtgtaaatcaggagatttctcgtgtggtggaagagtgaaccgctgtattccgcagttttggagatgtgatggccaggttgattgtgataacggcagcgatgagcaaggatgcccccctaagacctgcagccaggatgaatttcggtgtcacgacggaaagtgtatctcgagacaatttgtgtgtgactcggatcgtgactgccttgatggatcggacgaagcgagctgcccggtgttgacctgtggccctgcatcttttcagtgcaatagttcaacctgtattccacaactctgggcatgcgataatgatccagattgcgaggacgggtccgatgaatggccacaacgctgtagaggactctacgtgtttcaaggagattcctctccctgttccgcgttcgaatttcattgtttgtcaggagaatgcatacactcctcatggcgctgtgatggtggacccgattgtaaggataagtccgatgaagaaaactgcgccgtggccacgtgccgtccagatgagttccaatgttcggatggaaattgtattcatgggtccagacaatgtgacagagaatacgattgcaaggatatgtcagatgaagtcggttgtgttaatgtgaccctgtgtgagggacccaataagttcaaatgtcattcgggagaatgtattaccttggataaagtgtgcaatatggcacgggattgccgggattggagcgatgaacctattaaggagtgcgggaccgctgagtgtctggataacaacggaggatgttcacacgtctgcaatgaccttaagataggatacgaatgcttgtgtcccgacggttttcagctcgttgctcaacgtcgatgcgaagatatcgatgagtgtcaggaccccgatacgtgttcgcaactctgtgtgaatctggagggaggctacaagtgccagtgtgaggagggcttccaactggacccacataccaaggcatgtaaagcagtggggtcaattgcatatcttttctttaccaacagacatgaggtcagaaaaatgactcttgatcgctccgagtacacttcactgattcccaacctgcgcaacgtggtcgcgctcgataccgaagtggccagcaacagaatctactggtcggatcttagccaacgcatgatctgctcgacgcagcttgatagagcacacggagtgtcctcctacgataccgtgatctctagggatattcaagcacctgatgggcttgcagtggactggattcactcaaacatttactggactgatagcgttcttggaactgtgtccgtggctgacacgaaaggtgtgaagcgtaagacccttttcagagaaaacgggagcaaaccaagagcgatcgtggtggatccagtccacggttttatgtactggacggattggggcactcccgcgaagattaagaagggtggactcaatggtgtggacatctactcgctggtgactgaaaacatccaatggcctaacggaattactcttgatctgctgtcgggaagattgtactgggtcgattcgaaacttcatagcatttccagcattgatgtgaatggcggcaatcggaaaaccattctggaggatgaaaagagacttgcccatccatttagccttgccgtgtttgaagataaggtgttttggactgacatcataaatgaagcgatcttttcagccaatcgattgactggatccgacgtgaacctgttggctgaaaacctgctctctcctgaggatatggtgctgtttcacaaccttactcagccgaggggagtcaattggtgtgagcggactaccctttcgaacggcggctgtcagtacctttgcttgcctgcccctcagataaaccctcactcgccgaagttcacctgcgcatgtccagacgggatgcttctggcccgggatatgcgctcctgcctcaccgaagcagaggcagcagtcgcgacccaggagacttcaaccgtccgtctgaaagtgtcctcgactgcggtgcgcactcagcatacgaccacgcggcctgtcccagacacttcgaggctgcccggtgcgacgccgggactgacgacggttgaaatagtgaccatgtcccatcaggcacttggagatgtcgcaggcagaggaaacgaaaagaagccctcttcggtgcgcgcactttcaatcgtactgcctatcgtgttgctcgtctttctttgtctgggggtctttcttctctggaagaactggcgcctcaagaatatcaattccatcaatttcgataacccggtgtaccaaaagactacggaagatgaagtgcatatttgtcataaccaagacggttacagctatccgagtcgacagatggtgtccctcgaagatgatgtggct

SEQ ID NO: 11259 - DNA, 2580 bp, Artificial Sequence
  derived and/or modified sequence
atggggccctggggctggaagctccgatggaccgttgcactgttgttggcagcagctggaaccgccgtgggagatagatgcgaacggaatgagttccaatgccaggacggcaagtgcattagctacaaatgggtctgcgacgggtctgcggaatgccaggacggctccgatgagtctcaggagacttgcctgagcgtcacctgcaaatcaggcgacttctcttgcggcgggagggtcaaccgatgtattccccagttctggcggtgcgacggacaagtggactgcgataatggcagcgacgagcaaggatgccctcccaaaacctgctcacaggacgagttccgctgtcatgacggtaagtgcatttctagacagttcgtctgcgacagcgatcgcgattgcctggacgggtctgatgaggctagttgtcccgtgctcacgtgtggccccgcctccttccagtgcaactcctcaacatgtataccgcaactgtgggcatgtgacaacgaccctgactgtgaagatggaagtgatgagtggcctcaacgctgccgcggactgtacgttttccagggtgacagcagcccatgctcagccttcgaatttcattgtttgtccggggagtgcatccactcctcttggcgatgtgatgggggacctgattgcaaggataagagtgatgaagagaactgcgccgtggccacgtgtcggccagacgagtttcagtgttctgacggaaactgcattcatgggagtagacagtgtgatagggaatacgactgtaaggacatgtctgatgaggtcggctgcgtgaatgtaacgctgtgcgaaggccccaataaatttaaatgtcattcaggcgagtgcatcacattggacaaggtgtgcaacatggctcgggactgccgggactggtccgacgaacctatcaaggaatgtggcacagccgaatgcctggataataatggaggctgtagccacgtctgcaacgaccttaagatcgggtacgaatgtttgtgcccagatggatttcagctggtcgctcagcgacggtgcgaggacatcgacgaatgtcaggatcctgacacctgcagtcaactgtgtgtcaatcttgaggggggctacaagtgtcaatgcgaagagggattccagctcgacccgcataccaaagcttgcaaggctgttgggtcaattgcctatttgtttttcacaaaccgacatgaggtacgcaagatgacactggaccggagcgaatataccagcttgatccctaatctcagaaatgtcgtggccctcgacactgaggtggcctccaaccgaatatactggtctgatctgtcccagaggatgatttgctcaacacagctggatcgagcgcatggagtttcttcctacgacactgtgatttctcgcgatattcaagcccccgacgggctggccgtagattggatacattctaatatctattggaccgatagcgtgttgggtaccgtgtctgtggcagacacaaaaggggtcaagcgcaagactctctttcgggagaatgggagtaaacccagagcaatagtggtggatcccgtgcacggatttatgtattggaccgattgggggactccagctaagattaagaaaggcggcttgaatggcgttgacatctactccctggttacggagaacattcaatggcccaacggtatcaccttggatttgttgtccgggagactgtactgggtggattcaaagctgcactctatctcctccatcgacgtcaatggaggcaacaggaaaacaatactcgaagacgaaaaaagactggcacatcccttttcactggcagtgtttgaggataaagtcttttggactgacataatcaatgaggcaattttctccgctaatagacttacaggaagcgatgttaatctgctggccgaaaatctgctgtcacccgaggatatggtcctcttccacaacctgacgcagccaagaggcgtgaattggtgcgaaagaaccaccctgtccaacgggggatgccagtatctgtgccttccagccccccagataaaccctcacagcccgaaattcacctgcgcatgtcctgacggaatgttgttggcccgggacatgcggtcctgcctgacagaggctgaagctgccgtcgctacccaggaaacttcaaccgtgagactgaaggttagtagcaccgcggtcagaactcagcatactacaactcggccagttccagatacaagtcgactgcctggagccaccccgggcctgactaccgtcgagattgttaccatgagtcaccaggccctgggagatgtcgccggccgcgggaacgagaaaaaaccctcatccgtcagagccctgagtatcgtactgcctatagttctgcttgtgtttttgtgccttggggtgttcctcctgtggaaaaactggaggctgaagaacattaacagtataaactttgacaatccagtctatcagaaaactacagaggatgaggtacacatttgtcataatcaggacgggtattcctacccctcccggcaaatggtgtccttggaggacgacgtggct

SEQ ID NO: 11260 - DNA, 2580 bp, Artificial Sequence
  derived and/or modified sequence
atgggaccttggggctggaaactacggtggacagtggcattactgctagctgctgcaggaaccgccgtgggcgatcggtgcgaaagaaatgagttccagtgtcaagacgggaagtgcattagttacaagtgggtgtgtgacggcagcgccgagtgtcaggatgggagcgacgagagccaagaaacgtgtttgagcgtgacatgcaagtccggtgactttagttgcggcggtagggtgaaccggtgtattccacagttctggagatgtgatgggcaggtcgattgtgataatggtagtgatgaacaaggttgtccccccaaaacatgttcccaggacgaatttaggtgccatgatggcaagtgcatttcccgacagtttgtatgtgacagtgaccgcgattgtcttgatggatccgatgaggcctcctgccctgtgctgacatgcggccctgcctcttttcagtgcaactccagtacatgtatcccacaactatgggcctgtgacaacgaccccgactgcgaagacggtagtgacgagtggcctcaaagatgcagaggcctgtatgttttccagggtgactcgtccccttgcagcgcttttgagttccattgcttgagcggcgagtgtatccatagctcttggaggtgcgacggaggtccggactgtaaagacaagagcgatgaggagaactgcgccgttgccacctgccggcctgatgagttccagtgttcagacgggaattgcatacacgggtcaagacaatgtgatcgagagtacgactgtaaagacatgagcgacgaggtagggtgtgtcaacgtcacgctctgtgaggggcctaataaatttaagtgccactcaggcgagtgtatcacactggacaaggtgtgcaacatggctcgggattgtagagactggtctgacgagccaatcaaggagtgtggaaccgcggagtgccttgataacaatggtggatgctcacatgtttgtaacgacctcaaaataggatacgagtgtttgtgtccagacggattccaactggtcgctcaacgccggtgtgaggatatagatgagtgtcaagaccctgatacctgcagccagttgtgcgtgaacctcgagggtggctacaagtgtcaatgcgaagaggggttccaactggatcctcacacaaaagcctgcaaagcggtgggatccatcgcatatttgtttttcacaaatcgccacgaagtcaggaagatgacattggatcggtcagagtacactagcctgatcccaaacctgcggaacgtggtggccttggatactgaagtagcaagtaaccggatttattggtcagacctgtctcagcgcatgatatgcagtacacagctggaccgcgcacatggagtctctagctatgacactgtgatttcaagagatatacaggcgccagacgggcttgctgttgactggattcattcaaatatctattggaccgattcggtcctgggcacagtttctgtggccgacacgaaaggagtgaaacgaaaaacattgtttagggagaatggttccaagcctagggccatcgtcgtggatccagtccacgggttcatgtactggacggattgggggactcctgctaaaattaaaaaagggggtctcaatggggtggacatttattcactggtgactgagaacatccagtggcctaacggaattacactcgatctgcttagcggtcgactctattgggttgactcaaaactgcacagcattagcagtatagacgtgaatggcggaaaccggaagacaattctagaagatgaaaagagactggcccacccattctccctcgcagtattcgaggataaagtgttctggacggacattattaatgaggcgatattttcagctaacaggttgaccggcagcgatgtgaacctgctggccgagaacttgctttcccctgaggacatggtgttgtttcacaacctgacacagccccgtggcgtcaactggtgcgagaggactactctgtccaatggcggctgtcagtacctctgcctgccggccccacagattaacccgcatagtcccaagttcacatgtgcctgtcccgacggaatgctgctggcccgagatatgcggagctgccttaccgaagccgaagccgctgtcgccacgcaagagacctctactgtgaggctgaaggtatcaagcacagccgtgcggactcagcataccacaacccggccagtaccagacacatcgcgcctcccaggggctacgccggggttgacaactgtggaaatcgtaacgatgtctcaccaggcactgggtgacgtcgctggtcgcggcaatgaaaagaagcctagctctgtgcgcgctttgagtatcgtgctcccaatcgtcctcctcgtgttcctctgcttaggggtgtttctgctgtggaagaactggagattgaagaacattaactccatcaacttcgacaatccggtgtaccagaagactactgaagatgaggtgcatatctgccataatcaagatgggtatagctacccttctagacagatggtcagccttgaagatgacgtagct

SEQ ID NO: 11261 - DNA, 2580 bp, Artificial Sequence
  derived and/or modified sequence
atgggaccctggggatggaaactgcggtggaccgtggctctgctgctggcggccgccggcactgcagtcggtgatcgctgcgaacggaatgagtttcagtgtcaggatggcaaatgtattagctacaagtgggtgtgcgacggaagtgctgagtgccaggatggcagtgacgaaagccaggaaacctgcttaagtgtgacatgtaagtccggagatttctcatgcggcggacgtgttaataggtgtattccccagttctggaggtgtgatggtcaggtggactgtgacaatggaagtgatgaacaaggctgtccgccaaagacttgttcacaggatgagtttagatgtcatgatggaaagtgtatctcacgccagttcgtctgcgactctgaccgggactgtttagacgggtctgacgaagctagctgtcccgtgctgacatgcgggcccgcctcgttccaatgtaattcttctacgtgtattccgcagttgtgggcttgcgacaacgatcccgattgcgaagatggcagcgatgagtggcctcagcggtgtcgggggctgtatgtgttccagggcgactcatccccatgctcggctttcgagtttcattgcttgtcaggagaatgcatccatagctcttggcggtgtgacggtggtcccgattgcaaagataagtctgacgaggagaattgcgctgttgcaacttgccgccccgacgaattccagtgtagtgacggtaattgcatccacggctcccgccagtgcgaccgggagtatgactgtaaggacatgtccgatgaggtgggctgtgtcaacgttacactgtgtgaaggccccaacaaattcaagtgccattcgggggagtgtatcaccctggacaaagtgtgcaatatggctcgcgattgtcgggactggagcgatgaacctatcaaggagtgtggcaccgcagagtgcttggacaacaacgggggatgtagtcacgtgtgcaatgatctgaaaattggctatgagtgtttgtgcccagacggattccagttggttgcacaacgacgctgcgaagatatcgatgaatgccaggatcctgacacatgctctcagttgtgcgttaacctcgagggcgggtacaaatgccagtgtgaagaaggattccagctagatccacacaccaaagcctgcaaagccgtgggctctatcgcatatctgttttttacgaaccgccacgaagttcgcaagatgacgctagacaggtcagaatatacaagccttatcccaaacctgcgcaacgtcgttgctctggacaccgaagtggcttctaatcgaatttattggtctgatctctcccaaaggatgatttgcagcactcagcttgacagagcacatggagtgagctcttacgataccgtaattagcagagatatccaggcccctgacggtctcgccgttgactggatacatagcaatatctactggacagacagcgtgctggggactgtatccgttgcggacaccaagggcgtgaagagaaaaacgctgttccgagaaaacggttcaaagcccagggcaatcgttgtagaccctgtacacggtttcatgtactggacagactggggaacccccgcaaagatcaagaaagggggtctcaatggcgtggatatctactccctggtcacagaaaatatccaatggccaaatggcattacgctggacttgctgtcaggacgtctctattgggtcgattctaagctgcattctatttcgtctatagacgtgaacggaggtaacaggaagacaattttggaggacgagaagcgcctggcccacccgttctccctcgctgttttcgaggataaggttttctggaccgatattatcaatgaggcaattttctccgcaaacaggctgacaggctctgatgtgaacctgctggccgaaaacttattgtcccccgaggacatggtgctttttcacaacttgacccaacccagaggggtgaactggtgtgaacgcacgaccctgtctaacggaggatgccagtacttgtgcctgcccgcgccccagataaacccccattcgcccaaattcacttgtgcgtgtcccgatggtatgttacttgcacgcgatatgcgcagttgcctgacggaggcagaggccgccgtggccactcaggagacaagcacggtgcgattgaaggtttcctctacggctgtgcggacgcaacacacaacaacacgacctgttccagacaccagtcgcctgccgggtgctacaccgggactcaccactgtggagatcgtaaccatgtcacatcaggctctcggcgacgtggcaggacgtggcaatgagaagaagccatcctccgtgagagccttaagtattgtgctgcccatagtgctgctcgtattcctgtgccttggggtctttctgttgtggaagaactggcggttaaagaacatcaacagcatcaactttgataacccagtgtaccagaaaacaaccgaggacgaggtgcacatttgccataatcaggatgggtactcatacccctcgcggcagatggtgtccctggaagacgatgtggca

SEQ ID NO: 11262 - DNA, 2580 bp, Artificial Sequence
  derived and/or modified sequence
atgggtccgtggggatggaagctccgctggacggtggccctcctgttggccgcagccgggacggctgtcggagatcgatgcgagcggaatgagttccaatgccaggatgggaagtgcatctcctacaagtgggtgtgcgacggaagcgccgaatgccaagacggatcggatgagtcccaagaaacctgtctgtcggtgacgtgcaaatcaggagacttttcctgtggaggacgggtgaaccggtgtatccctcaattctggcggtgcgacggccaggtggactgtgacaacggatccgacgaacaggggtgcccgccgaaaacctgcagccaggacgagtttcgctgccacgatggcaaatgcatctcgcggcagttcgtttgcgatagcgatcgcgattgtctcgacgggagcgatgaagccagctgcccagtcctgacttgtggcccggcgagcttccagtgcaactcctccacttgcatcccgcaactctgggcgtgtgataacgacccggactgcgaggatggatcggacgagtggcctcagcggtgcaggggactgtacgtgttccagggcgattcatcgccctgctcggccttcgaattccactgcctgtcaggcgagtgcatccactcgtcatggcgctgcgatggcggaccagactgcaaagacaagtcggacgaggagaattgcgcagtggcgacttgccgccctgacgaattccaatgctcggacggaaactgcattcacggaagccggcaatgcgaccgcgaatatgattgcaaggacatgtcggatgaggtcggctgcgttaacgtgaccctttgcgaagggcctaacaagtttaagtgccattcgggagaatgtattaccctggacaaggtgtgcaatatggcccgagactgccgggactggtccgatgaaccgatcaaggaatgtggaaccgctgaatgccttgacaacaacggtgggtgctcacacgtgtgcaatgacctgaagatcggctacgaatgcctctgcccggacggattccaactcgtggcacaacgccgatgcgaagatattgatgaatgtcaagaccctgacacttgctcccagctctgtgtgaatctcgagggaggctataagtgccaatgtgaagaaggattccagctcgatccgcacactaaggcttgcaaggccgtgggttcgatcgcctacctgtttttcacgaataggcatgaagtccggaagatgactctggaccgcagcgaatatacctccctgataccgaacttgcggaatgtggtggctttggataccgaagtggcatctaatcgaatttactggtccgatttgagccagcgcatgatttgctccacccaactggatagggcgcatggagtgtcctcgtacgacactgtgatctcacgcgacattcaggccccagacggacttgctgtggactggatccactcgaacatctactggaccgattccgtgctgggaacggtcagcgtggccgatacgaaaggagtcaagcgtaagaccctcttcagagagaatggatcaaaaccgcgggcgatcgtggtggatccggtacacggatttatgtattggactgattggggcactccggccaaaatcaagaagggaggattgaacggagtggacatctactccctggtgaccgaaaacatccagtggcctaacggaataaccctcgatctgctgagcggcagactgtactgggtcgactcgaagctgcactcgatcagctcgatcgatgtgaatgggggaaaccggaaaactatccttgaggatgagaaaagactggcgcacccgttttcgctggccgtctttgaagataaggtgttctggactgacatcattaatgaggcaatcttctcagcaaaccgcctcaccggcagcgacgtgaacctgctcgccgagaatctcctttcgccggaagatatggtgttgtttcataacctgacccaaccccgcggcgtgaattggtgcgagcgcaccaccttgtcgaatggaggttgtcaatacctgtgcctcccggctcctcaaatcaacccacattctcctaaattcacctgcgcgtgcccggacgggatgctccttgccagagacatgagatcatgcttgacggaggccgaggccgccgtcgcgactcaggagactagcactgtcagactgaaggtgtcgagcactgccgttcggactcagcacacgaccacccgccctgtcccagacacctcccggctgcccggagcgaccccgggcctcaccacggtggagatcgttactatgtcccaccaggcgctcggagacgtggcaggccggggcaacgagaagaagccatccagcgtgcgcgctctctctatcgtgctgccgatcgtgctgctggtgttcctgtgcttgggcgtgttcctgctgtggaagaattggcggctgaagaacatcaattcaattaacttcgacaatcctgtgtaccagaaaaccactgaagatgaagtgcatatttgccacaaccaggatggctactcatacccaagcaggcagatggtgtccctggaagatgatgtggct

SEQ ID NO: 11263 - DNA, 2580 bp, Artificial Sequence
  derived and/or modified sequence
atggggccctggggatggaagctgcgatggactgttgccctgttgctggccgctgccggaacagctgtaggcgatcgctgtgagcggaacgagtttcagtgtcaagacggtaagtgcatcagttataagtgggtatgtgacggatctgccgagtgtcaggacggatccgacgagtcgcaggaaacatgtttatctgtgacgtgcaaatccggagacttttcctgcggcggtcgggttaatcggtgcattccacaattctggcgctgtgacggtcaggtggactgcgataacggaagcgacgaacaaggctgtccccctaaaacctgcagccaggacgaattcaggtgtcacgatggcaagtgcatctcccggcaattcgtgtgcgattcagatcgagactgtctcgacggctcggacgaggcatcttgtccagtgctcacctgcggtccagctagctttcagtgcaattcctcgacttgtatccctcagctctgggcctgcgataacgacccggactgcgaggacggtagtgatgaatggccccagcgttgtcgaggtctatacgtgttccagggcgacagcagcccgtgcagcgccttcgaattccactgcctctccggggagtgcatccactcctcgtggaggtgcgatggggggccagattgcaaagacaagtctgacgaagagaattgcgctgtggctacctgccgcccagacgaatttcagtgtagtgacggaaattgtatccacggcagtcgccagtgtgatcgcgagtacgactgtaaggatatgagcgacgaggtcggctgcgtcaatgtgactctttgtgagggcccaaataagtttaagtgccattcgggagagtgcatcactctcgataaggtctgcaatatggctagagattgccgggactggagcgacgagccgattaaagaatgcggtacagctgagtgccttgataataacggcggttgtagccacgtatgtaacgacctcaagatcggctatgagtgcctgtgccctgacgggtttcagcttgtcgcacaaaggcggtgcgaagacatcgacgagtgccaggacccagatacttgctctcagctgtgcgtgaatctcgagggtggctacaaatgccagtgtgaagaggggtttcagctcgatcctcacactaaagcatgtaaggccgttgggtcgattgcttatttgttttttactaacaggcatgaagtgcgaaagatgactctcgatcgctccgagtatacttccctgatccccaacttgcgcaacgtggtggccctggatacagaggtcgcctctaatcggatctactggtcggatctctctcagagaatgatatgcagcacccaactcgaccgcgctcacggcgtgtcctcctacgatacagtgatatcccgtgatatccaggcgcccgatggtcttgctgttgactggattcattccaatatctactggaccgacagcgttctcggcactgtgagcgtggccgacaccaaaggcgtgaaacgaaagacgttatttcgcgagaacggtagcaagccaagggccatcgtcgttgatcctgtgcatggcttcatgtattggacggattggggcaccccagccaagattaagaaaggagggctgaacggtgtcgatatctacagccttgtcaccgagaacattcagtggcctaatggcatcacacttgatctcctgtcaggcaggctgtactgggtggactctaagcttcattcaattagtagtattgatgtgaacgggggtaacagaaagacgatccttgaggacgagaaaagactggcacacccttttagtttagccgtgttcgaagataaagtcttctggactgatattatcaacgaggcaatctttagcgccaatcgcctcaccggctctgatgtgaacctcctcgccgaaaacctgttaagtcccgaggacatggtgctgttccacaatttgacacagccacgcggagtgaactggtgcgaacgtactaccctcagcaatggggggtgccagtacctatgcttgcccgctccgcaaataaaccctcattcgcctaagttcacctgtgcctgccccgatggcatgctgctggccagggacatgaggagttgtctgaccgaagcggaggctgccgtagccactcaggaaacctccactgtgcggctaaaagtctcttcaacggctgtgagaacccagcacacaaccacaagacccgttcctgacacatcccgcctgccgggtgctaccccgggattaaccactgtggaaatcgtgaccatgtctcaccaggccttgggagacgtggccggtcggggcaacgaaaaaaagccatcttcagtccgcgccctcagtattgttctgcccatcgtgctcttggtgttcctctgcttgggcgtcttcctgctctggaaaaactggagactgaagaatattaactccataaactttgacaatcccgtttaccagaaaacaactgaggacgaggtgcacatttgtcacaaccaagacggctacagctacccctcacgccagatggtgtcactggaggatgatgtagca

SEQ ID NO: 11264 - DNA, 2580 bp, Artificial Sequence
  derived and/or modified sequence
atgggcccgtggggctggaaacttcgatggactgtggcattgctgctcgctgcagcaggtactgctgtgggtgatcgctgcgaacggaacgaatttcagtgtcaagatggcaagtgcatttcatacaaatgggtctgtgacggttcggcagaatgccaagacggatccgacgaatcccaggaaacctgcctctcagtgacctgtaagtcaggcgacttctcctgcggagggcgcgtcaatagatgcattcctcaattttggcggtgtgatggacaggtggactgtgacaacgggtccgatgaacaaggttgtccccctaagacttgttcgcaggacgaatttcgctgtcacgatgggaagtgcatatcaaggcaatttgtctgtgattcggatagagattgtctcgacggctcggacgaggcatcgtgccctgtgctcacttgtggtcctgcatcgttccagtgtaactcctcgacctgtattccacagctttgggcatgtgataacgatccagattgtgaagatggctcagatgaatggccgcagaggtgtcgcggcctctacgtttttcagggtgactcgagcccgtgttcggcgtttgagtttcattgcctgagcggggaatgtatccactcgtcttggaggtgcgatggagggcctgattgcaaagataaatcagacgaagaaaactgtgcagtggctacttgcagaccagatgagttccagtgttcagatggtaactgcattcacggctcgaggcagtgtgatagggagtacgactgtaaggatatgagcgatgaggtcgggtgtgttaacgtgactctctgcgaaggaccaaacaagtttaagtgccactctggtgaatgcatcaccttggataaggtgtgcaacatggccagagattgtcgggattggtccgatgagccaattaaggaatgtggaactgccgagtgtctggacaacaatggaggatgttcgcatgtgtgtaacgacctcaagatcgggtacgagtgcctgtgccccgatggttttcagcttgtggcacaacgcagatgtgaagatatcgatgaatgtcaggaccctgatacctgttcacaactttgtgtcaatctcgagggaggctacaagtgtcaatgcgaggagggtttccagcttgaccctcacactaaggcatgtaaggcagtcggaagcattgcatacttgttctttactaaccgacacgaggttaggaaaatgactctggatcgatcagaatatactagccttatccccaacctcaggaacgtggtggcacttgatactgaagtggcatcgaatagaatttactggtcagatctcagccaacggatgatatgttcgacccagctggatagagcccacggcgtgtcgtcgtacgacaccgtgatcagcagagacatccaagcccccgacggactcgcagtggactggattcatagcaacatatactggactgacagcgtcctggggaccgtgtccgtggcagatactaagggggtcaagcggaaaactctcttccgggaaaacggcagcaagccgagggccattgtggtggatcctgtgcatggattcatgtactggactgattggggtacccccgctaaaatcaagaaaggaggacttaatggtgtggacatttactccctggtgaccgaaaacattcagtggcctaacggaattactctcgatcttctctccggacgtctttactgggtggattcgaagttgcattcgattagctccattgatgtgaatggtggaaaccgtaagaccatactggaggacgaaaagcgccttgcacatcccttctcactggccgtatttgaagataaggtgttttggaccgacattatcaatgaagcgattttctcggcgaaccgactgaccgggagcgatgtcaaccttctcgcagagaacctgctgtcgcccgaggacatggtgctgtttcacaaccttacccagccccggggtgttaactggtgcgagcgcactaccctttcgaatggcggctgccaatacctgtgtctccctgctcctcaaatcaaccctcacagccccaagtttacctgtgcgtgtccagacggtatgctgctcgcgcgtgatatgcgcagctgcctgactgaagccgaagccgcagtcgccactcaagaaacctctaccgtgagactcaaggtgtccagcactgcggtcaggacccaacacaccactactcgaccagtccctgatacgagccggcttcccggagccaccccagggttgacgaccgtcgagatcgtcaccatgagccaccaagccctgggtgatgtggccggcagggggaatgaaaagaagccctccagcgtgagagcactgtcgattgtcctgccaattgtgcttttggtgtttttgtgcctcggtgtgttcctgctttggaagaactggaggttgaagaatatcaacagcatcaattttgataatccagtgtaccaaaagacgaccgaagatgaggtgcatatatgccacaaccaagatggatactcatacccttcaagacagatggtgtcgctcgaagatgacgtggca

SEQ ID NO: 11265 - DNA, 2580 bp, Artificial Sequence
  derived and/or modified sequence
atgggtccttggggatggaagttgagatggacagtagccctccttcttgccgccgccggtaccgctgttggagacaggtgcgaacgcaatgaatttcaatgtcaggacgggaaatgtatttcctataaatgggtgtgtgacggcagcgccgagtgtcaggacggttcagatgaatcacaggagacctgtttgtctgttacctgtaagagcggtgacttctcatgcggtggcagggtgaatcgatgtataccccagttctggaggtgtgatggccaggtggattgcgacaatggcagtgatgaacagggctgtcccccaaaaacctgctcccaggacgaatttaggtgccatgacggcaagtgcatctcccgccagtttgtgtgcgattctgaccgggactgtctggatggctctgatgaggctagctgccccgtgttgacttgtgggcccgcctcattccaatgcaatagcagcacatgcattccacagctgtgggcctgtgacaacgacccagactgtgaggacggttccgacgagtggccccaacgatgccgcggcctctatgtgtttcagggtgacagttcaccatgtagcgcatttgaatttcactgcttgagcggcgaatgtatacactcttcttggagatgtgatggcgggccagactgtaaggataagagcgatgaggaaaactgcgcagtggccacctgtaggccagatgagttccagtgttccgatgggaattgcatccacggctccaggcagtgtgacagagagtatgattgcaaggacatgtcagatgaggtggggtgcgttaatgtgacactctgcgaagggccaaacaaatttaagtgtcacagtggagaatgtatcacactggataaggtgtgcaacatggctcgggattgcagagactggtctgacgagcccattaaggagtgcggcaccgcggaatgcctggacaacaacggcggttgtagccacgtgtgtaatgacctgaaaataggttacgagtgcctgtgccctgatggatttcaactggtcgcccagcgcagatgtgaagacatcgacgagtgccaggatcctgatacctgtagccagctgtgtgtgaatctggagggcggctataagtgccagtgcgaagagggattccagctcgatcctcacacaaaagcttgcaaggcggtcggatccattgcttacctgtttttcactaatagacacgaagtgaggaagatgacattggataggtccgaatatacttctttgatccctaatctgcgcaacgttgttgccctggacaccgaagtggcatctaaccgcatctactggagtgatctgagtcagcggatgatctgcagcactcagctggatcgagctcacggtgtgtccagctatgacactgtcatatctcgagacatacaagccccggacggcttggctgtcgactggattcatagcaacatctattggaccgacagcgtgctggggacagtgtcagttgcagatactaaaggggtgaaacgcaagacacttttccgcgaaaatggaagcaagccgcgcgccattgtggttgatcctgttcatggattcatgtattggactgactggggtactcctgctaagatcaagaaaggaggcctgaatggtgtagacatctacagtctcgtgaccgagaacatccagtggcccaatgggatcacactggaccttttgtctggccggctttattgggtggattcaaagctccacagtatatcctctattgatgtaaacggaggaaatcggaagacaatcctcgaggacgagaaacggctcgcccatcctttcagccttgcagtgttcgaggacaaagtattctggactgacattattaatgaagcgatcttttccgcgaatcgacttactgggtctgacgtgaaccttcttgccgagaatctgttgtcccccgaggacatggtgcttttccacaacctgacccaaccgcggggggtcaactggtgcgaacggacgacactgtcaaacgggggctgccagtacctttgtctcccagcccctcaaataaaccctcactctcccaagtttacttgtgcgtgtcccgacggtatgctcctggcaagggacatgcggtcctgcctgacagaggctgaagccgccgtggctacccaggaaactagcactgtgcgcttgaaagtcagcagcaccgccgttcgcactcagcacactacaactcgccctgtgcctgatacctccaggctcccgggcgcaacaccgggtctgactaccgttgagatagtgactatgtctcaccaggccctgggcgatgtagccgggcgaggcaacgaaaaaaaaccctcctctgtcagggccctgtctatcgttttgccaattgttcttctggtgttcctgtgtctgggagtgttcctgctctggaaaaactggcgactgaaaaatatcaactctatcaacttcgataaccccgtgtatcagaaaaccacggaggatgaggtgcacatctgccataatcaagatggatactcatatcccagcaggcaaatggtgtcccttgaagacgatgttgcc

SEQ ID NO: 11266 - DNA, 2580 bp, Artificial Sequence
  derived and/or modified sequence
atgggtccatggggctggaagctgcgttggaccgttgcactcctcctggcggcggcaggcaccgcggtgggtgaccggtgcgagcggaacgaatttcaatgtcaagatggcaagtgcatttcatacaaatgggtgtgtgatggatcggcagagtgccaggatggatcagacgagtcgcaagaaacttgtctttcagtcacctgcaaaagcggagatttcagctgtgggggcagggtcaatagatgcattccccagttttggagatgtgatggacaagtggactgcgacaatggatcggatgagcaagggtgtcctccaaagacttgctcccaagacgaatttaggtgccatgatggaaagtgtatttccaggcaatttgtgtgtgatagcgatcgcgactgccttgacgggtcggacgaagcatcatgtccagtgcttacttgtggacctgcctcgtttcaatgcaactcctcaacttgcattccgcagttgtgggcgtgcgacaatgatcccgactgcgaggacggaagcgacgaatggccacaaaggtgtcgagggctctacgtgttccagggggactcatcaccttgctccgcattcgaatttcattgtctttccggagagtgcattcactcgagctggaggtgtgacggaggacctgattgtaaggacaagtcggatgaggagaactgtgccgtggccacctgccgacctgatgagtttcaatgctccgatgggaactgtatccatggatcgagacagtgcgaccgcgaatacgattgcaaggatatgagcgacgaagtgggttgtgtcaacgtgactctgtgtgaaggacctaacaagttcaaatgccattcgggagaatgcattactctggataaggtgtgtaatatggcaagagactgtcgtgactggtccgatgagccaattaaggagtgtggtactgcagaatgccttgacaataacggagggtgctcacatgtgtgcaatgacctcaaaatcggttatgaatgcttgtgcccagacggatttcaactggtcgcccagagaagatgcgaggatatcgacgaatgtcaggatcccgacacttgcagccaattgtgtgtcaacctcgagggagggtacaagtgtcaatgtgaggaaggattccaactggatccacataccaaggcttgtaaggccgttgggtcaattgcatacctctttttcactaacagacacgaggtcagaaagatgacccttgatcgctcggagtacacctctcttattcctaatctgcgtaatgtcgtcgcacttgatacggaggtcgcctcgaaccggatctactggtcagatctctcgcaaagaatgatttgttccactcagctggatcgcgcacatggagtgtcgtcttacgataccgtgatttctcgcgacattcaggcaccagacggactcgcagtcgattggattcattccaatatctactggaccgattcagtcctgggaactgtctccgtggcagacactaaaggagtcaagagaaagaccctctttagagaaaatggctccaagcctcgggccattgtcgtggatcccgtgcatggatttatgtactggaccgactggggcaccccggcaaaaatcaaaaaaggtggccttaacggcgtggacatttactccctggttactgaaaacattcaatggccaaacggcattacgctcgaccttttgtcggggcgtctttactgggtggatagcaagctccattccatttcctccattgatgtcaatggcggaaacagaaagactattttggaggatgagaaacgactggcacatccattttcactggctgtgtttgaggacaaggtgttctggactgatatcatcaatgaagcaatattcagcgcaaacaggctgaccggaagcgacgtcaaccttctcgccgaaaaccttctttcacctgaagatatggtgctgtttcataatcttacccaaccgagaggtgtgaactggtgtgaacgcactactctcagcaatggaggttgccagtacctctgccttcctgcaccgcagataaaccctcattcccctaagtttacttgcgcgtgcccagatggaatgcttcttgcccgcgatatgagatcatgtctcaccgaagccgaggcggcagtggccacccaggaaactagcactgtgcggcttaaggtgtccagcaccgcagtgcggacgcaacataccaccactcgccccgtgcccgatacctccagactccccggcgccaccccagggcttaccaccgtggaaatcgtcaccatgtcgcatcaggcacttggcgatgtggcaggtaggggaaatgagaagaaaccttcgtcggtgagagcccttagcatcgtgcttccaattgtcctcctcgtgtttttgtgtttgggggtgtttcttctgtggaaaaactggcggctgaaaaacatcaattccattaacttcgataatcccgtgtaccagaaaaccaccgaagatgaggtgcacatttgtcacaaccaagacggatacagctacccatccagacaaatggtgtcgctggaagatgacgtcgca

SEQ ID NO: 11267 - DNA, 2580 bp, Artificial Sequence
  derived and/or modified sequence
atggggccatggggatggaagctgagatggactgtggccctcctgctggcggcggcaggtacggcggtgggagatcgatgcgagagaaatgaattccagtgccaagacggaaagtgcatatcttacaagtgggtgtgtgatgggtcggcggaatgccaggacgggtcagacgaaagccaggagacttgtctgtctgtcacttgcaagagcggggacttctcgtgtggcggccgcgtgaatcgctgcatccctcagttttggcgctgcgacggacaggtggactgtgataacggaagcgacgaacaaggttgcccgccgaaaacgtgctcgcaagatgagtttcggtgtcatgatggtaagtgcatttcacgccagttcgtctgcgattcagatagagattgcctggacggatcggatgaagcctcctgcccagtgctgacttgtggaccggcatccttccagtgtaatagctcaacctgtatccctcaactgtgggcatgtgataatgatccagattgcgaggacggctccgacgaatggcctcagagatgccgcggactgtacgtgttccagggagatagcagcccctgctccgcattcgaatttcactgccttagcggcgagtgtatccactcgtcctggagatgcgatggaggaccggactgcaaggataaatccgacgaagaaaactgcgcagtagcgacttgtagacccgacgaattccaatgctcagacggaaactgcatccacggctcgagacagtgcgaccgcgagtacgactgcaaagatatgtcagacgaggtgggatgcgtgaatgtgactctctgcgaaggaccgaataagttcaagtgccactcaggagagtgcatcacccttgataaagtctgcaacatggcccgggactgccgggattggtcagacgaaccaatcaaggagtgcgggactgccgagtgcctggataacaatggaggatgctcgcacgtgtgcaacgacttgaagatcggatacgaatgcctctgccccgacggcttccaacttgtggcacagcgccgatgtgaggacattgacgaatgtcaagatcccgatacctgctcgcaactgtgcgtcaacctcgaaggtggctacaaatgccaatgtgaagagggattccagctcgatccgcataccaaggcctgtaaggccgtgggaagcatcgcatacctgtttttcacgaaccgccacgaagtgcggaaaatgactctcgatcgctcggaatacacttccttgatccctaaccttcggaacgtggtggccctcgacacggaggtggcatccaatcggatctactggtcggacctgtcccaaagaatgatttgctccactcagctggaccgcgcccacggagtgagttcgtacgatacggtgatctcaagagatatccaggccccggacggactcgcggtggactggatccattccaacatctattggaccgattcagtcctgggcacggtgtcagtggccgacactaagggagtcaagagaaaaaccctgttccgcgagaacggttcaaagccgcgagcgatcgtggtggatccggtgcatggcttcatgtactggaccgactggggcaccccggcgaagatcaaaaagggaggcctgaatggtgtcgacatatactccctggtgacggagaacatccagtggccaaacggaattaccctggatctcctttcaggccgcctgtactgggtggactcaaagctccactcgatctcgtcgatcgatgtcaacggaggaaaccgcaaaaccatcctcgaggacgaaaagcgtcttgcgcaccccttctccctggccgttttcgaggataaggtgttctggaccgacatcatcaacgaagctatcttttccgcgaatcgcttgaccgggtcggacgtgaacctcttggccgaaaatctgctgagcccggaagatatggtgttgttccacaatctgactcagccgcgcggcgtgaactggtgtgagagaaccactctgtccaacggagggtgtcagtacctgtgcttgccggctccacagattaacccacactctccgaagttcacttgtgcctgtccggatggaatgctcctggcacgcgacatgcgcagctgcctcaccgaagccgaagcggccgtggcgactcaggagacttcgactgtgagactgaaggtgtcctccaccgcagtgaggacccagcacactactacccgcccggtgccggacacctcgaggctgccaggtgccaccccgggactgaccactgtggagatcgtgactatgtcacaccaggcgctgggtgacgtggcaggccggggcaacgaaaagaaaccatccagcgtgcgcgctctgtcaatcgtgctcccgatcgtcctgttggtgttcctctgtttgggagtgttcctcctgtggaagaattggaggctgaaaaacatcaattccatcaacttcgacaaccctgtctaccaaaaaaccactgaagatgaagtccatatatgccataaccaggacggatactcgtaccctagcagacaaatggtgtccctggaggatgacgtcgca

SEQ ID NO: 11268 - DNA, 2580 bp, Artificial Sequence
  derived and/or modified sequence
atgggaccttgggggtggaagctcagatggactgtggcgctgcttttggcagcagcaggaaccgccgtcggtgaccgttgcgagaggaacgagttccagtgccaagatggtaaatgtatcagctacaagtgggtgtgtgatggatccgccgaatgtcaagatggttcggacgaatcccaagagacttgtcttagcgtgacttgtaagtcgggagacttctcgtgtggaggtagggtgaacaggtgcatcccacagttttggcgctgtgatggtcaggtggattgcgacaatggctccgatgaacaagggtgtcccccgaaaacctgttcgcaagatgaatttcgttgtcatgatggaaagtgtatatcgcggcagtttgtgtgtgatagcgaccgcgactgcctggatggctcggacgaagcatcatgcccagtgcttacctgcggaccagcatccttccagtgcaacagctccacctgcattccacaactctgggcctgtgataatgatccagattgtgaagatggttccgatgagtggccacaacgatgccggggcctctacgtgtttcagggtgattcgtcaccctgttcggcatttgaattccattgtcttagcggagaatgtattcactcaagctggcgttgcgatggtggcccagattgcaaggataagtccgatgaggaaaactgtgccgtggcaacttgtagacccgatgaatttcagtgttccgatggaaactgcattcacggtagccgccaatgtgatcgcgaatacgactgcaaagatatgagcgatgaagtcggatgcgtgaatgtcactttgtgcgaaggcccgaacaaattcaagtgtcattcaggcgagtgtataaccctggataaggtgtgcaatatggccagggattgtagggattggtcagatgaacctattaaggaatgtgggaccgcagaatgtcttgacaataacggcgggtgctcccatgtgtgcaatgatcttaagattggctacgaatgtctttgtcccgatggttttcagctcgtcgcacagaggcgctgtgaggacattgacgaatgtcaggaccctgacacttgttcgcaactttgtgtaaacctggaaggtggatataagtgccagtgtgaagaaggttttcaactggatccacatactaaagcgtgcaaggccgtggggtccatcgcataccttttctttactaacaggcacgaagtcagaaaaatgacgctggatcgctccgaatacacgtcgctgattccaaacctgagaaatgtcgtggccctggatactgaagtcgcatccaatcgcatctactggtccgatctgtctcaaagaatgatttgctcgactcagctggacagagcacatggtgtgtcatcctatgataccgtgatttcgcgcgatattcaggcacctgacggccttgcagtcgattggattcattcaaacatttactggacggactccgtcctcggtaccgtgagcgtggcggatacgaagggtgtgaagcgaaaaacccttttcagagagaacggctcaaagcctcgcgccatcgtggtggatccagtccatggcttcatgtactggaccgactgggggaccccagcaaagatcaagaaaggagggctgaacggtgtggacatctactccctcgtcaccgagaatatccagtggccaaatggtatcaccctggatcttctgtccggccggctgtactgggtggattcgaagttgcattccattagctcgatcgacgtgaacggcggaaacagaaagaccattttggaagatgaaaagagacttgcccacccttttagtctggctgtgtttgaagataaggtgttttggactgacattatcaacgaagcgattttctcggcgaatcgtcttaccggatcggatgtgaacctcttggcagagaatctgctgtcgcccgaggatatggtgctgttccataatctgacccagccaagaggcgtcaattggtgtgaaagaacgactctgtcaaacggcggttgtcaatacctttgtctccccgcgcctcaaatcaatcctcattcgccaaagtttacttgcgcatgcccagacggtatgctgctcgctagggatatgaggtcctgccttaccgaagccgaggctgccgtcgccactcaagaaacctcaaccgtgcgtctcaaggtttcctccacggccgtgaggacccaacacactaccactcgcccggtgcctgatacttcgagacttcctggtgcgacccctggacttactaccgtggaaattgtgactatgtcgcaccaagcactgggtgacgtggcggggagaggcaatgaaaagaagccttcctctgtgcgtgcactgtccattgtcctgcctatcgtcctgctggtctttctttgtctgggagtgtttcttctttggaaaaactggcggttgaagaacattaacagcatcaattttgataacccagtgtaccagaaaaccaccgaagatgaggtgcatatctgtcataaccaggatgggtactcgtatccatcccgccagatggtgtcccttgaggatgacgtcgcc

SEQ ID NO: 11269 - DNA, 2580 bp, Artificial Sequence
  derived and/or modified sequence
atgggcccttgggggtggaaacttcgttggaccgtggcattgttgctggctgcagctggaaccgcagtcggtgacagatgtgaacgaaatgagtttcagtgccaggatggaaaatgcatatcttataagtgggtatgcgatggttctgccgagtgccaggatggtagcgacgaatctcaggaaacttgtctgagcgtgacctgtaagagcggcgattttagctgtgggggacgagtcaatcgctgcatcccacagttctggaggtgcgacgggcaggtggattgtgataacggctctgacgaacaggggtgccctccgaagacatgctctcaagacgaatttcgctgccacgatggaaagtgcatcagccgacagttcgtgtgtgatagtgacagggactgcctcgacgggagtgatgaagcttcctgtcctgtgctgacatgcggtcctgcgtcatttcagtgtaattcgtcaacttgcatccctcagctttgggcttgtgataacgacccggactgcgaggacggcagtgacgagtggccacagaggtgccgtggtttatatgttttccagggagatagtagcccgtgctccgcttttgagttccactgcctttccggagaatgcattcactcctcttggcgctgtgatggcggtcccgattgcaaggacaaatctgacgaggagaactgcgctgtagctacctgccggccggatgaatttcagtgttctgatggaaactgtatccacggcagtcgccaatgcgatagagagtacgactgtaaggatatgtctgatgaggtggggtgcgttaacgtaactctgtgcgagggccctaacaagtttaaatgccattctggggagtgtatcacgttagataaggtgtgtaacatggccagagattgtcgtgactggtccgacgagcccatcaaggaatgcggaaccgcagaatgcctagacaataacggaggctgctcgcacgtgtgtaacgaccttaaaatcgggtacgagtgcctatgcccagacggatttcagctcgtagcccagaggcgttgtgaggatattgacgagtgtcaggatcccgatacctgcagccagctgtgtgtcaatcttgaagggggctataagtgtcagtgtgaagaaggattccagttggatccacacacaaaggcttgcaaggctgtgggttcaatcgcttacctgttttttaccaaccgccacgaggtgcgcaagatgacactcgaccggtctgagtacaccagcttaatcccaaatttgaggaatgttgtcgcactagacaccgaggtagccagtaacagaatttactggtcggacctgagtcagaggatgatctgtagcacacagctagacagggctcacggagtgtcttcttatgataccgtgatttctagagacatccaggcccctgatggcctcgccgttgattggatacactccaatatctattggacagactccgtccttggcactgtgtcagtagcagacaccaagggcgtcaagaggaagactctgttcagggagaacggctctaagcctcgggcaattgtggtggaccctgttcatgggttcatgtactggacggattggggaacgcctgccaagattaaaaaaggcggtctcaatggggtggatatttattccctcgtgacagagaatattcaatggcccaacgggatcacactggacctactatctggacgtttgtactgggtggattccaagctccacagtatttcatctatcgacgttaatggcggaaacagaaagacaattctcgaggacgagaaaaggctcgcccatccttttagtctggccgttttcgaggacaaagtcttctggactgatatcatcaatgaagccatcttctccgccaataggctgactgggtccgacgtaaacttactcgcggaaaatctgctaagtcctgaggatatggtgctgttccataatctcactcagcctagaggggtaaattggtgtgagcgaaccacactaagtaacggcggctgccagtacctctgtctgcccgccccacaaatcaaccctcacagtcccaaattcacatgtgcatgtcccgatgggatgctgctcgcacgggacatgcgatcttgcctgacagaagccgaggcagcggtggccacacaggagacgtccaccgtccgactgaaggtctccagtactgccgtacgcacacagcacacaaccacaaggccagttccggatacctctagactgccaggcgccactcctggccttaccaccgtggaaatcgtgactatgtcacatcaggcactcggcgacgtcgcaggtcggggaaatgagaaaaagccatcatctgtccgagctcttagcattgtcctgccgatcgtacttcttgtgttcctatgcctgggcgttttcctcctgtggaagaactggaggctgaagaacataaatagcattaatttcgataacccggtgtatcagaagaccaccgaggatgaggtgcatatctgtcataaccaagatggctacagctacccttcacggcaaatggtgagcttggaggatgacgtcgca

SEQ ID NO: 11270 - DNA, 2580 bp, Artificial Sequence
  derived and/or modified sequence
atggggccctggggatggaagctccgttggacagtcgccttgcttcttgcggccgccggtactgcagttggggaccgatgcgagcgcaacgagtttcaatgccaggatgggaagtgcatcagctacaaatgggtgtgcgatggcagcgctgaatgtcaggatggttctgacgagtcgcaggagacctgtctctcagttacgtgcaagtccggagatttctcttgcggcggccgtgttaaccggtgcattccccaattctggcgctgtgacggtcaggtcgattgtgataacggaagcgacgaacaaggttgtcctccgaagacctgctcccaggacgagtttagatgccatgacggcaagtgcatctcgcgccaattcgtctgcgactcggaccgcgattgtctcgacggctccgatgaggccagttgccctgtgctgacctgcggtcccgcctccttccagtgcaacagctccacttgcatcccccagctctgggcgtgcgacaacgatccagattgcgaagacggtagcgatgagtggcctcagcgttgtcgcggcctctacgtattccaaggtgactcgtcgccctgctcggccttcgaattccattgtctgtctggggagtgcattcattcatcgtggaggtgtgacgggggtcctgattgcaaggacaagtcggacgaagaaaactgtgccgtcgctacctgcagacctgacgaatttcagtgcagcgacggcaactgtatccatggctccagacagtgcgacagggaatatgactgtaaggatatgagcgatgaggtgggctgcgtgaacgtgaccctgtgcgaaggtcccaacaagtttaagtgccactccggtgagtgtataaccctcgataaggtttgtaacatggctcgtgactgccgcgactggtcggacgagcccatcaaagaatgcggtaccgcggagtgtctggataacaacggtggttgctcccacgtctgtaacgaccttaagattggttacgagtgcctctgtccagatggattccagctagtggcccagaggagatgtgaagacattgatgaatgccaggaccccgatacctgcagccaactttgtgtcaacctggagggtggctacaagtgtcagtgcgaggaaggcttccagttagaccctcacaccaaggcctgtaaagcggtgggttccattgcatacctgttcttcaccaacagacacgaagtgcggaaaatgaccttggatcggagtgaatacacgtctctcatcccgaacctgcgcaacgtggtcgccctcgacaccgaggtcgcctctaaccgcatctactggagtgacttgtcgcagaggatgatctgctcaactcagctggatagagcccatggtgtgagctcgtatgacacggttataagccgcgacattcaggctcctgatgggttggccgtcgactggatccactctaatatttactggaccgattccgtactcggaacggttagtgttgctgacaccaagggagtgaagaggaagaccttgttccgtgaaaacggcagcaagccgcgcgctatcgtggtggaccctgtccatggcttcatgtattggacggactggggtacccccgccaagattaaaaaaggggggctcaacggtgttgacatttactcattggtcaccgagaacattcaatggcccaatggtattaccttagacctcttgtccggtcgcctgtactgggtcgactctaagctgcatagcatctccagcatcgacgtcaacggaggtaaccgcaagactatcttggaagatgagaagcgcttggcgcatccgttttccctggctgtgttcgaggacaaggtcttttggactgatatcatcaacgaggctatctttagcgccaaccggctgacgggctctgatgttaacctcctcgccgagaatctgctctcccccgaggacatggtcctgttccataacctgactcaacccaggggtgtcaactggtgcgagaggaccacgttgtccaacggaggctgccagtacctttgcctgcctgcccctcaaattaacccgcacagccccaagtttacctgtgcctgtccagacggcatgctcctggctcgggatatgcgctcgtgtctgaccgaggctgaagctgccgtggccacccaggagacctcgaccgtgcgtctgaaggtgtcgtcgacggccgtgcggacccagcataccaccacgaggccggttccagacacctccagattgccgggtgctacccctggtttgacgaccgtcgagatcgtaaccatgtcgcaccaggccctcggtgatgtagctggcagaggtaacgagaagaaaccttcgtctgttagagccctttcgattgtcctccctattgtgttgctcgtttttctgtgccttggagtattcctcttgtggaaaaactggcgtctcaagaacatcaacagtatcaattttgacaaccctgtctaccaaaaaactaccgaagacgaggtccacatctgccacaaccaggacggatatagctacccctcccgtcagatggtctcccttgaggacgacgtcgct

SEQ ID NO: 11271 - DNA, 2580 bp, Artificial Sequence
  derived and/or modified sequence
atgggtccctggggctggaagctccggtggactgtggccctgctcttggcagccgcgggaaccgctgtgggggatagatgtgaaagaaatgagtttcaatgtcaggatggcaagtgtatcagctacaaatgggtatgtgacgggtccgcagagtgtcaagatggcagcgatgagtcccaggaaacctgtctttccgtgacttgcaaatccggagacttttcgtgtgggggacgtgtgaatcgctgtattccacaattttggagatgcgatggccaggtggactgtgataatggttcggacgagcaaggttgccctcccaagacctgctcgcaagacgaatttagatgccacgatggaaagtgtatatcaaggcaattcgtctgcgattcggaccgcgactgcctcgatggttcagacgaagcctcgtgtccagtcttgacttgcggccccgcgtcctttcagtgtaactcgtcgacgtgcattcctcagttgtgggcctgtgataacgaccccgactgtgaggacggctcagacgagtggccccaacgttgcagagggctttacgtgttccagggtgattcgtctccatgttcggcatttgagttccactgcttgtccggtgagtgtatacattcaagttggcgctgtgatggaggtccggattgtaaagataagtccgatgaggaaaattgcgcagtagctacctgtagacctgacgaatttcagtgcagcgatgggaattgcattcacggatcgagacaatgcgatagagagtacgattgtaaagacatgtcggacgaagtcgggtgtgtgaacgtcaccctgtgtgagggtccgaataagttcaaatgtcattccggcgaatgcatcactctggataaagtgtgcaacatggcaagagattgtcgggattggtcagacgagcctattaaggaatgtggcacggcggaatgcctggacaacaacggaggttgttcccatgtgtgcaacgacctcaagatcggatacgaatgcctgtgccctgacggtttccaactcgtggcacaaaggcgttgtgaagatattgacgagtgccaggatcctgatacgtgtagccagctttgtgtgaatctcgaaggcggatacaagtgccaatgcgaagaggggtttcaacttgatccccacactaaagcatgtaaagcggttgggtcgatcgcatacctcttctttactaacaggcatgaggtgagaaagatgaccctggatcgcagcgaatacacttcgcttatccctaatctgagaaacgtggttgcgctggataccgaagtcgcgtccaacaggatatactggtccgatctgtcacaaagaatgatttgttccacccagctcgacagagcacatggagtttcctcctacgatactgtcatctcgcgtgacatccaggcacctgatggactggcagtggattggatccacagcaacatttactggaccgattcagtgcttggaacggtgtcagtggccgacaccaagggagtgaagagaaagaccctttttcgtgaaaacggctcgaagcctcgggcgattgtggtcgatcctgttcatggattcatgtactggaccgactgggggacgccagcaaagatcaagaaaggcggcctcaacggtgtggatatctactccctggtgacggaaaacattcaatggccgaacggtatcactcttgacctcttgagcggtcggctttactgggttgactccaagctgcattccatatcttccatcgatgtcaatgggggaaacagaaagaccattctcgaggacgaaaagcgactggcccatccattttcccttgcagtgttcgaagataaagtgttttggactgacattatcaacgaggcaatattctccgccaacaggctgaccgggagcgacgtcaatctgctggcagaaaacctgctctcacctgaagatatggtgctgtttcacaacctcactcagccccggggtgtcaactggtgtgaacggaccaccctgtccaatggtggatgccagtacctgtgccttccggcacctcagattaatcctcattcccctaagtttacctgtgcctgtccggatggtatgctgctggccagggatatgcggtcctgccttactgaagccgaggccgcagtggcgacccaagagacttcaactgtccgccttaaggtgtcatccacggcagtgcgtactcaacataccactacccgcccagtccctgacactagtagattgccaggtgcaacgcccggtctgactactgtggagatcgtgaccatgtcacatcaagccctgggtgatgtggcagggcgcggaaatgaaaagaaaccctcaagcgtcagagctttgtccattgtgctgcctattgtgctcctcgtgtttctttgtctcggtgtctttctgctgtggaagaactggcgcctgaagaacattaactccataaactttgacaaccccgtgtaccaaaagactaccgaggatgaagtgcacatctgtcataatcaggacggatattcctatccttcgagacaaatggtttcccttgaagatgacgtcgca

SEQ ID NO: 11272 - DNA, 2580 bp, Artificial Sequence
  derived and/or modified sequence
atgggaccatggggatggaagctgagatggaccgtggctttgctgctggccgcagcgggaactgctgtgggggatcggtgcgagaggaatgaattccaatgtcaggacggaaagtgcatctcgtataagtgggtctgcgacggttccgcggagtgccaagacggatccgacgagtcacaagaaacttgcctttccgtgacctgcaagtctggtgacttcagctgcgggggacgcgtgaacagatgcataccccagttctggcgctgcgatggccaggtggactgtgacaacgggtcggatgagcagggctgcccccctaagacgtgctcgcaagacgagttcagatgtcacgatggaaaatgcatctcaagacaatttgtgtgtgactcggaccgggactgtctggatggttcagatgaggcatcctgtcctgtccttacctgcggtcctgccagcttccagtgcaattcttccacttgcattccccaattgtgggcctgcgataacgatcctgactgcgaagatggcagcgacgagtggccgcaacgctgcagaggattgtatgtattccagggcgacagcagcccgtgctcggctttcgagttccattgcctgtccggggaatgcatccattcctcatggcggtgcgatgggggtccggactgtaaggacaagagcgacgaagaaaattgtgctgtggcaacctgtcggccggatgagtttcagtgctccgacggaaactgtatccacggatcgcgccagtgcgaccgcgaatacgactgtaaagacatgagcgatgaagtgggatgcgtcaacgtcactctctgtgaagggccgaacaagttcaagtgccactccggagaatgcatcacgctggataaagtatgcaatatggctcgagactgcagggattggtcagacgaacccatcaaagagtgcggaaccgcagagtgcctggacaataacggagggtgctcgcatgtgtgcaatgaccttaagatcggttatgagtgcttgtgcccagacggctttcagctggtcgcacagcgccgatgcgaggacattgacgaatgtcaggacccggatacttgctcgcagctctgtgtgaacctcgaggggggttacaaatgtcagtgcgaggaaggttttcagttggacccgcacactaaggcttgcaaggccgttggaagcattgcttacctgttcttcaccaatcggcatgaggtcagaaagatgacgctggaccgctctgagtacacgtcactgatcccaaacctgaggaatgtggtggcgttggacactgaagttgccagcaatcggatctactggtccgatctgtcgcaaagaatgatttgctccacgcaactcgatcgagcacacggagtgtcatcctacgacaccgtgatctcacgcgacatccaggctccagacgggctcgcagtggactggatccattccaacatatactggactgacagcgtcctgggaaccgtctcggtggcggacaccaaaggcgttaagcgcaagaccctgttccgcgagaacggttcgaagcctcgcgccatcgtcgttgatccagtgcacggattcatgtactggacggattggggcacgcccgcgaaaatcaaaaagggcggactgaacggcgtggacatctacagcctggtgaccgagaatattcagtggccgaacggtatcactttggacctcttgtccggcagactgtactgggtcgattcaaaactccactccatctcgtccatcgacgtgaatggaggcaatagaaagaccatcctggaggacgagaagagactggcccaccccttctcactcgcggttttcgaagataaggtcttttggaccgacatcataaatgaagccattttcagcgccaaccgcttgaccggatccgacgttaacctgcttgccgaaaacctgctgagcccggaagatatggtgctgttccacaacctgacccaaccgcgcggggtgaactggtgtgagagaacgactctgtcgaacggcggttgtcagtatttgtgtctgccggcccctcagatcaatcctcactcaccgaagttcacctgtgcatgccccgacggcatgctgcttgcccgcgacatgcggagctgcctgactgaggcagaggcagctgtggcgacccaagaaacttcaacggtgcgcctgaaagtctcaagtaccgcggtccggactcaacacaccactactcggccagtgcctgatacttcgagactcccaggagccaccccgggactcactaccgtggagatcgtgaccatgtcgcatcaggccctcggagatgttgcgggaaggggcaacgagaagaagccgtcgtcggtgcgcgcactgtccattgtcctgcctatcgtgctgttggtctttctctgtcttggagtgttccttctgtggaagaactggcgcctgaagaacatcaattcgatcaactttgataacccggtctaccagaaaaccaccgaagatgaggtccacatctgtcataaccaggatggttactcatacccgagccgacagatggtgtctttggaagatgatgtggca

SEQ ID NO: 11273 - DNA, 2580 bp, Artificial Sequence
  derived and/or modified sequence
atgggcccatggggttggaagctacggtggacagtagcactgctgctggccgctgccgggactgcagtcggcgatcggtgcgagcgcaacgagttccaatgccaggacgggaagtgcatcagctataaatgggtgtgcgacggcagtgccgaatgtcaggacgggtccgatgaatctcaagagacgtgcctaagcgttacctgcaagtccggtgacttttcctgcggcggcagggtgaataggtgtatccctcagttctggcgttgtgacggacaggtggattgtgataacggaagcgatgagcagggctgtccgcccaagacttgctctcaggacgaatttcgttgccacgatggcaagtgcatctctcggcagttcgtgtgcgattcagatagagattgcttagatggcagtgacgaggcctcctgcccagtgctgacatgtggacctgcatctttccagtgtaattcttctacgtgtatccctcaactttgggcttgtgacaacgacccagattgcgaggacggctccgacgagtggccacagagatgccgaggactttacgtattccaaggagattcctccccatgtagcgcttttgagtttcattgcctgagcggagaatgcatccatagcagttggcgctgtgacggggggcctgattgcaaggataaatctgacgaagagaactgtgcggtcgccacgtgccggcccgatgagttccagtgttccgacgggaactgtattcacggctctaggcaatgcgacagggagtatgattgtaaagacatgtcggacgaagtgggctgtgtgaacgtgacgttgtgtgagggtccaaataagttcaaatgtcatagtggcgagtgtattaccttggataaagtttgcaacatggcccgtgattgcagggactggagtgacgaacccattaaggaatgcggaaccgccgagtgcttagacaataacggcggctgtagtcacgtttgtaacgatcttaagatcggatatgagtgcctttgccccgacgggtttcagctggttgcacagcgccggtgtgaagatatagatgaatgtcaggatcccgatacctgcagccagctttgtgtgaacttagaagggggttacaagtgtcagtgtgaggaaggtttccaactcgacccccatacaaaagcgtgcaaggctgtggggagtattgcttacttgttcttcacaaataggcatgaagttcgtaagatgaccctagataggtccgagtacacaagcttaatacctaatcttagaaacgttgttgctctggacaccgaggtggcatcaaatcgtatctattggagcgacctcagtcagcggatgatctgctctacccagttagatagagctcacggtgtgtccagctatgatactgtaatttctcgggatattcaagctccggacggcttggccgtggattggattcatagcaatatctactggactgacagtgtactgggcaccgtgtcggtagcagacaccaaaggggtgaagcggaagacactttttagggaaaacggttcaaagcccagagctattgtggtggaccctgtgcacggtttcatgtattggacagactggggaactcccgctaagatcaaaaaggggggcctcaatggggtggatatctacagcttggtgacagaaaacattcagtggcctaacgggattacgctggatctgctgagcgggagactatattgggtcgattcaaagctccattcaatctccagtatagacgtcaacggcgggaatcgcaagaccattctagaagacgaaaagcgattagctcaccctttcagcctggccgtttttgaagataaggtgttttggactgatattatcaacgaggcaattttttcagctaatcgcctgactggctccgacgtgaatctccttgccgaaaacctgctaagtcctgaggacatggtcctttttcacaaccttacccaaccaagaggcgtcaactggtgcgagagaactaccctgtcaaacggggggtgtcagtacctctgcctacctgcacctcagataaaccctcattcccctaaatttacctgcgcctgtcctgacgggatgctcctggcccgtgatatgcggagctgccttactgaggctgaagcagcggtggccacacaggagacaagtacagtccgcttaaaagtgagctccacagctgtacggacccagcacactaccacccgccccgtgccggacaccagtcgactgccaggtgccacaccagggctgacaactgtagagattgttactatgagccaccaggcccttggcgatgttgccgggcgtggaaatgagaaaaagccctcttccgttcgtgcgcttagcattgtcctgcctatcgtattgctggtatttttgtgtttgggggtcttcctcctctggaagaactggaggcttaaaaatatcaatagtataaacttcgacaatccagtgtaccagaaaactactgaggacgaggtccatatctgtcacaaccaggacgggtacagttatccctctcgacaaatggtcagtctggaggatgacgtggcc

SEQ ID NO: 11274 - DNA, 2580 bp, Artificial Sequence
  derived and/or modified sequence
atgggtccttggggctggaagcttcgctggaccgtcgcactgctgttggccgctgctggcactgccgtcggggatcgttgcgagagaaatgagttccaatgccaggacggtaagtgtatctcctataagtgggtttgtgatgggagcgcagagtgccaagacggtagcgatgagtctcaggaaacctgtctgagcgtcacctgcaagagcggagactttagctgcggcggtagggttaaccgctgcattccgcaattttggcggtgcgatggacaagtcgactgcgataacggctccgacgaacaaggctgccctccgaagacctgctctcaggacgaattcaggtgccatgatggaaaatgcatcagccggcagttcgtgtgtgattcggaccgcgattgccttgatggtagcgatgaagcctcttgccctgtcctgacctgcggaccagcgtcgtttcagtgtaatagctcgacttgtattccgcaactgtgggcctgcgacaacgacccagactgtgaggatggatccgacgaatggcctcagaggtgcaggggtctgtatgtgttccagggggactccagcccttgttctgcctttgaatttcactgcctgagcggggagtgtatccatagcagctggcgctgcgacggaggtccagattgcaaagataaaagcgacgaagagaactgtgcggtggcaacctgccgtcctgatgagtttcagtgtagcgacggtaattgtatccacggtagccgtcaatgcgaccgggaatacgactgtaaggatatgagcgacgaagtcggctgtgtgaatgtgactttatgcgagggccccaacaagtttaagtgccactccggagaatgcattactcttgataaagtgtgtaatatggcccgagactgtcgcgactggagcgacgaaccgattaaggagtgtgggaccaacgcatgcctcgacaacaacgggggttgtagccacgtatgcaacgatttaaaaattggctatgagtgtctgtgccctgatgggtttcaactggttgcgcagcgccgctgtgaggatatcgacgaatgccaggatcctgacacgtgttctcaactctgtgtgaacctcgagggaggttataaatgccagtgtgaggagggcttccaactggaccctcatacgaaggcgtgtaaagccgttggtagcattgcttacttgttcttcaccaaccgccatgaggtcaggaaaatgacactggatcgttctgaatacacctcgctgatccctaatttacgtaatgtagtggccctggacacagaagtcgcgtcaaacaggatctactggtcagatctgtctcagcgtatgatttgcagtacccagttggatagagcccatggcgtaagcagctatgataccgttatctcccgcgatatccaggcacctgatgggctggcggtcgactggatccattctaatatttattggacagactctgtgctgggaacggtcagtgtggccgatactaagggcgtgaagcgtaaaacgttgttccgtgagaatggctccaaacctcgtgcaattgtcgtcgaccctgttcacggttttatgtactggaccgactggggtaccccagctaagattaaaaagggtggcctgaatggcgtggacatctatagcctagttaccgagaacatccaatggcctaacggcattaccttggatctgctgtctggtcgcctgtattgggtcgattctaaattgcatagcataagcagtatcgatgttaatggcggcaatcggaagaccatcctggaggacgagaagcgtttggcccatccattttcattggcagtgtttgaagacaaagtgttctggaccgatatcattaacgaagctatcttcagcgccaataggttaaccggcagcgacgtgaacctgttggcagagaacctgctgagcccagaggacatggtgctgttccacaatctgacacaaccgcgcggcgtcaactggtgtgaacgcactacactgagcaatggcggctgccagtacctgtgcttgccggccccgcagataaacccacacagccctaagtttacatgtgcatgtccggatggaatgctcctggcgagggatatgcgctcatgtctgaccgaagcagaagcggcggtggcgacccaggaaacgtcaaccgttcgcctgaaggtttcttcaaccgcggtgcggactcagcatacgacgaccaggccggtaccggatacaagccgtctgccgggggcaacaccaggtttgaccaccgtggaaatcgtgacgatgagccaccaggctctgggcgacgtcgcgggaaggggtaatgagaaaaagcctagctccgtccgcgccttaagtattgtcttaccaatcgtgttacttgtgtttctttgcctgggcgtgtttctgctgtggaaaaattggaggctgaaaaacataaacagcatcaattttgataatccggtatatcagaaaactacggaagacgaggtgcacatttgtcacaaccaggacggatactcttacccaagtcgccagatggtgagtctggaagacgacgtggca

SEQ ID NO: 11275 - DNA, 2580 bp, Artificial Sequence
  derived and/or modified sequence
atgggcccatggggctggaaactgaggtggacagtggccctgcttttggccgcggccggtactgccgttggggaccgctgcgagcggaacgagttccaatgtcaggatggcaagtgtatttcctataagtgggtgtgcgacggttcagcagaatgccaggatggatccgatgaaagtcaggaaacgtgtctatctgtgacttgtaagagcggagacttctcatgtggaggacgtgtgaaccgatgcattcctcaattttggcggtgcgacggacaggtggattgcgataatggaagtgacgaacagggctgcccacccaaaacctgcagtcaggacgaattccggtgccatgacggaaaatgtatatccaggcagtttgtatgtgactcggatcgcgattgtctcgatggctcagacgaggcatcatgtccagtcttaacttgcgggccagcttcctttcagtgtaattcctccacgtgcatcccacagctctgggcgtgcgataacgatcctgactgcgaagatggctccgacgaatggccgcagcgctgccgcggcttgtacgtgtttcagggggatagctccccatgcagtgcgttcgaattccactgcctgtccggagaatgtattcactcatcctggcgctgcgatggcggccccgactgcaaagataagtcagatgaggaaaattgcgcggttgcgacctgcaggcccgacgagtttcaatgttctgacggaaattgcatccacggttcccgccaatgtgatcgtgagtacgactgcaaggatatgtccgacgaagtgggttgtgtgaacgtcaccctttgtgagggccctaataagttcaaatgtcattctggcgagtgcattactctggacaaagtgtgcaacatggcccgggactgcagagactggtctgacgagccaattaaagagtgcggtacgaacgcctgcctggacaataatggggggtgctcccacgtgtgcaacgacttaaagatcgggtatgagtgcctgtgtccggacgggtttcagcttgttgcacagcgcagatgcgaggatattgatgaatgtcaggaccccgacacctgctcacaattgtgtgtgaatcttgagggcgggtacaagtgtcaatgtgaagaaggctttcagttggatcctcacactaaagcatgtaaggcggttggcagcattgcctatctcttttttactaatcggcatgaggttcgaaagatgacgctcgacagatctgagtacacgagcctgattcctaacctgcgaaacgtggtggctctggatacagaggtcgcctctaacaggatctactggtccgacctctcccagcggatgatatgctcaactcagctcgacagggcccacggggtgtccagttacgacacggtcatctcgcgggacattcaggcacctgatgggctggccgtcgactggatccatagtaatatttactggacagatagcgtactgggcacagtgtccgtggcagacacaaaaggggtcaaaaggaaaaccctgttccgcgaaaatgggagcaagcctcgcgcaatcgtcgttgatcctgtacatggattcatgtattggaccgattggggaactccggcaaagatcaagaaaggagggttaaacggcgtcgatatttattcactggtcactgaaaatatccaatggcccaatggaatcaccttggacctactgtctggccggctttactgggtcgattccaagttgcattccatcagcagtatagacgtcaacggtggcaaccggaagacaatactggaagacgagaaaaggctggctcatcctttcagcttggctgtgtttgaggacaaagttttctggacagacatcataaatgaggcaatattctcagcaaaccgccttactggatccgatgtgaatctgctggccgagaacttactgtcccctgaagatatggtcctttttcacaacctgactcagcccaggggcgtcaactggtgtgagcgcaccactttgagtaacggaggttgccaatatctgtgtcttcctgcacctcagattaatccccattctccaaaatttacctgtgcatgcccagacgggatgctacttgcgcgcgacatgagaagttgcctgactgaggccgaggccgccgtagccacccaggagacgagcaccgtgcggctcaaagtgtcgtctacagctgtccggactcagcataccactacaagacctgtgcccgatacatcgcgcctgcctggcgcaacccccggcctgaccactgttgaaatcgtgaccatgagccatcaggctttgggagacgtggccgggcggggcaacgaaaagaagccctccagcgtgcgcgccttatccatcgtcttgccgatcgtcctgcttgtgtttctgtgcctgggtgtgtttttgttgtggaagaactggcggcttaagaatataaactcgataaacttcgacaaccctgtgtaccagaagactaccgaggacgaagtgcatatttgccacaatcaggacgggtactcctatccgtcccggcagatggtatccctggaggacgatgtggct

SEQ ID NO: 11276 - DNA, 2580 bp, Artificial Sequence
  derived and/or modified sequence
atgggcccctggggatggaaactgcgctggactgtggcattgctcctcgccgcggccggtaccgcggtcggagatagatgtgagaggaacgaatttcagtgtcaagatggaaagtgcatctcctacaagtgggtctgcgatgggtccgctgaatgtcaagacggaagcgatgaatcccaagaaacctgtcttagcgtgacttgtaagtcgggagacttctcctgtggcggaagagtgaaccggtgtatcccccagttttggagatgtgatggccaagtcgattgcgataacggatcggatgaacaaggatgccctccaaagacgtgttcacaagacgagttccgctgtcatgatggcaaatgtatttcgaggcaattcgtctgtgacagcgacagagactgtttggatggttcggatgaagcatcgtgtccagttctcacctgtggtccagcctcgtttcaatgcaactcatcgacctgtatccctcaattgtgggcatgcgataacgaccccgattgtgaagatggttccgacgaatggcctcagagatgtagaggactttacgtgttccagggtgattcctcgccatgctcagcatttgagttccattgcttgtcgggtgaatgtattcattcgtcttggcgatgtgatggaggaccagattgcaaagataagagcgatgaagaaaactgcgcagtcgccacctgccgacctgatgagtttcagtgttcagatggcaactgtattcatggatcgcgtcagtgtgatagagaatacgattgtaaggatatgagcgacgaggtgggctgtgtgaacgtgaccctgtgtgaaggacctaacaaattcaagtgccactccggtgaatgcatcacccttgataaggtgtgcaacatggctcgcgattgccgagattggtccgatgaacctatcaaagaatgtggaactaacgcgtgtctggacaataacggtggatgttcgcacgtgtgtaatgatcttaagattggatatgaatgcttgtgtcctgacgggtttcaacttgtggcgcagcgccgttgtgaagatattgatgagtgccaggatccggatacttgttcgcaactttgtgtgaacctggaaggtggttacaagtgccaatgcgaagagggctttcagttggatcctcatactaaagcatgcaaggccgtcggatccattgcttatctgtttttcaccaacagacatgaagtgagaaagatgactctggatcgcagcgaatatactagccttatccccaatcttcgaaacgtggtggccctcgataccgaagtggcatccaaccgcatttactggtccgatctgagccaacggatgatttgcagcacccaacttgaccgggcacatggagtgagctcctacgataccgtcatctcgcgtgacatacaggcccctgacgggcttgcggtggactggattcattccaacatatactggaccgactccgtccttggaaccgtttcagtggctgacactaagggggtgaagaggaaaaccctctttcgggagaatggctcgaagccacgcgcgattgtggtggatccagttcacggatttatgtactggactgactggggaactccggcaaagattaagaaaggcggtctgaatggtgtcgacatatactcgctggtgaccgagaatatacaatggcctaatggcattaccttggacctgctctcagggcggctgtactgggtcgactccaagctccatagcattagctcgatagacgtcaacggcggtaaccggaaaaccattcttgaagatgagaagcggctggcacacccattctccctggcagtgtttgaggataaagtcttttggacggacataatcaatgaagcgatctttagcgccaatcggctgacgggatcggacgtgaaccttctggctgagaatctgctttcgcctgaagatatggtgctgtttcataatctgactcaacctagaggtgtcaactggtgcgagagaactaccctttccaacggcggttgtcaatacctttgccttcctgcaccacagattaatccccatagccctaaattcacttgtgcttgtcctgatggtatgctgcttgcacgggacatgagatcgtgtcttaccgaggccgaggcagcagtggccactcaagaaaccagtaccgtcagactgaaagtgtcatcaaccgcagtgaggacccaacataccaccacgcgcccggtgcctgatactagcagattgcctggggcaacgcctggacttactaccgtcgaaatcgttactatgagccatcaagcgcttggagatgtggccgggagaggcaacgagaaaaagccatcatctgtccgcgcattgtccatcgtgctgcctatcgtgcttctcgtctttctgtgtcttggtgtctttctgctctggaagaactggcggctcaagaacattaactctatcaatttcgacaaccccgtgtaccaaaagaccaccgaagatgaggtccatatctgtcataatcaagacggatactcgtacccttcccggcaaatggtgtctctcgaagatgatgtggcg

SEQ ID NO: 11277 - DNA, 2580 bp, Artificial Sequence
  derived and/or modified sequence
atgggaccctggggttggaagctgcggtggactgtggcactgctcttggccgcagcagggactgccgtgggagatcggtgtgaacggaatgagtttcagtgtcaagacggaaagtgcatctcctacaagtgggtgtgcgatggtagcgcagaatgtcaggatggttcggacgaatcacaggaaacgtgtctctccgtgacctgtaagtccggcgacttttcctgtggaggaagggtgaacagatgtatacctcagttttggcgatgtgacgggcaagtggattgcgataatggatcagacgaacaaggatgcccccctaaaacttgttcgcaggatgaatttaggtgtcatgatggaaaatgtatttcgcggcaattcgtgtgcgattcggatagggattgtctcgacggttccgatgaagcatcctgccctgtgcttacctgtggcccagcatccttccaatgcaatagctccacctgtattccacagctttgggcatgtgacaatgatccagactgcgaggacggctccgatgagtggccacaaagatgtcgggggctgtacgtgttccaaggagattcgtcgccctgtagcgcattcgaatttcattgcctgtcgggcgagtgtatccattcatcgtggcgctgtgatgggggaccagactgtaaagataaaagcgatgaggagaattgtgccgtggcaacttgccgacctgatgagttccaatgttcagatggaaactgtattcatggttcaagacagtgtgatcgtgaatacgattgtaaggatatgtctgatgaagtgggatgtgtgaacgtcactttgtgtgagggtccgaataagtttaagtgccattcaggagaatgcataaccctcgataaagtctgtaatatggcgcgtgattgcagagattggtccgacgaaccgatcaaggagtgtggcaccaacgcctgtctcgacaacaacggaggctgttcccatgtctgcaatgatcttaagattggatacgaatgtctgtgcccggacggatttcaactcgttgcccaacgcagatgcgaagatattgatgaatgtcaagatcctgacacttgctcgcagctgtgtgtcaacctggaaggcggttacaagtgccagtgtgaagagggatttcaacttgatccccataccaaggcatgtaaggcagtcggctcgattgcatacctcttctttaccaaccgccacgaggtcagaaagatgactctcgataggtcagaatacacgtccctgatccctaacctgagaaacgtcgtggctctcgatactgaggtggcgtcgaaccgcatatactggagcgatctgtctcaaagaatgatctgttctactcaacttgatcgcgcacatggagtgtcgtcgtacgataccgtgatttcgagggacattcaagcacctgacggacttgcagtggactggattcattctaacatatactggaccgactccgtgcttggtaccgtgtcagtcgctgacaccaagggtgtaaaaaggaaaaccctcttcagggagaatggttcgaagccaagagcaatagtcgtggatcctgtgcatggttttatgtactggactgattggggaacccctgcaaagattaagaagggaggtctgaacggagtggacatctattccctcgtcacggaaaacattcagtggcctaatgggatcacgcttgacctgctttcgggacgcctttactgggtggattcgaaactgcattcgatctcctcaatcgacgtgaacggcggaaacaggaaaactatattggaagatgaaaaacgactggcccaccctttttccctcgccgtgtttgaggataaggttttttggactgacatcattaacgaagcgatcttttccgcaaacagattgactggatcggacgtgaaccttctcgccgaaaatctgctgtccccagaagatatggtcctctttcacaaccttacccagccacgcggggtcaattggtgcgaacggaccactctctcgaatggggggtgccaatacctgtgtctgcctgcgccacagatcaaccctcatagccctaagttcacctgtgcatgtccagatggaatgctgctcgcccgtgatatgcggtcatgccttaccgaagcagaagcagcagtcgcaacccaggaaacctcgactgtccgccttaaggtcagctccactgctgtgaggacccagcatactaccactagacccgtgccagatacttcacgccttcctggagcaaccccaggtcttaccaccgtcgagatcgtgaccatgtcacatcaagcactcggagacgtggccgggagggggaatgagaagaagccttcaagcgtgagagccctgagcattgtccttccaatagtccttcttgtgtttctgtgtctgggtgtgttccttctgtggaagaattggcgtctgaagaacatcaattcaatcaattttgacaaccctgtgtaccaaaagacgactgaagatgaggtgcacatttgtcataatcaggatgggtactcctacccttccagacagatggtgtccctcgaggacgacgtggcg

SEQ ID NO: 11278 - DNA, 2580 bp, Artificial Sequence
  derived and/or modified sequence
atgggcccatgggggtggaagctgaggtggacggtagcattgctccttgcagccgccggcactgccgtgggcgatagatgcgagcgaaacgaattccagtgccaggatgggaaatgtatttcgtacaaatgggtctgtgacggatcagccgagtgccaagacgggtctgatgaatcacaagagacgtgcctgtcagtaacatgcaagagcggtgatttctcctgcggcggcagggtgaaccgctgtataccccagttctggaggtgtgacggacaagtggattgcgacaatggctctgacgaacaagggtgtcctcctaagacctgctcccaggacgaatttcgctgccatgatgggaagtgcattagccggcagttcgtttgtgattcggacagagattgtctggatggttcagacgaggcatcctgcccggtgctgacttgtggtccagctagtttccagtgcaattcctccacatgtatcccccaactctgggcgtgtgacaatgacccagattgtgaggacggaagcgacgaatggcctcaacgatgccggggcctgtacgtgttccaaggcgactcatccccgtgttcggcctttgagtttcattgtctatcaggcgagtgcatccacagttcgtggaggtgtgacggcggcccagactgtaaggataagagcgacgaagaaaactgcgccgtcgctacttgcaggccggatgaatttcagtgctctgatggaaactgcattcacgggtcgagacagtgcgacagagagtacgattgtaaggacatgtccgatgaagtgggctgcgtaaatgtcacattgtgcgagggaccaaataagttcaaatgccacagtggagaatgtattaccctggacaaggtttgtaatatggctagggattgtcgggactggtccgacgaacctattaaggagtgcgggacaaacgcttgcctcgacaataacggcggatgtagtcacgtctgcaacgacctcaaaattgggtacgagtgtttgtgcccagacgggtttcagctcgtggcccagaggcggtgtgaagatatcgacgaatgccaggatcctgacacctgtagccagctatgtgttaacctggaaggaggttacaagtgtcagtgtgaagagggctttcaactggaccctcacactaaggcctgcaaagccgtggggtctatagcctatctgttctttaccaatcggcacgaggttaggaagatgaccctcgataggtccgagtacacttctctgatcccaaaccttaggaacgtggtggcactggacactgaagtcgcaagcaataggatctactggagtgatcttagtcagcggatgatttgtagtacccagctggaccgggcgcatggcgtctccagctacgatactgtgattagtagggacatccaggctcccgacggactcgccgtggactggatccactcgaatatctactggacagatagcgtgcttggcactgtgagcgtcgccgatactaagggagtgaaacggaagaccttatttcgcgaaaacgggtctaaaccgcgtgctatagtggtcgatccagttcatggatttatgtattggacagactggggcaccccagccaagattaaaaagggcggtctgaatggcgttgacatctattctcttgtcaccgagaacatacaatggcctaatgggattacgttggatctgttgagtggaaggctttattgggttgattccaagttgcactctattagctcaatcgacgtaaacggagggaatcggaagaccatactcgaggacgagaaacgacttgcccatccttttagccttgcagtgttcgaggataaggtgttttggactgacatcataaacgaggccatcttctctgccaacaggttgactgggtccgatgttaacctgctggctgaaaacctgttgtctcccgaggatatggtcctgttccacaacctcacccagccgcgcggggtgaactggtgcgaacgtaccactctgtcaaatggcggatgtcaatatctgtgtctaccagcgccccagattaatccccactctcccaaattcacttgtgcgtgtcctgatggcatgctgctcgcgcgggatatgcgctcttgtctgacagaggccgaagccgcagttgctactcaagaaacatcgaccgtgagactgaaagtgagctccacagcagtgagaacgcagcacactaccacaagacccgtgcccgacacctcacgactcccgggggccacacccggcctcactacagttgagatagtcactatgagtcaccaagctctgggagacgtggcgggacgggggaatgagaaaaagccatccagtgttcgtgcactgtctatagtgctgccaatagtcctgctcgtgttcctgtgtctgggtgtcttcctcctttggaagaattggcgactcaaaaatattaactcaatcaattttgacaatcccgtctatcagaaaacaaccgaggacgaggttcatatctgtcataatcaggatggctactcctacccctccaggcagatggtttccctcgaagacgacgtcgcc

SEQ ID NO: 11279 - DNA, 2580 bp, Artificial Sequence
  derived and/or modified sequence
atgggaccatggggttggaagttgcgttggacggtggccctcctccttgcagcggcggggacggcggtgggtgaccgctgcgagagaaatgaattccagtgccaagatggtaagtgtatctcgtacaagtgggtctgtgatggatccgcagaatgccaggacggctcagacgaatcgcaagagacttgtctgagcgtcacttgcaaatctggagacttttcatgtgggggaagggtgaatcggtgcattccacagttttggcggtgtgacggtcaagtcgattgtgacaatggatccgatgaacaagggtgtccaccaaagacttgttcccaagatgaattcagatgccatgacggaaagtgtatttccagacagttcgtttgtgactctgaccgggattgtcttgatggcagcgacgaagcaagctgtcctgtgcttacgtgtggtcctgccagctttcagtgtaactcgtcgacctgtattccccagctctgggcttgtgataatgatcccgattgtgaagatggctcggatgagtggccacagcgctgtaggggcctttacgtgtttcagggtgactcgagcccatgttcagcattcgagttccattgcctttccggcgagtgtatacattcctcctggaggtgtgatggtggccctgactgtaaagataaatccgacgaggaaaactgcgcggtggccacttgcaggcctgacgaatttcaatgttcagacggcaattgtatccatggatcgcgtcaatgcgatagagaatatgattgtaaggatatgtccgatgaagttggatgtgtgaacgtgactttgtgcgaaggacctaacaagtttaagtgtcatagcggggagtgcataactttggacaaggtgtgcaatatggcaagagactgccgtgattggtccgatgagcccattaaagaatgcggtaccaatgcgtgtctcgacaacaacggtggatgttcgcatgtgtgcaatgacctgaaaattggatacgaatgcctgtgccccgacggatttcagcttgtggcgcagcggcgctgcgaggatatcgatgagtgtcaagatcctgatacgtgtagccagttgtgtgtgaacctcgagggtggatacaagtgtcagtgtgaggaaggattccaacttgacccgcatactaaggcttgtaaagcagtgggaagcattgcttacctctttttcacgaaccggcacgaagtccgcaagatgactctcgacagatcggaatacacgagccttattccgaatctccggaacgtggtggccctggataccgaagtcgcgtcgaacagaatctactggagcgatctgagccagcggatgatatgttcgacgcaactggacagagcacacggagtctcatcctacgacactgtgatcagccgagatattcaagcacccgatggattggcagtggactggattcactcgaatatctactggaccgacagcgtgcttggaactgtgtcggtggcagataccaagggcgtgaagcgaaagaccctttttagagaaaatggctccaaacctcgtgcgattgtcgtggaccccgtccatggtttcatgtactggactgactggggtactcctgcaaagatcaagaaggggggactgaacggtgtggatatctactcccttgtgactgaaaacattcagtggcccaatggtattaccttggacctgctcagcggccgcctgtactgggtggactccaagctccattcgatctcttcgatagacgtgaacggaggtaatcgtaaaactattctcgaggacgaaaagcgtctcgcacatccattttcactggcagtgttcgaagataaggtgttttggactgacattatcaacgaagcgatcttttctgcgaacaggctgactggaagcgatgtcaatttgcttgctgagaacctcctctcgccagaggatatggtattgtttcataacctcacccagcctaggggggtgaactggtgtgaaaggactaccctgtccaacgggggatgtcaatacctctgcctgccagcacctcagattaacccccatagcccaaaattcacttgcgcatgccctgatggaatgcttcttgcaagagatatgcggtcatgtcttaccgaagcagaggcagctgtggcgacccaagaaacctccactgtgcgcctgaaagtgtcatccaccgcagtgagaacgcagcacactacgacccggccagtgccagatacttcgcgcctgccaggagcgactccagggctgaccactgtggagatcgtgactatgtcacatcaggcactgggggacgtcgcgggtagggggaacgaaaagaagccttcgtccgtgagagcactctcgatcgttcttccaatagtgcttctggtgtttctgtgcctcggcgtctttctgctttggaagaactggcgactcaaaaacattaactccattaactttgataacccagtgtaccaaaaaaccaccgaggacgaggtccatatttgtcacaatcaggatggttacagttacccttccagacaaatggtgtcactggaggatgatgtggca

SEQ ID NO: 11280 - DNA, 2580 bp, Artificial Sequence
  derived and/or modified sequence
atgggcccctgggggtggaagcttcgttggacggtagctctgctgctggcagcagcaggcacagctgtcggggatcgctgcgagcggaatgagttccaatgtcaggatggcaagtgcatctcctacaagtgggtgtgcgacgggtccgcggagtgtcaggacggttctgatgagtctcaggaaacatgtctgagtgtgacatgtaagtcaggggacttttcttgcggtggcagagtaaatagatgcatacctcagttctggcgctgcgacggacaggtggattgtgacaacgggagtgatgaacaaggatgtccgccgaaaacatgttcccaggacgaatttcgatgtcacgatggcaagtgcatctctaggcagttcgtgtgcgattccgatcgcgattgcctggacggctccgacgaggcaagttgccctgtgcttacatgcggtccagcctcctttcagtgcaactccagtacttgcattccgcagctctgggcctgtgataatgatccagattgtgaggatggctccgacgagtggcctcagaggtgtagaggcctgtatgtcttccagggggattcttcaccatgttccgcttttgagtttcactgcctgtcaggcgagtgcatacattcatcttggcgatgcgacggcggcccggattgtaaggacaagtctgacgaggaaaattgcgctgttgccacctgtcgacccgatgagttccagtgttcagacggaaactgtatccacggctccagacagtgtgatcgggaatatgattgtaaagacatgagcgatgaagtcggatgcgtcaatgtcactctatgcgagggtcctaacaagtttaaatgccatagcggagaatgcatcaccctcgacaaggtctgcaatatggccagagattgccgggattggtccgatgagccgataaaggagtgtgggaccaacgcgtgcctggacaacaacggcggctgcagtcacgtctgcaacgacttgaaaatcgggtatgaatgtttgtgcccagacggctttcaactcgtcgcacagaggagatgtgaggacatagatgagtgccaggacccagacacctgcagccaactgtgcgtgaacctcgagggtggctataagtgccagtgcgaggaaggttttcagcttgacccccatacaaaagcctgcaaggcagtcggctcaatcgcctatcttttttttactaaccgtcatgaggtccgtaagatgaccctggatcggtcagagtatacctcactgataccaaacttacgcaatgttgtggcacttgacacggaggttgctagtaatcgcatatactggtcagatctgtctcaacgcatgatctgtagtactcagctggaccgtgctcatggagtgtccagctatgacacggtaatcagccgggatatccaggcccccgacgggcttgccgtggactggatccactctaatatctattggaccgactccgttctcggaacagtcagcgtggctgacacgaagggagtgaagaggaaaacactgtttcgggaaaatggctcaaagccacgggctatcgtggtggatcccgtgcatggcttcatgtactggactgactggggaacacctgctaagataaagaagggcgggctgaacggagtcgatatatatagcctagtcactgagaatattcagtggccgaacggaatcactctcgatctgcttagcggtagattgtattgggtggactccaaattgcactctatcagctccatcgacgttaacgggggcaacagaaagaccattttagaggacgaaaagcgactcgctcaccctttcagcctggcagtattcgaggacaaggtgttttggactgatattatcaacgaagcaattttctccgccaacaggttgacaggcagtgacgttaacctcctagccgagaaccttctctcccctgaagatatggtgctgtttcataacctgacccaacccaggggcgtaaactggtgtgaacgcactacgctgagcaatggcgggtgtcaatacctatgcctgccagccccccagataaaccctcattcaccaaaatttacatgcgcctgtcctgatggcatgctcctcgctagagacatgagatcgtgccttaccgaagccgaagcggcagtggctacgcaggagactagcacagttaggttgaaagtctctagcacagctgtcagaacacagcatacaactacccggcccgtccctgatacgtccagattgccaggggccacgccaggcttgaccaccgttgaaattgtgactatgagccaccaggcgctcggagatgtcgccggaagaggcaacgaaaagaaaccttcgtctgttcgagcactcagcatcgttctgcccatcgtgctgctggtgtttctatgcctgggcgtgttcttgttatggaagaattggagactgaagaacatcaactctatcaacttcgacaaccccgtgtatcagaaaacgaccgaagatgaagtccatatctgccataaccaggacggttactcgtacccttccaggcagatggtgagcctggaagatgacgtggca

SEQ ID NO: 11281 - DNA, 2580 bp, Artificial Sequence
  derived and/or modified sequence
atgggaccatggggctggaaactcagatggaccgtggcgcttctgcttgccgcggcaggaactgccgtcggcgaccgctgcgaacgcaacgagttccagtgtcaagacggtaagtgtatctcgtataagtgggtgtgcgatggtagcgctgaatgccaagatggatccgacgaatcccaggagacttgcctgtcggttacttgcaagtctggagatttcagctgcggaggccgcgtgaatcggtgtattccccagttctggagatgcgatggacaggtagactgcgacaacggctccgatgagcaggggtgcccacctaagacctgctcacaagacgagttcagatgccacgacggcaagtgtatctcccgacagtttgtgtgcgactcagaccgggattgcctggacggctcggacgaggcttcctgccccgtgcttacctgtggacctgcgagcttccaatgtaattcctcgacttgtataccccagctgtgggcttgcgacaatgacccggactgcgaagatggatcagacgaatggccgcagaggtgccggggactgtacgtgttccagggtgattcttcaccgtgctccgcttttgaatttcactgcctgtcaggggagtgtattcactcctcatggcgctgcgacggaggacctgactgcaaagataagtccgacgaagagaactgtgccgtggccacctgccggcccgatgaatttcaatgttccgacggaaattgcatccacggaagtcggcagtgcgaccgcgagtacgactgcaaggatatgagtgacgaggtgggctgcgtgaacgtgactctgtgcgaaggtccaaataagttcaaatgccacagcggcgaatgcattactctggataaggtgtgtaatatggcacgggactgccgcgactggtcggatgagccgattaaagaatgcggaactaatgcttgcctggacaacaatgggggctgcagccatgtctgcaacgatctgaaaatcggctatgaatgtttgtgtcctgatggatttcagctggtggctcagcggcgctgtgaagatatcgacgaatgtcaggatcccgatacctgtagccagctctgcgtgaacctcgaaggcggatacaaatgccagtgcgaagaggggtttcagctcgatccgcatactaaggcctgcaaggctgtgggatccatcgcctacctgttctttaccaaccggcatgaagtgcgcaaaatgactctcgacagatccgaatacaccagcctgatcccgaatctgaggaatgtcgtcgcattggacaccgaagtggcgtccaacagaatctactggtcggatttgtcccaaaggatgatctgtagcactcagttggatcgcgctcacggcgtgtcgtcatacgacaccgtgatctcgcgggacattcaagcccccgacggactggcggtggattggatccattcgaacatctactggaccgattcggtccttggaactgtgtcagtggcagataccaaaggcgtgaagagaaagacgctgttccgcgagaatggctcgaaaccaagggcgatcgtggtcgacccagtgcacggattcatgtactggaccgactgggggactcccgcaaagattaagaagggcggactcaatggcgttgatatctactcactggtcactgagaacattcagtggcctaacggtattactttggatctgctcagcgggcgtctctactgggtggactccaagctgcactcaatctcgagcatcgacgtgaacggaggcaaccggaaaactatactggaggacgaaaagcggttggcccatccattctctctcgccgtattcgaggataaggtgttctggactgatatcatcaacgaagccatcttttccgcgaaccgccttaccggaagcgacgtcaacctgctcgctgagaacctcctgtcgccagaggacatggtcctgttccacaatctcacccaacctcgcggggtcaactggtgtgaacgcaccacgctgtccaacggtggctgtcagtacctgtgcctcccggcacctcaaatcaacccgcactctccgaagtttacctgcgcctgtccggacggaatgttgttggcaagagatatgcgctcctgcctgactgaagcggaagccgccgtcgccactcaggagactagcacggtccgcttgaaagtgtcctcgactgcggtcagaactcaacacaccaccacgaggccggtgcctgatacgtcccgcttgcccggggcaactccgggattgaccactgtggaaattgtgactatgtcacatcaagcactcggcgacgtcgcaggacgggggaacgaaaagaagccatcctccgtgcgagccctgtccatcgtgctcccaatcgtcctgcttgtgttcctttgcttgggagtgtttttgctttggaaaaactggcgcctgaagaacatcaattccatcaattttgacaatcctgtctaccaaaaaactacggaggacgaagtccatatctgtcataaccaggacggatactcgtaccctagtcgccagatggttagcctggaggatgatgtggct

SEQ ID NO: 11282 - DNA, 2580 bp, Artificial Sequence
  derived and/or modified sequence
atgggaccctggggctggaaactacggtggacagtagccctgctcctagccgcagcaggaacagcagttggagatcgctgcgaaaggaacgaatttcagtgccaagatgggaagtgcatctcctacaagtgggtatgtgacgggtcagctgagtgtcaggatggaagtgacgaaagccaggagacatgtctgtcagtgacttgcaagtccggagatttctcatgtggcggccgagtcaacagatgtatcccacagttttggcggtgtgatggccaggttgactgcgataacggaagtgatgaacaaggatgtccaccaaaaacgtgttctcaggatgagtttcggtgtcacgacggcaaatgcatttcccgacaattcgtgtgcgactccgatcgagactgcttagacgggagtgatgaagccagttgtcctgtgcttacctgcgggcccgccagtttccagtgtaatagcagcacatgtattccccagttgtgggcgtgcgacaacgatcccgattgcgaagacggatccgacgagtggccccagcggtgccgcggcctatacgtctttcagggggattcatccccttgctcagcctttgagttccattgcctgagcggcgaatgtatccactcttcgtggcggtgtgatggtggacctgattgtaaggacaaaagtgatgaggagaattgtgcggttgccacctgcaggcctgatgaattccaatgctcagatggaaactgtattcacggatcgcggcaatgtgatagagagtatgattgcaaagatatgtctgacgaggtcgggtgtgtgaatgtcaccctgtgcgagggtcccaataagttcaagtgtcacagcggtgagtgcataaccctggataaagtgtgcaatatggcccgagattgcagagactggtccgatgaaccgatcaaggaatgcgggacaaatgcttgcctggacaataatggagggtgcagccatgtgtgcaatgatctgaagatcggctacgagtgcttatgtccagacggctttcagctggtcgctcaaagaaggtgtgaagatatcgacgaatgtcaggatcccgacacttgtagtcagctgtgcgtgaacctcgagggcggatataagtgccagtgtgaggaggggtttcaactcgatccccacactaaggcctgcaaagcagtcgggtccattgcctatctgttcttcacaaaccgacacgaggtcagaaagatgaccctggacaggtccgagtacacttctttaattcctaacctgcgtaacgtggtggccctggatacagaggttgcttctaatcggatttactggagtgacttatcacagaggatgatttgtagcactcaactggatcgagctcatggtgtttcttcttatgataccgtgatatcccgggacatccaggcccccgacgggcttgccgtggattggatccattctaatatttattggaccgactctgtgctcgggacagtgtccgtggctgacacaaagggtgtcaagagaaagaccttgttccgagaaaacggtagcaagccacgggccattgtcgtggatcccgttcacggcttcatgtactggaccgactgggggactcctgcaaagataaaaaagggcggcctgaacggagttgacatctacagtctggtcacagagaacatacaatggccaaacggaatcaccctggatttactgagcgggcggctgtattgggtcgactccaagcttcatagtatcagctccatagacgtgaacggtgggaaccgcaagaccatacttgaggacgaaaagcggttggcgcaccctttttccctggctgtattcgaggacaaagtcttctggaccgatattataaacgaggccattttcagcgccaatcggctgaccggaagcgacgtgaaccttttagccgagaacctgttgagcccagaggatatggttctcttccacaacctgacccagccaagaggggtgaactggtgcgaaagaactaccctgtcaaacggcgggtgtcagtacctgtgcctccctgctcctcagatcaacccgcattcgccgaagttcacttgtgcctgccccgatggcatgctgctcgcacgggacatgcggtcctgcttaactgaggccgaggccgcagtcgctacacaggagacctcaaccgtgcggttaaaagtcagttctactgcagtgcggacccagcatacaacgacacgcccagtgccagacaccagcagacttcccggagctactcctggactgaccaccgtagaaatagtgacaatgtcacaccaggcccttggggacgtggcgggccggggaaatgagaaaaagccttccagtgtccgggcactcagtatcgtcctgcctatcgtcctcctcgtctttttatgcctcggcgtgttcctgttgtggaagaactggcggctgaagaatatcaatagtataaatttcgataatcccgtgtaccagaaaaccacggaggatgaggttcatatctgtcacaaccaggatggatacagctaccctagtagacaaatggtctctctggaagacgatgtggcc

SEQ ID NO: 11283 - DNA, 2580 bp, Artificial Sequence
  derived and/or modified sequence
atgggaccgtggggatggaaactgcgatggaccgtcgcactgttgctggcagcggcaggtacggcggtgggcgaccggtgcgaaaggaacgagttccagtgtcaagatgggaagtgcattagttacaaatgggtctgcgacgggtccgcagaatgtcaggatggctccgatgagtcccaggaaacctgtctgtcggtcacctgcaaatccggagacttctcgtgcggtggacgcgtgaacagatgtatccctcagttctggagatgcgatgggcaagtggattgtgataacggaagcgacgaacaaggatgccctcccaagacttgtagccaagatgagttccgatgccatgacggcaagtgcatctcacggcagttcgtctgcgattcggatagagattgcctggacggatccgacgaagcctcctgcccggttctgacctgcggcccggcgtcgtttcagtgcaactccagcacctgcatcccgcagttgtgggcgtgtgacaatgatccggactgcgaggacggatctgacgaatggccgcagagatgtcggggactctacgtgtttcagggcgattcctccccctgcagcgctttcgagttccactgcctgtcaggggagtgcatccactcgagctggcgctgcgacggaggcccggactgtaaggacaagtctgatgaggaaaattgcgctgtggcaacctgccggccggacgaattccagtgcagcgacggaaattgcatacatggatcccgccaatgcgatcgggaatacgactgcaaggatatgagcgacgaagtcggatgcgtgaacgttactctttgcgagggacctaataagtttaaatgtcattcgggggaatgcatcaccctcgataaggtctgcaatatggcacgcgactgccgcgactggtcagacgaacccatcaaagagtgcggcaccaacgcttgcctcgacaataacggaggatgctcccacgtctgcaacgaccttaaaatcggttacgagtgtctgtgcccggacggattccagctggtcgcccaacgcaggtgcgaggacatcgacgagtgtcaggacccagacacctgctcacaactgtgtgtgaacctggagggcggttacaagtgtcaatgtgaggaagggttccaactcgatccacacactaaggcttgcaaggccgtgggatcgattgcatacttgtttttcactaatcggcacgaagtgcggaaaatgaccttggaccgcagtgaatacacctccctgattccgaatctccggaacgtcgtggctctggacactgaagtcgcctcgaacaggatctactggagcgatctgagccagcgcatgatctgctcgactcagctggatcgggcgcacggtgtgtccagctatgacaccgtcatcagccgggacatccaggcccccgatggactggccgtggattggattcattcgaatatttattggaccgatagcgtgctcggcaccgtatcagtggctgataccaagggagtgaagcgtaagacccttttccgcgaaaacggttccaagccacgggcgatcgtcgtcgacccagtgcatggctttatgtactggacggactggggaactcctgccaaaatcaagaagggaggcctgaacggcgtggatatctacagcctcgtgactgaaaacatccagtggccaaacggaatcactcttgacctcctctcaggcagactgtactgggtggattctaagttgcattcgatttcgtcaatcgacgtgaatggaggaaatcgcaagaccatcctggaggacgaaaaacggctcgcccatccgttctcgttggccgtgttcgaggacaaggtgttttggactgatatcatcaacgaagccatcttctcggcgaatagattgaccggatcggacgtcaacctgctggccgagaacctgctctcaccggaggacatggtcctgttccataatctgactcagccgaggggggtgaactggtgcgaacgcactacgctgtcgaacgggggttgccaatacctttgccttcctgccccacagatcaaccctcactcgccaaagttcacctgtgcttgtcccgatgggatgctgctcgccagagatatgagatcgtgtctcaccgaagccgaggcagccgtggctacgcaggaaacttccactgtgcgtctcaaggtatcaagcactgcagttagaactcagcacaccactactcgcccggtgccggacactagccgcctccctggtgcgactccaggcctgacgaccgtggagatcgtcacgatgtcccaccaggcgctgggagacgtcgccggccgcggaaatgaaaagaaaccaagctcggtgagggcgctgtcaatcgtgctgccgattgtgcttttggtgtttctctgcctgggagtgttcctgctctggaaaaactggcggctgaagaacatcaactccatcaacttcgataaccctgtttaccaaaagaccaccgaagatgaagtgcacatctgccacaatcaagacggctactcatacccatcacgccaaatggtgtccctcgaggacgacgtggcc

SEQ ID NO: 11284 - DNA, 2580 bp, Artificial Sequence
  derived and/or modified sequence
atggggccatggggatggaagctgcgatggaccgtggctctgttgctagccgccgcggggactgctgtgggagacagatgcgaacggaacgagtttcagtgccaggatggcaagtgcatctcctacaagtgggtgtgcgatggttcagctgagtgccaggatgggagcgacgaatcccaggaaacctgcctctccgtcacttgcaagtccggggatttctcctgtggtggcagagttaacagatgcatacctcaattttggcggtgtgacggacaagtggattgtgacaatggctctgatgagcagggttgcccccccaagacttgtagccaagatgaatttcgatgccacgacggcaaatgcatttcgcggcagttcgtttgtgattcggacagagactgcctggacgggtctgatgaagcgagctgtcctgtcctaacctgcggccccgcatcctttcagtgcaatagctccacctgcataccacaattgtgggcatgtgataatgatcccgactgtgaagacggatccgatgaatggccacagcgttgtagggggctgtatgtctttcagggtgacagtagcccgtgttcggcctttgagttccactgtctgtctggcgaatgtatccactcatcctggcggtgcgacggaggaccagattgtaaggacaaatccgacgaggagaattgtgctgtggccacctgccgcccggacgaattccaatgctcagacggcaactgcatccatggatcccgtcaatgtgatagggagtacgattgcaaagatatgagcgacgaagtgggatgcgtgaatgtaaccctttgcgaaggccccaacaaattcaagtgccatagcggagaatgcatcactctcgataaggtgtgcaacatggcccgggattgtagagactggagcgacgagccaatcaaggaatgtggaacaaatgcctgtctggataataacggaggatgctcacatgtctgcaatgatctgaaaattggctacgaatgcctctgcccagacggctttcaactggtggcgcagagaagatgcgaggatattgacgagtgccaagatcctgacacctgctcacagttgtgcgtcaaccttgagggcgggtataagtgtcaatgtgaagaggggtttcagctggatccccacactaaagcctgcaaagcggttgggtccatcgcatacctcttctttactaatcgacacgaagtccgcaaaatgacactcgaccggagtgaatatacaagcctgattcctaatctacgaaatgtggttgcactcgatacggaggttgcatctaaccgcatatattggtccgatttgtcccaaaggatgatctgcagcacgcaactggatcgggctcatggtgtgtcatcctacgacacagtcatctccagggacatccaagccccggatggccttgccgtggactggatacatagcaacatttattggactgattccgtactagggacggtgtctgttgcagacaccaagggggtaaagcgaaaaaccctattccgagagaatgggtctaagcctagggcgatcgtggtcgaccctgtacacgggttcatgtactggactgactggggtaccccagccaagatcaagaaggggggactcaacggcgtcgacatctatagcctagttaccgaaaacatacagtggcctaatgggataactcttgacctgttgtctggtagactgtactgggtggacagtaagctccattctataagctccatagatgtgaatggcggcaaccggaagactatcctcgaggacgaaaagcggttggcccatccctttagtctcgctgttttcgaggacaaggttttctggactgacatcattaacgaagcgattttttcagccaatcgcctgacggggtccgatgtgaaccttttggctgaaaacctcctttctcctgaagatatggtactctttcacaatctgacgcagcctagaggcgtcaattggtgtgaacgtaccaccttaagcaacgggggatgccagtatctgtgcttacctgcaccgcaaatcaacccacactcacccaagttcacctgcgcttgtccagacggaatgctgttggctcgagacatgcgtagttgcctgacggaggccgaagcggccgtggcaacccaggaaactagcactgtccgcctcaaggtcagcagcaccgcagtgagaacacagcatacgaccactcgaccagtgcccgatacgtcgcggttacctggggccacaccgggtctgaccacggtggagattgtgacaatgtcccaccaagccctcggtgatgtggctggtcgcggtaatgagaagaaaccatctagcgttagggccttgagcattgtactccctattgtactcctggtgttcctgtgtctcggggtttttctactttggaagaactggcggttgaagaatattaattccattaactttgacaatcccgtgtatcagaaaaccactgaagatgaagtccacatttgtcataaccaggacggttattcctacccatcccggcagatggtgtcgctggaggacgacgtcgct

SEQ ID NO: 11285 - DNA, 2580 bp, Artificial Sequence
  derived and/or modified sequence
atgggtccctggggttggaagctcaggtggaccgtggcactgctccttgccgccgcgggtactgccgtgggtgatcgctgtgaaagaaacgaatttcagtgccaggacggaaagtgtatctcatataagtgggtctgcgacggaagcgctgaatgtcaagatggttcagacgaatcacaggagacctgcctcagcgtgacttgcaaaagtggtgacttcagttgtggaggtagggtaaaccgctgtattccacagttttggagatgcgatggacaggtggattgcgacaatggatctgatgagcaaggttgcccccccaaaacgtgctcccaggatgaattccgctgccacgacggtaagtgtatcagtaggcagttcgtgtgtgactccgaccgcgactgtctcgacggctctgacgaggcctcttgtccggttctgacatgtggccctgcttctttccagtgtaattcatctacctgcattccccaactctgggcctgtgacaacgatccagactgtgaggatggcagcgatgagtggcctcagagatgcagaggactctacgtattccaaggagactcctccccgtgcagtgcatttgaatttcactgcctgtccggcgaatgtattcattcttcttggaggtgcgacggtggcccagattgcaaagacaaatccgacgaggaaaattgtgccgtcgcaacgtgccgccctgatgaatttcagtgctcagatggcaactgcatccacggaagtaggcagtgcgacagggaatacgactgcaaggacatgagcgatgaggtcggctgcgttaatgtaacattgtgtgaaggtcctaacaagtttaaatgccacagtggcgaatgtatcaccctggacaaagtttgtaacatggcgcgcgactgcagagattggtccgacgagcctataaaagagtgcggcaccaatgcctgcctggataataacggaggttgtagccatgtgtgtaatgacctgaagatcggatacgagtgcctgtgtcccgacggttttcagctcgtcgcccagcgccgctgtgaagacatcgatgaatgccaagaccctgatacgtgctcacaactctgtgtgaacttggagggtggttacaaatgccaatgtgaggaaggcttccagttggacccccacactaaagcctgtaaggccgtgggctcaatcgcttacttgttctttactaatagacatgaggtgaggaagatgacactcgaccgcagcgagtacacgtccttgatacccaatctgaggaatgtcgtcgctctcgacactgaagtggcatcaaaccgcatatactggtccgatctgagccaaagaatgatttgcagtacgcaactggaccgcgctcacggagtgtcaagctacgatacagtcattagccgcgatattcaagcacctgacggcctggccgtggactggattcattctaacatttattggaccgacagcgtgctcggcacggtcagtgtggccgatacaaagggtgtgaagagaaagacgcttttcagagagaacggctcaaagccacgcgctatcgttgtggaccccgtgcatggcttcatgtactggaccgactggggcacacccgccaagatcaaaaagggaggactcaatggcgtggacatttactctctggtgactgagaacatccaatggcctaatggcataaccctggatctcctttccggaagactgtattgggttgattctaaactgcactcaatcagcagcatcgacgtcaacggtggtaacaggaagactattctcgaggacgaaaaaagactcgcgcaccccttcagcctcgctgtcttcgaagataaggtattttggaccgatatcatcaacgaggctatcttttccgccaaccgcttgacaggttcagatgtgaacctgctggcagagaacctgctgtcccctgaggacatggtcctgttccacaacctgacccaacctagaggtgtgaattggtgcgaaaggaccacccttagcaatggaggctgtcagtacctgtgcctgcctgcccctcagatcaacccccattcacctaagtttacgtgcgcctgcccagacggtatgctgttggcaagggatatgagatcatgcctgactgaggctgaagcagccgtggccacgcaggagacctccaccgtacgcctgaaggtttctagcaccgcagtgaggacacagcataccactactaggcctgtcccagacaccagtagattgcctggagccacgcccggccttactactgtggagattgtgacaatgtcccatcaagccctgggagacgtggccggcagaggtaatgaaaagaagccttcttccgtgagggccctgagtattgtattgccgatcgttctgttggtgtttctgtgccttggcgtgttcctcttgtggaagaactggagactgaagaacatcaacagtattaacttcgataacccggtctaccagaaaaccaccgaggacgaagtgcacatttgccataaccaggatggatacagctacccctctagacaaatggtctcacttgaagacgatgtagcc

SEQ ID NO: 11286 - DNA, 2580 bp, Artificial Sequence
  derived and/or modified sequence
atgggtccttggggatggaaactgcggtggactgtggcactgctgctcgctgcggctgggacggcagtgggggatagatgtgagcgcaatgaatttcagtgccaggacggaaagtgtatctcatacaaatgggtctgtgatggctctgcggaatgccaagacggaagcgacgagtctcaggagacatgtctttctgtcacctgtaagagcggcgacttcagctgtggcggtagagtcaaccgctgtattccacagttttggcgatgtgatggccaggtagattgcgacaacggttctgacgaacaaggttgtccaccaaagacatgttcccaggacgaattcaggtgtcacgacggaaaatgtatttcacggcagttcgtatgtgatagtgatagggattgcctggacggcagtgacgaggctagctgtcctgtgctgacttgtggccccgccagctttcaatgtaattcatccacctgcatcccacagttgtgggcatgcgacaatgatcctgactgtgaggatggatccgatgagtggccacagagatgtcggggactgtacgtgtttcagggcgactccagcccttgttctgcattcgagtttcactgtctgtcaggagagtgcatacatagttcatggaggtgtgatggaggtccagactgcaaagataaatccgacgaggagaattgcgcagtagccacttgccgccccgacgaattccagtgtagtgacgggaactgtattcatggctcaagacagtgtgaccgcgagtatgattgcaaggatatgagtgatgaggtcggctgcgttaatgtcacactctgcgagggacccaacaaatttaagtgtcattccggcgagtgtatcacgctcgataaagtgtgtaatatggcccgagactgccgggattggagtgacgagcctattaaggagtgcggaactaatgcttgtctggacaataatggtggctgtagtcacgtatgtaatgatctgaaaatcggttatgagtgtctgtgccccgacggttttcagctggtggcacagcggaggtgcgaggacatcgacgagtgccaagatcctgatacatgcagccaattgtgcgtcaatctggaaggtggctacaagtgccaatgtgaagaggggttccagcttgacccccataccaaggcctgcaaagccgtgggctctatcgcctatctcttctttacaaatcggcacgaggtgcggaagatgactttggatcggtctgagtacactagcctgattcccaatctccgaaatgtggtagcacttgatactgaagtggcgagtaatcgcatctattggtctgacctgtcccaacgcatgatttgtagcacgcagttggatcgcgcgcacggcgtctcatcctatgataccgtgataagccgagatatccaagctcctgatggtctggcagtagactggatccatagcaacatttattggaccgactcagtcttggggaccgtgtcagtggctgataccaagggagtgaagaggaagactctgttccgagagaacggctcaaaaccaagagccatcgtcgtcgatcctgtgcacgggtttatgtactggacagattgggggaccccagcaaagattaagaagggggggctgaacggggtcgacatctatagcctcgtaacagaaaacatccagtggccaaacggaattaccctggatctcctgtctggtcgactttattgggtagattctaagttgcacagcatcagctcaatcgatgtcaacggcggtaacaggaagactatcctggaagatgagaaacgcctcgcacatcccttcagtcttgcagttttcgaagataaggtgttttggaccgacattataaacgaggccatcttcagtgcgaacagacttactggctcagacgtgaatctcttggccgagaacctgctgtctcctgaggacatggtgctcttccacaacctcactcagccgagaggtgtaaactggtgcgaaaggacaaccctgagcaacgggggctgtcaatatctgtgtctgccagctccccagatcaacccacattcccccaagttcacctgcgcctgccccgacggtatgctcctggctagagatatgaggtcttgcctgacagaggcagaagccgccgttgcaacgcaggagacctccaccgtgcggctgaaagtatcatccaccgccgtaagaactcagcacactactaccagaccggtccccgacacctccaggctgccaggagccacacctgggctgacaaccgtggaaatcgtgacaatgagccatcaagctctgggggacgtcgccgggagagggaacgagaaaaaaccctcctccgtgcgagccctgagcatagtgttgcccattgtgttgctggtgtttttgtgtctgggagtctttttgctctggaagaactggcggctgaagaatatcaatagtatcaacttcgacaaccccgtctaccagaagaccacagaagacgaggttcatatctgtcacaatcaggacggttatagctatccctctagacagatggtgagcttggaggacgatgtggct

SEQ ID NO: 11287 - DNA, 2580 bp, Artificial Sequence
  derived and/or modified sequence
atgggaccgtggggctggaaattgcggtggaccgtggccctgctgcttgcggcagcgggaaccgcggtgggcgaccggtgtgagaggaatgaattccaatgccaggatggaaaatgcatctcgtacaagtgggtgtgtgacggatccgccgaatgccaagatggaagcgacgaatcgcaggagacttgtttgtcggtgacttgtaagtcgggcgacttctcgtgcggcgggcgcgtcaaccggtgcatcccccagttttggcggtgcgacgggcaagtggactgtgataacggtagcgacgagcaaggctgcccacccaagacttgctcgcaagacgagtttaggtgccacgatggcaagtgcatctcgagacaattcgtgtgtgatagcgaccgcgactgcctggatggctcagacgaggcttcctgcccagtgcttacttgtggcccagccagcttccaatgcaattcctctacctgcatcccgcaactctgggcgtgcgacaacgacccggactgcgaagatggatccgatgaatggccccagcggtgcaggggtctgtacgtgttccaaggagactcctcgccatgctcggcattcgagttccattgtctttccggcgagtgtatccactcatcgtggcgctgtgacggaggaccggattgtaaggacaagagcgacgaggaaaactgcgccgttgcgacttgtcggccggatgaattccagtgttccgatgggaactgcatccacggctcgaggcaatgcgaccgcgagtacgattgtaaggatatgtcggatgaagtgggatgcgtgaatgtgaccctgtgcgaaggtcctaacaagttcaaatgtcattcaggagaatgtattacccttgataaagtgtgcaacatggctcgtgattgtcgggattggtcggacgaacccatcaaagaatgcggcaccaacgcctgtctcgacaacaacggaggatgttcacatgtgtgcaacgacctgaaaatcggctacgagtgcctgtgcccagacggattccaactggttgcccagcgccgctgcgaggatattgacgaatgtcaggacccggatacttgctcccaactgtgtgtcaatctcgagggcggttacaagtgtcagtgcgaggaaggcttccagctggaccctcataccaaagcctgcaaggctgtcggctccatcgcatacctcttctttactaaccggcacgaggtcagaaagatgacccttgataggtcagagtatacttccctgatcccaaacctcagaaacgtggtggcactggatactgaggtggcgagcaatagaatctattggagcgatctgtcccagcgcatgatctgttcgactcagctcgatcgcgcccacggagtgtcctcttacgacactgtgatttcccgtgatatccaggcgccagatggactcgccgtcgactggatacactccaacatctattggactgactccgtgctgggcactgtgagcgtggccgataccaagggagtgaagcgtaagaccctgttccgggaaaatggctccaagccacgggctatcgtggtcgacccggtgcacggattcatgtactggaccgactggggaacgccggcgaagatcaagaaaggagggcttaacggagtggacatctactcgcttgtcaccgagaacatccagtggccaaatggtattacgctggatctgctgtcaggacgcctgtactgggtagattcgaagctgcattcgatttcatccatcgacgtgaacgggggcaaccgcaagaccatcctggaggatgagaaaagactcgcacaccccttctcactggcagtgtttgaggataaggtgttctggaccgacatcatcaacgaagccatcttttctgcgaacaggttgactggtagcgatgtgaacctgctggccgaaaatctgctttcacccgaggacatggtgctgttccacaatctgactcaaccgaggggagtcaattggtgcgaacggacgaccttgagcaacggaggttgtcaatacctctgccttccggcaccgcagattaatcctcactcgccgaagttcacctgcgcttgtccggatggaatgctgcttgcaagggacatgcggagctgtctgaccgaggccgaagcagccgtggcgacgcaggaaacttcgactgtgcggctgaaggtgtcaagtaccgctgtgcgcactcaacataccacgacccgcccggttcctgacactagccggctccccggagctactccaggactcaccacggtggaaatcgtgaccatgtcccaccaggctctgggcgatgtggccggacgcggcaacgaaaagaaaccttcatcagtgagagccctgtccatcgtgcttccgatcgtcctcctcgtgttcctttgcctgggagtctttctcctctggaagaactggagactgaagaatatcaattcaattaactttgacaacccggtgtaccagaaaaccaccgaggacgaagtgcatatctgccacaaccaggatggctactcgtacccatcccgccaaatggtgtcactggaggacgatgtggcc

SEQ ID NO: 11288 - DNA, 2580 bp, Artificial Sequence
  derived and/or modified sequence
atggggccgtggggctggaaacttagatggacagttgctctcttgcttgctgccgcgggtacggctgtgggggataggtgtgaaaggaacgaattccaatgtcaggacggaaagtgcatcagttataagtgggtctgcgacggttcagctgaatgccaggacggaagtgacgaaagccaggaaacctgcctttccgttacttgcaagagcggagacttcagctgcggaggcagggtgaaccgctgcatcccacagttttggcgatgtgacggccaagtggactgcgacaacggcagcgacgagcagggctgccctcctaaaacttgttctcaggatgaatttagatgccacgatggcaagtgcatcagcagacagtttgtatgcgactccgatagagattgccttgatggctcagacgaagcaagttgcccggtgttgacctgtggtcctgccagcttccaatgcaactctagcacatgcatcccacagctgtgggcatgcgacaacgatcccgattgtgaggatggcagtgacgagtggccccagaggtgtaggggactatacgtgtttcagggagacagctctccatgtagcgctttcgaattccattgtttgtctggtgagtgtatccatagctcgtggagatgcgatggtggaccggattgcaaagataaaagcgatgaggagaactgtgctgttgccacatgcagaccagatgagtttcagtgctctgacggtaactgtatccacggttcaaggcagtgtgatcgcgagtatgattgtaaagatatgtctgatgaagtgggatgtgtcaacgttaccctgtgtgagggccccaataagtttaaatgccattcaggcgagtgtatcaccctggataaagtttgtaatatggcacgtgattgtagggactggtccgatgaacccattaaggagtgtggcaccaacgcatgcttggacaacaacggaggctgctctcacgtatgtaacgaccttaagatcggttatgaatgtctgtgccccgacggcttccagcttgtcgctcagaggaggtgtgaggacatcgatgagtgccaggatccagatacatgcagccagctgtgcgttaacttggagggagggtacaaatgtcagtgtgaggaaggatttcaactcgaccctcacacaaaggcttgcaaagctgtcggaagcatcgcctacctgttcttcactaataggcacgaagtcaggaaaatgacattggatagaagtgagtacaccagtctgatcccaaatctgaggaacgttgtggcactggacacagaggtcgcaagtaacagaatttactggagtgatctgagccaaaggatgatatgctctacccagctggatagggcccatggggtgtcatcatacgacacggttatatcccgcgacattcaagccccggatgggcttgcggtagactggatccactctaacatctactggactgatagcgttctgggcacagtaagcgtggccgatacaaagggagtgaagaggaagaccctgtttagagagaatggaagcaagcctcgggcgatcgtagtggacccggtgcatgggttcatgtactggaccgactggggcacaccagcgaagataaagaagggcggacttaacggcgtggacatttacagtctggtgaccgagaatattcaatggcccaacggcataacgctcgatctcctgagcggaaggttgtattgggtggacagtaagctgcattctatatccagcattgatgttaacggcggaaatcgcaagaccattctggaagacgagaaaaggctcgctcatccttttagcctcgctgtgtttgaagacaaggtgttttggacagacatcatcaacgaggcgatctttagcgcgaaccgactcaccggatccgacgtgaacctcttggccgagaatttgttgtctcctgaggatatggtcctgttccataacttgacccaaccacggggcgtcaattggtgtgagcgcacaaccctgagcaacgggggctgccagtatctgtgtcttcctgctcctcaaattaatccacactcacccaagttcacgtgtgcctgccccgatggcatgctcttggcaagggatatgaggagctgccttacagaggcagaagccgcagtagccacacaagagacaagcaccgtcaggctgaaggtgtcatcgaccgcggtgagaacccagcatactactactaggcctgtcccagacacaagcaggctccccggggctaccccggggttaacaacagtggagatcgtcaccatgtcacaccaagctttgggcgacgtggcgggaaggggcaacgaaaagaagccaagctccgttcgtgcactgagcatcgtgcttcctatcgtgctgttggtttttctttgcctgggcgttttcctgctgtggaagaactggagactgaagaacattaacagcatcaacttcgacaaccccgtgtatcaaaaaacaaccgaagatgaagtgcatatctgtcacaaccaggacggttactcataccccagcaggcaaatggtttccctggaggacgacgttgcc

SEQ ID NO: 11289 - DNA, 2580 bp, Artificial Sequence
  derived and/or modified sequence
atgggcccgtgggggtggaagctccggtggactgtggcactcttgcttgccgccgcaggaacggccgtgggagatcggtgtgaacgcaacgagttccaatgccaggatggaaagtgcatatcctacaaatgggtctgcgatggtagcgccgagtgccaagatggctcagatgagtcccaggaaacctgcctctcggtgacgtgcaagtcgggtgacttctcgtgcggcgggcgggttaacaggtgtattccgcagttttggcgctgtgacggccaggtggattgcgacaacggatcggacgaacagggttgcccaccaaagacctgttcccaggatgagttcagatgtcatgacggcaagtgcatttcccggcaatttgtctgcgactcggatcgtgactgcctggacggctcggatgaagccagctgtccggtactgacctgcggccctgcctcgttccagtgcaactcatccacctgtatcccccagctgtgggcctgcgataacgacccggactgcgaggacggatcagacgaatggcctcaacgctgcagaggactgtacgtgttccagggagattcctctccttgctccgcctttgaattccactgcctgtcgggggaatgcatccatagctcatggagatgcgacggcggcccggactgcaaagacaagtcagatgaagagaactgtgctgtggctacttgtaggccagacgaattccagtgttcggacggaaattgtatccacggctcccgacagtgcgatcgtgaatacgattgtaaggacatgtccgacgaggtgggttgtgtgaacgtgactctctgcgagggaccgaataagtttaagtgccatagcggagaatgcataaccctggacaaagtctgtaacatggcgcgcgactgtcgggattggtcagatgagccgatcaaggagtgcggcaccaacgcgtgcctggataacaacggaggctgtagccacgtgtgcaacgaccttaagatcgggtacgagtgcttgtgcccggatggattccaactggtggcgcaacgccgctgtgaagatattgatgagtgccaggatcctgatacttgctcgcagctgtgcgtgaatctcgaagggggctacaagtgtcaatgcgaggagggattccaactcgacccgcacactaaagcctgcaaagccgtgggatcgatcgcttacctgtttttcacgaacagacatgaggtccggaagatgactctggaccggtcggagtacacttccttgatcccgaacctgcgcaacgtggtcgcgctggacactgaagtggcgtccaacaggatctactggagcgatttgtcgcagcgcatgatctgttcaactcagctggacagagctcacggagtgtcctcgtacgatactgtgatctcgagagatattcaggccccagatggcctggccgtcgactggattcattccaatatctactggactgatagcgtgctgggaaccgtgtcggtggccgacactaagggagtgaagcgcaagactttgttcagagaaaatggatccaagccgagagcaatcgtcgtggatcccgtccatggatttatgtactggaccgactggggcactcccgcgaagatcaagaaaggaggcctcaatggtgttgacatctactcgctggtgaccgagaatatccagtggccgaatggaataaccctggatctgctgtcaggtcgtctgtactgggtggattcgaaactgcactccatttcgagcatcgacgtgaatggaggtaaccggaaaactatcctggaggacgaaaagcgtctcgctcatcctttctccctcgccgtgttcgaggataaagtgttctggaccgacatcatcaacgaggcgatcttctcagccaacagactgacgggctccgacgtcaacctgctggcagaaaacctcctctcgccggaggacatggtgctcttccacaatctgacgcaaccacggggagtgaattggtgcgaaagaacgaccctctcaaacgggggatgccagtacctctgcctcccggcacctcagatcaacccacactcgccgaagttcacttgcgcttgtccggatggaatgctcctcgcccgggacatgagaagctgtttgaccgaggctgaggctgcagttgcgacccaggaaaccagcactgtgcgcctgaaggtgtcatcaactgcagtccggactcagcacaccaccacgcgcccggtgcctgacactagccgcctgccaggggctactcctggactgaccacggtcgagatcgtcactatgtcgcatcaggccttgggagacgtggcgggaagaggaaacgagaagaaaccctcgtcagtcagagcgcttagcatcgtgctcccgatcgtgctgctggtgttcctgtgccttggcgtctttctgctctggaagaattggcggctgaaaaacatcaacagcatcaattttgacaatcccgtctatcaaaagactaccgaggatgaagtgcacatttgccacaatcaggatggatactcctatccatcacgacagatggtatcactggaagatgacgtggcc

SEQ ID NO: 11290 - DNA, 2580 bp, Artificial Sequence
  derived and/or modified sequence
atgggaccatggggatggaaactccgctggacggtggctctgctgctcgctgcggccggtacggccgtgggggaccggtgcgaaaggaacgaattccaatgccaggacggaaagtgcattagctacaagtgggtgtgcgacgggtcggccgagtgccaagacggatctgatgaatcacaggaaacctgtttgtcagtgacctgcaagtccggggatttcagctgcggagggcgagtgaacagatgtatcccgcagttctggagatgcgatggacaggtggactgcgacaatggatccgacgagcaaggctgcccacctaagacgtgttcacaagatgaatttaggtgccacgatggtaagtgcatcagccgccagtttgtttgcgactcggatcgagactgcctggatggatcagacgaagctagctgccctgtgctgacttgcggaccggccagcttccagtgcaactcgtccacctgcatcccgcagctgtgggcatgtgataatgacccagactgcgaggacggatccgatgagtggccacaacggtgccggggcctgtacgttttccagggcgactcgagtccgtgctcggccttcgaattccactgcctctctggagagtgcatccattcatcctggcgctgcgacggcggaccggattgcaaagacaagtccgatgaagaaaactgcgcggtcgcgacttgccgccccgatgaattccagtgctcagacggcaattgcatccatggatcgagacagtgcgaccgtgagtacgattgcaaggatatgtcagacgaagtggggtgcgtgaacgttactctgtgtgagggaccgaacaagttcaagtgccattccggagaatgtattactctcgacaaggtgtgcaatatggcccgcgattgcagagattggtcagacgaacctattaaggaatgcggaaccaacgcttgcctggataacaacggaggctgctcgcacgtttgcaacgacctgaagatcggatatgaatgtctgtgccctgatggcttccagctcgtggcacagcgccgctgcgaggacatcgacgagtgccaggatcccgacacctgttcgcaactgtgcgtgaatcttgaggggggatacaagtgccaatgcgaggagggattccagctggacccacacactaaggcttgcaaggctgtgggatcaatcgcttacctcttctttaccaaccgccatgaagtccgaaagatgaccctggatcggtctgaatacacctcgctcattccgaatctgcgcaatgtggtggccctggatactgaggtggcctcgaatcgcatctactggagcgacctctcgcagaggatgatctgcagcactcaactggatagagcccatggagtttcctcctacgatactgtcatctcacgggacatccaagcgcctgacggccttgcggtggactggatccactccaacatctactggactgattccgtgctcggtaccgtgtccgtggccgacaccaagggtgtgaagcgcaagactttgtttcgcgagaatggaagcaagccaagagccattgtagtcgatcctgtccatggattcatgtactggactgactgggggaccccggcaaaaatcaagaagggcggactcaacggcgtcgacatctactcgctcgtgactgaaaacatccaatggcccaacggaatcaccctggacctcctcagcggccgactttactgggtggactcaaagctccactcaatttcgagcatcgatgtgaacggtggaaaccgcaaaaccatcttggaagatgaaaagagacttgcccacccattcagcctggccgtgttcgaagataaggtgttctggaccgatatcatcaacgaagcaatcttctccgccaatcgcctgacgggatctgacgtcaatctgttggccgagaatttgctgtcgccggaggacatggtgttgtttcataatctgactcaaccaagaggggtgaactggtgcgaaagaaccactttgtcaaacggcggatgccagtacttgtgcctgcctgcgcctcaaatcaacccgcactcccctaagttcacctgcgcgtgtccagatggcatgctgctggcccgggacatgcggtcctgcctgacggaagcggaggctgccgtggccacccaagagactagcactgtgaggctgaaagtgagctccactgccgtgagaacgcaacacacgactactcggccggtccctgacacttcgagactgccgggagcaaccccaggcctgaccactgtggaaatcgtgaccatgtcccaccaggctctcggagacgtcgcaggacggggcaacgagaagaaaccgtcgagcgtgcgcgcactcagcatcgtcttgccaattgttctgctggtgttcctttgccttggagtgttcctgctctggaagaactggcgcctgaagaacatcaattcgattaacttcgacaatccagtctatcagaaaaccaccgaggacgaagtccatatctgtcataatcaagacggttactcgtatccgtcccggcagatggtgtcactggaggacgatgtggct

SEQ ID NO: 11291 - DNA, 2580 bp, Artificial Sequence
  derived and/or modified sequence
atgggcccttggggatggaagctgaggtggactgtggccttgctactggcggcagccggcacggctgtcggcgatagatgtgagaggaacgagttccagtgccaggatggtaaatgcatctcttacaaatgggtttgtgacggcagtgcagagtgtcaagacgggtctgatgagagtcaggagacgtgcctgtcggtgacatgtaagtccggagattttagctgtgggggccgcgtcaatcgctgtataccacagttctggagatgcgacgggcaagttgattgcgataacgggagcgacgagcagggctgtcccccaaagacttgtagccaggacgaatttagatgtcatgacggaaaatgtatctccagacaatttgtctgcgattcagaccgcgattgtcttgatggatcagatgaagctagctgccccgtgctgacttgcgggcccgcttctttccagtgcaattctagcacctgtatccctcagctgtgggcttgtgacaacgaccctgattgcgaggacggctccgatgagtggccgcagcggtgcaggggactgtacgtgttccagggagactcaagtccctgttctgctttcgaatttcactgcttgtccggggagtgcatccatagcagttggagatgtgatggcggacccgattgcaaggacaaatccgacgaggaaaattgcgctgtcgccacctgtagaccagatgagttccaatgctccgatgggaattgcatccatggttctaggcagtgtgatcgggaatatgattgcaaagatatgagcgatgaagttggatgcgtcaacgtgaccctctgtgaagggccaaacaaatttaagtgccattctggcgaatgcataactctcgataaagtatgcaatatggcaagagactgtagagattggtccgatgagccaatcaaggaatgtggaacgaacgcgtgccttgataataatggggggtgttctcacgtgtgtaacgacctcaagatcggatacgagtgtctctgtcctgacggttttcagttggtcgctcagcgccggtgcgaggatatcgacgagtgccaggatccggatacgtgtagtcaactttgcgttaatttagagggtggttacaagtgtcagtgcgaggaaggtttccagctcgatcctcatacaaaggcgtgtaaggcagttggatcaattgcatatctgttcttcaccaatcgtcacgaggtgcggaaaatgacactggaccgctcagaatacacatcccttattcccaacctgcggaacgtcgtggcactggacactgaagtagcgtctaatcgcatctattggagtgacttgtcacaacgaatgatctgcagtacccagctggatcgcgctcacggggtgtcttcctacgataccgtcatctcccgtgatattcaggcacctgacggcctggctgtcgactggatccactccaatatatactggaccgacagcgtgctgggcaccgtgtctgtagcggatacaaagggtgtcaaacgcaagacactgttcagggagaatggcagcaaacctagggctattgtggtggatccagtccacgggtttatgtattggactgactggggtacccctgcgaaaatcaagaagggcggactcaacggagtggatatatatagtctggtgactgagaatattcagtggcctaatgggatcaccctggacctgctgagcggtaggttgtactgggtagacagcaaacttcactccatctcatcaatcgacgtcaatggcggcaaccgaaagactatcctggaggacgagaagcggcttgcccatcccttctctcttgccgtgttcgaggacaaggtgttctggaccgacatcatcaacgaggcaatcttcagtgcaaacagattaacaggctccgacgtgaacttactcgccgagaacctgctctcgccggaggatatggtattgtttcataatctgactcagccgaggggcgtcaattggtgcgagcggactacactgtctaatggtggatgccagtatctgtgtttgcccgcccctcagataaatccccattcgcctaagtttacgtgtgcatgcccagacgggatgctattggcacgcgatatgcggtcgtgtctcaccgaggcggaagccgccgtggccacccaggaaactagcaccgtacggctgaaagtttcttctactgctgtaagaacacaacacaccaccacgagacctgttccagacacaagcaggctgccgggggcgactccaggcctgacaaccgttgagatcgtgactatgtcccatcaggcactcggcgatgtggctggaaggggcaatgagaagaaaccctcaagcgtaagagcactcagcattgtgcttccgatcgttttactggtgttcctatgcctgggggtttttttgctgtggaaaaattggcggctgaaaaatattaactccatcaacttcgataatcctgtataccagaagaccaccgaagatgaagtacatatctgccacaaccaagatggatatagctacccatctcgacaaatggtgagcctggaagatgatgtagct

SEQ ID NO: 11292 - DNA, 2580 bp, Artificial Sequence
  derived and/or modified sequence
atgggaccctggggctggaaacttagatggaccgtggcccttcttttggccgccgctggtaccgctgtcggagaccgctgcgaacgtaacgaattccagtgccaagacggtaagtgtatctcttataagtgggtgtgtgacgggtccgcagagtgtcaagacggtagcgatgagtctcaggaaacatgtctgtcggtcacgtgcaagtccggcgatttctcctgcggaggtcgtgtgaaccgctgcattccccagttctggcgctgtgacggtcaggtcgactgcgataacggaagtgatgagcagggttgtcctcccaagacatgctcccaggacgagttccggtgccatgatggtaagtgcatttcccgccagttcgtttgcgattcagaccgcgactgtctcgacggcagcgatgaggcctcgtgccccgtcctgacctgcggtccggcctcgtttcagtgcaactcttccacgtgcatccctcaactctgggcttgtgacaacgaccctgattgcgaggatggcagcgacgaatggccccaacgctgtcgtggactctacgtcttccagggtgacagttccccctgtagcgcgttcgaattccattgtctgtcaggcgaatgcattcatagtagttggcgctgcgacggaggacccgactgcaaggataagtccgacgaggagaactgcgcggtggccacgtgtaggccggatgagttccaatgcagtgacggaaattgtatccatgggtctagacagtgtgatagagagtacgactgcaaggacatgtctgacgaggttggctgcgtgaacgtcactctctgcgagggccccaacaagttcaagtgccacagtggcgagtgcatcacccttgataaggtgtgcaatatggcccgagattgccgtgactggtctgatgagcccatcaaggaatgcggaacgaacgcatgtttggacaacaacgggggctgttcgcacgtttgtaacgatctcaagatcggctatgagtgcctgtgtccggatggtttccagctggttgcgcagcgccggtgtgaagatatcgacgaatgccaggatcccgatacttgctcccagctttgcgtgaaccttgagggcggttataagtgtcagtgtgaggagggtttccagctcgatccccataccaaagcgtgcaaggctgtgggttcaattgcctacctgtttttcaccaatcgtcacgaggtccgcaagatgaccctcgaccgctccgagtatacctcgttgatccccaacttgcgcaacgtggtggcgcttgacaccgaggtcgcttctaaccgtatttactggagtgatctgagccagagaatgatctgctccacacagctggaccgtgctcacggtgtctcttcctacgacaccgttatctcgcgggacatccaggcacccgacggactagcggtcgactggatccattcaaatatctactggactgactcggtcctggggactgtgagcgtcgcggacaccaagggcgtgaaacgcaaaaccctgtttcgggagaacggttccaaaccgcgcgccatcgtggtcgaccccgtccacggattcatgtactggaccgattggggcacgcccgccaagatcaagaagggtgggctgaacggcgtggatatctactcactggtcacggagaacatccagtggcccaacggcatcacactcgacttgctcagcggcaggttgtactgggtcgattccaagctccattctatctccagcattgacgtcaacggcggcaatcggaagaccattctggaagacgagaagcgactcgcccacccttttagcctagcagtctttgaggacaaagttttctggaccgatattatcaatgaggccattttctccgccaatcgcctcacaggatccgacgttaacctgttagctgaaaacctgctgagtcccgaagatatggtccttttccacaacctcacgcaacctcgcggtgttaattggtgcgagcggaccactctgtcgaatggtgggtgccaatacctgtgtctccccgccccacaaatcaatccccactctcccaagttcacgtgcgcttgccccgatggaatgctgctcgcgcgcgatatgcgctcctgtctgacggaggcggaggcggcggttgccacccaggagacttcaactgttagactgaaggtttcgtcaacggctgtccgcacacaacacacaacaacgagacccgtgcctgacacgtcacgtctcccgggtgccacccctggactcactactgtcgagattgtcacgatgtcgcaccaggctcttggcgatgtggccggacgtggcaatgagaagaagccgagcagcgttcgagccctgtctatcgttctgcccatcgtactcctggtgttcctatgcctgggagtctttttgttgtggaaaaattggcgactcaagaacataaactccattaacttcgacaatcccgtctaccaaaagaccacagaagacgaagttcacatctgccacaatcaggacggctacagctacccgtcgcgccagatggtctctctcgaggatgatgtggcc

SEQ ID NO: 11293 - DNA, 2580 bp, Artificial Sequence
  derived and/or modified sequence
atgggtccttggggatggaagctccggtggaccgtcgcactcctgctcgcagccgccggtactgcagtaggggatcgctgcgaaagaaatgaattccaatgccaagatggtaagtgcattagctacaaatgggtctgtgatggatcggccgagtgccaagacgggtcagatgagtcccaggagacgtgcctgtcagtgacctgtaagtcgggtgatttttcctgtggggggcgggtgaatcgatgtattccacaattttggcggtgcgacgggcaggtggactgtgacaatggtagcgatgaacaggggtgtccacctaagacctgcagccaggacgaatttagatgtcacgacggaaaatgcatttcaagacaattcgtgtgtgattcggatcgggattgtctggatggctcggacgaggcttcctgccctgtgctcacctgtggtccagcctcctttcaatgtaattcgagcacttgtataccacaactgtgggcctgtgacaacgaccctgattgtgaggacggatcggatgagtggccacagcggtgtcggggtttgtacgtattccaaggagattcaagcccttgttccgcatttgagttccactgtctgtcgggggaatgcatccactcgagctggcgatgtgacggtggcccggactgtaaggacaagtctgacgaggaaaactgtgcagtcgccacctgtagaccggatgagtttcaatgctcggacggaaactgcatacacggatccaggcaatgtgacagagagtacgattgcaaggacatgtcggacgaagtggggtgcgttaatgtcaccctgtgcgaaggccctaacaaattcaagtgccattccggagaatgcatcacccttgataaggtgtgtaacatggcgagagattgtcgtgactggtcggatgagcctataaaggagtgtggaaccaacgcatgcctggataacaacgggggttgctcacatgtctgcaacgatctgaaaataggatacgagtgtctctgtccagatggattccagcttgtggcccaaaggcgatgtgaagatatcgatgaatgtcaagatccagatacttgttcccagttgtgcgtcaatctcgagggaggctataagtgtcaatgtgaagaaggatttcaactcgatcctcataccaaggcgtgtaaggccgtgggttccatcgcatacttgtttttcaccaatagacacgaagtccgtaagatgactcttgaccgctcagaatacacttccctgatccctaatcttcgtaatgtggtcgcgctcgatactgaagtcgcatccaacagaatctactggagcgacctttcccagcgtatgatttgtagtacccaattggatcgggcgcatggagtgtcctcctacgatactgtgatcagccgtgatattcaagcgccagatggtcttgccgtggactggattcactccaacatttactggactgactccgtgctcggcaccgtgtccgtggctgatactaaaggggtcaagagaaaaactctgttcagggaaaatggttccaaaccaagagccattgtggtcgaccccgtgcacggttttatgtactggaccgactggggaactccagcgaagatcaaaaagggtggactgaacggcgtcgacatttactcacttgtcaccgaaaacatccagtggccaaatgggataacgctggatctgctttcgggacggctttattgggtggatagcaagctgcattccatctcctcaatcgacgtgaatgggggcaacagaaagactatactcgaggacgagaaacggctcgcgcatccttttagcctggcggtttttgaggataaggtcttttggaccgacatcatcaacgaggcaatcttttcggcaaacagattgaccggcagcgatgtcaacctccttgctgaaaacttgctgtcacctgaggacatggtcctcttccataaccttactcagcctcgaggtgtgaactggtgtgaacgcaccactctgagcaatggtggttgccagtacctgtgcctccctgccccgcagatcaacccacattcgcctaagtttacctgtgcgtgcccggatggtatgcttctggctagagatatgcgctcatgtctgaccgaggcagaggcagccgtggcgactcaggaaacctcaacggtgcgtctcaaggtgtcgtctaccgcagtccgtacccagcatactacgactcgacctgtgccagacacttcccggcttcccggcgcaaccccaggacttacgaccgtcgaaattgtgaccatgagccaccaggcactcggtgatgtggcaggacggggaaatgaaaagaagccatcctccgtgcgtgcactcagcattgtgctgcccatagtccttcttgttttcctttgtcttggagtgtttctcctttggaaaaactggcgcctcaagaatatcaactcaataaacttcgataacccagtgtaccaaaagaccaccgaagatgaagtccatatctgtcataaccaagatggctactcgtacccttccagacaaatggtgtcactcgaagatgatgtggct

SEQ ID NO: 11294 - DNA, 2580 bp, Artificial Sequence
  derived and/or modified sequence
atgggcccctggggctggaagctgaggtggacagtggctctcctcctggccgccgccgggactgcagtaggcgaccgctgtgaaagaaatgagtttcagtgtcaggacggcaagtgcatatcttataaatgggtttgtgatggaagtgccgagtgtcaggacgggagtgatgaaagccaggagacttgcctgtctgtgacctgtaagtccggggatttctcttgcggcggccgggtgaatcgctgcatacctcaattctggcgctgcgacggccaagtggactgtgacaacgggagcgatgagcagggctgccctcccaaaacatgctcccaggacgagtttagatgtcatgacgggaaatgcatctccaggcagtttgtgtgcgactccgatcgcgactgcctggacgggtctgacgaagccagttgccccgtcctgacttgtggcccggctagtttccagtgcaactctagcacctgcattccacagctatgggcctgtgacaatgaccctgactgcgaggatggcagcgacgagtggcctcagcgctgccgcggattatacgtgtttcagggcgatagttctccttgcagtgcctttgaatttcactgcctctctggtgagtgtatacacagctcttggaggtgcgatggcggacccgactgcaaggacaaaagtgatgaagagaactgcgcagtggcaacatgcagacccgacgagttccagtgctccgatggcaactgcatccatgggtctcgccagtgcgatagagagtacgactgtaaggacatgtctgatgaagtcggctgcgtcaatgtcaccctgtgcgaggggcctaacaaatttaaatgtcatagcggagagtgtattacattggacaaagtttgcaacatggctcgggactgcagagattggtccgacgagcctataaaggagtgtggcaccaatgcctgtctagacaacaacggaggctgctcccatgtgtgtaacgatctgaagatcggatacgaatgcctatgcccagatgggtttcaactggtggcacagcggagatgtgaagacatagacgagtgccaggacccagacacttgtagccagctgtgcgtcaacctggagggcggttataaatgtcaatgcgaggaaggatttcagttagatcctcacaccaaggcatgtaaagcagtgggctctatcgcctacctttttttcaccaataggcatgaagtacggaagatgaccctggaccgcagcgagtatactagtctcatacctaacctgcgcaatgtggtggctctggacaccgaagtggctagcaatagaatttattggagtgacctgtcacagaggatgatttgctctactcagctggaccgtgcccacggagtgagtagttacgacacagtcatcagtcgggacatccaggcccctgacggtttggccgttgattggattcatagcaacatttattggaccgacagtgtcctgggaaccgtctctgttgccgataccaaaggtgtgaagcggaagactctgtttagagagaatggcagcaaaccacgcgccatagtggtcgaccccgttcatggttttatgtactggactgactggggtactcctgccaaaattaaaaagggggggctgaatggggtcgacatatatagcctggttactgagaacattcaatggccaaacggcatcacacttgatctcctctctggaaggctatattgggtggacagcaagttacactccataagcagcattgatgtcaacggcggcaaccggaaaaccatcctggaagacgagaagcggcttgctcacccttttagtttagccgtgtttgaggataaagtgttttggactgacatcataaatgaggctatcttcagcgccaaccgcctcactggcagcgacgttaatctgttagctgagaacctccttagtccagaagacatggtgctctttcacaatcttactcaaccaaggggggtcaactggtgcgagcggaccaccctgtcaaacggcggctgccagtacctgtgcctgcctgcacctcagattaacccacactctccaaagttcacctgcgcatgtcctgacggtatgctactggccagggatatgagatcctgtctcacagaggccgaggccgctgtggcaacacaagaaacttccaccgtccgcctcaaagtgtctagtactgcagttagaacccagcataccacaacccggcctgttccagacaccagcagactaccaggcgcaacacccggcctgacaactgtcgaaatagttaccatgagccaccaggctctcggcgatgttgctgggagaggaaatgaaaagaaaccctcctccgttcgtgctctgtctatcgtgctcccaattgtgctgctcgtgttcctgtgcctgggtgtgtttctgttgtggaagaactggagactgaaaaatataaatagcatcaatttcgataaccctgtctatcaaaaaactacagaggacgaagtccacatctgtcacaaccaggacggttatagctatccctccagacagatggtctccctcgaagatgacgtggcc

SEQ ID NO: 11295 - DNA, 2580 bp, Artificial Sequence
  derived and/or modified sequence
atgggaccttggggatggaagctgcggtggactgtggctctgctgctggctgcggccggaactgctgtgggagatagatgtgagcgcaacgaattccagtgtcaggatgggaagtgcatttcctacaaatgggtttgcgacggctcagcggaatgccaagacggaagcgacgaaagccaggaaacgtgcttgagcgtgacctgcaaatccggagacttcagttgtgggggaagggtgaaccgctgcatcccgcagttctggcgttgcgacggccaagttgactgtgataatggatcagatgagcaaggatgtccgccgaaaacgtgctcacaagatgaatttcgatgccacgacggcaagtgtatttcccgccagttcgtgtgcgattccgatagagactgccttgacggatcggacgaggcttcatgcccggtcttgacttgcggtccagcatcattccagtgcaattcatccacctgcatccctcaactctgggcctgcgataatgacccggactgtgaggatggctcggacgagtggccgcaaagatgcaggggactgtacgtgttccaaggcgactcatccccgtgcagcgccttcgaatttcattgcctgtcgggcgaatgcatccattcctcttggcgctgcgacggcggacctgactgcaaggacaagtctgacgaggagaactgcgcagtggcgacctgccgacccgatgaatttcaatgctccgacggaaactgcatccacggttcgcgccagtgcgaccgcgagtacgactgtaaggatatgtcggatgaggtgggatgcgtcaacgtcaccctctgcgaaggccccaacaagtttaagtgccactccggagaatgcattactctcgacaaagtttgcaatatggctcgcgactgtcgcgattggtctgacgagccgattaaagagtgcggaactaacgcctgcctggacaataacgggggatgcagccacgtctgcaatgacctcaagatcggatacgagtgcctgtgcccggacggatttcaactcgtggcgcagcgtagatgcgaggatatcgatgaatgtcaggacccagatacttgctcccagctgtgcgtgaaccttgaagggggatacaaatgtcagtgcgaggaagggttccaactggacccgcacaccaaggcttgcaaggcggtcggatcaatcgcctatctgttctttactaaccgccacgaagtgcggaagatgaccctggaccggtccgaatacactagcctgatccccaacttgcggaacgtcgtggctcttgacaccgaagtggcctctaaccgcatctattggtccgatctgtcccaacgcatgatttgctcgacccagctggaccgcgcccacggggtgtcgtcgtacgacaccgtcatctcgcgggacatccaggccccggacggcctcgcggtggattggatacattccaacatctactggactgattccgtcctgggaacggtgtccgtcgcagataccaaaggagtcaagagaaagaccctctttcgagagaacggctcaaagccccgggccatcgtggttgacccggtgcatggatttatgtactggactgactggggcaccccggccaaaatcaaaaagggtggcctgaacggagtggacatctacagcctggtgaccgaaaacatacaatggccgaatggtatcactctcgatctgttgtcaggccggctgtattgggtggactcgaagctgcactcgatttcgtccatcgatgtcaatggcggtaatcggaaaactatcctggaggatgagaagagactggcccatccattctcccttgcggtgttcgaggacaaggtgttttggaccgacatcattaacgaggccatcttttcggccaatagactgactggctcggacgtgaacctcttggcggaaaatctgctttctccggaggacatggtcctgtttcacaatctcacccagcctaggggagtgaactggtgtgagagaaccactctgagcaacggaggatgccagtacctctgcctgccggctcctcaaatcaaccctcatagcccgaagttcacttgcgcatgcccagacggaatgctgctggctagggacatgcgtagctgtctgactgaagcggaagcggcggttgccacccaggagacttcaaccgtcagactgaaagtgagctcaaccgccgtgagaacccagcatacgactactcggcctgtgccggataccagcaggcttccgggagccaccccggggctgaccaccgtggagatcgtcacgatgtcacaccaagccctgggagatgtcgccggccggggcaacgagaaaaagccgagctccgtgcgcgcgctgtcgattgtgctcccgatcgtgttgctcgtctttctgtgcttgggcgtgttcctcttgtggaagaactggcggctcaagaatatcaactcgatcaacttcgataacccagtgtaccaaaagactaccgaggacgaggtgcatatctgtcataatcaggacggatacagctatccgtcgcgccagatggtgtccctggaggacgatgtcgct

SEQ ID NO: 11296 - DNA, 2580 bp, Artificial Sequence
  derived and/or modified sequence
atggggccttggggctggaaacttcgttggaccgtggcacttctgcttgccgcagcaggcaccgccgtcggtgataggtgtgagcgcaacgaattccagtgtcaggatggaaagtgtatttcgtacaaatgggtctgcgatgggagcgcagaatgtcaagatggctcggatgaatcccaggaaacttgcctttccgtcacgtgtaaatcgggtgatttctcatgtggagggcgagtgaacagatgtattccacaattttggagatgtgacggacaagtggattgcgacaacggttcagatgaacagggctgtccccccaagacttgttcacaagatgaatttaggtgccatgatggtaagtgtatctcaaggcaatttgtgtgtgatagcgacagagattgtctggatggttcagatgaggctagctgcccagtcctgacttgtgggccggcatccttccagtgcaatagctcgacttgtatcccacagctttgggcatgtgataacgatccagattgtgaagatggatcggatgaatggccacagcgctgtaggggactttacgtgtttcagggagactcatcaccctgtagcgccttcgagtttcattgtttgtcgggagaatgcattcacagcagctggcggtgtgatggaggtcccgattgtaaggataaatcggacgaggagaactgcgccgtcgcaacttgtaggcctgatgaattccagtgcagcgatggaaactgcattcatggatcccgccaatgcgatcgcgagtacgattgtaaagatatgtccgatgaagtgggctgtgtgaacgtgaccctgtgtgagggtccaaacaaattcaagtgccattcgggcgagtgcatcaccctcgataaggtgtgtaacatggcgcgcgactgccgcgactggtcggatgagccaattaaggagtgtggtactaatgcctgtttggacaacaacggaggttgcagccatgtgtgtaatgatttgaagatcggctacgagtgtctctgtcctgatggctttcaactggtggcacagaggagatgcgaagatattgacgagtgccaggatcccgacacgtgctcgcagctgtgtgtgaatctggaaggagggtacaagtgtcaatgtgaggagggatttcaacttgatcctcacacgaaggcctgcaaggcggtgggatcaattgcatatctgtttttcactaatcgacacgaggtccgtaaaatgacccttgaccggagcgagtacacttccctgatccctaatcttagaaatgtcgtggcactcgataccgaagtcgcatctaatcggatttactggtccgatctctctcaaagaatgatctgctcaacccagctggatagggcacatggtgtttcatcgtacgataccgtgattagccgggatattcaagcacctgacggccttgcagtcgattggatccactcaaacatttactggactgactccgtgctcggaaccgtgtccgtcgcagatactaagggtgtcaaaaggaaaaccctctttcgtgaaaacggctctaagccaagagcaattgtcgtggacccagtgcatgggttcatgtactggaccgactggggaactcctgccaaaatcaagaagggagggctcaatggagtggacatttacagcctcgttaccgaaaacattcagtggccgaacggtataaccctggacctgctctcgggcagattgtactgggtggattccaagttgcatagcatttcatccattgatgtcaacggcggcaaccgaaaaacgattctggaagatgaaaagcgtctggctcatcctttttctctggcagtctttgaagataaagtgttttggactgacatcataaatgaggcaatctttagcgcaaaccgactcaccgggagcgacgtgaatcttctcgcagaaaacctgctttcccccgaggatatggtgcttttccacaatctcacgcaacccagaggtgttaactggtgcgagagaacgactctgtccaacggtggatgtcaatacctttgtctgccagcaccacaaatcaacccgcacagcccaaagtttacctgtgcatgtccggatggtatgttgctcgcacgggatatgagatcctgtcttaccgaggccgaagcagcagtggcgacccaagagacttccactgtgaggctgaaagtgtccagcactgccgttcggactcagcatactaccaccagacctgtgcctgacacttcccgtctcccaggagcaactcctggtctgacgaccgtggaaattgttaccatgtcccatcaggcactgggtgatgtggcaggacgcggaaacgagaaaaagccttcgagcgtgcgtgcactgtccatagtgcttccaattgtcctcctggtgtttctttgtctcggggtgtttctcctttggaagaactggcgtcttaagaacataaacagcattaacttcgataatcccgtctaccagaaaaccactgaagatgaagtgcatatctgccataaccaggatggctactcgtacccatcccggcaaatggtgtcactcgaagatgacgtggcg

SEQ ID NO: 11297 - DNA, 2580 bp, Artificial Sequence
  derived and/or modified sequence
atgggtccttgggggtggaaacttcgctggaccgtggcattgctcctggcagcggcaggcaccgcagtcggtgatcgctgtgaacgtaacgaattccaatgccaagacggcaagtgcatctcttacaagtgggtgtgtgatggaagcgcggaatgtcaagatggatcggacgaatcacaagaaacctgtttgtcagtgacgtgtaagagcggggacttctcatgcggaggacgtgtgaacagatgtatccctcagttttggagatgtgatggacaggtggactgcgacaacggatcggatgaacaggggtgtccgcccaagacctgctcccaagatgagtttcggtgccatgacggcaaatgtatctctcggcagttcgtctgtgattccgatagagactgtctggacggttctgacgaagcatcgtgccccgtccttacttgcggacccgcatcgttccagtgtaattcctccacttgtattcctcagctttgggcctgcgataatgatccggactgtgaggacggatcagatgagtggccgcagaggtgccgtggcctttacgtgttccaaggtgattcgtcgccgtgttcggcttttgagtttcactgccttagcggcgaatgtattcactcgtcatggcgctgtgacggcgggcctgattgtaaggataagagcgatgaggaaaattgtgcagtggcaacctgtcgaccagatgaatttcagtgctcggatggcaactgcattcatggatcgcgccagtgtgatagagaatacgattgtaaagacatgtcagatgaggtgggctgtgtcaacgttactctctgcgaaggaccaaataagtttaagtgccatagcggagagtgcataaccctcgataaagtgtgcaacatggccagagattgtcgcgattggtcagacgaacctattaaggaatgtggtactaacgcctgcctcgataacaacggtggatgctcgcatgtgtgtaatgatttgaaaattggttacgaatgtctgtgccccgacggatttcaactggtggcacagagacggtgcgaggatattgatgagtgtcaagaccccgatacctgttcacaactctgtgtgaatctcgaaggcggttacaaatgccagtgtgaagaaggttttcagctcgatccccatacgaaggcgtgtaaggccgtgggtagcatcgcatacctgttcttcacgaatagacatgaggtgcggaagatgactctggatcgatccgaatacaccagcctcataccgaatctgcgcaacgtggtcgcccttgatactgaggtcgcttctaacaggatctactggtccgatctttcgcagaggatgatatgttccacccagcttgacagagcgcatggagtgtcgagctacgataccgtgatctcacgggatatacaggcaccagatggtctggccgttgattggatacacagcaatatctactggactgactcggtgcttggaactgtgtcagtggctgacaccaagggagtgaagaggaaaaccctcttccgagaaaacggttcgaaaccccgcgcaatcgtggtggatccagtccacgggtttatgtattggaccgactggggaactccagccaagattaagaaaggaggtttgaacggggtggacatttactctcttgttactgagaacattcaatggcctaatggcataactctcgaccttctcagcggaaggctgtattgggtggattcgaagctccactcgatttcttccatcgacgtgaatggcgggaatagaaagactattcttgaggacgaaaaacgtctggcgcatccgtttagcctcgcagtctttgaggacaaagtcttttggacggatatcattaatgaggcgatcttttcggcaaacagacttactggtagcgatgtgaaccttcttgcggagaacctgctttccccggaggacatggttctctttcacaacctgactcagccacgcggggtgaactggtgcgaaagaaccactctttcgaatggaggatgtcaatacctttgtctgcctgcaccacagattaacccacatagccctaagtttacctgtgcctgtcctgatggtatgctgctggcacgtgatatgcgttcctgtttgactgaggccgaagcggcagtcgcaactcaggaaactagcactgtcagactgaaggtgtcgagcactgcagtcagaacccagcacactacgacccgaccagtccccgacacgtcacggttgccaggtgctaccccaggtctgaccactgtggaaatcgtgactatgagccaccaagctcttggagatgtggcaggccgcgggaacgaaaagaaacctagcagcgtccgcgccctctccatcgtgctccctatcgtcctgcttgtctttctctgcttgggagtgttcttgttgtggaagaattggcgtctgaagaacatcaacagcattaacttcgacaaccctgtgtaccaaaagaccactgaagatgaagtgcatatctgtcacaaccaagatgggtactcctacccatcacggcagatggtgtcccttgaggacgatgtggcc

SEQ ID NO: 11298 - DNA, 2580 bp, Artificial Sequence
  derived and/or modified sequence
atgggtccttggggatggaagctgcggtggaccgtggccctcctgcttgccgccgcgggtactgcggtgggagatagatgtgagagaaacgaatttcagtgtcaagatggaaagtgcatcagctacaagtgggtctgcgacggatcggccgaatgccaagacggatccgatgagtcgcaggaaacttgcctgtcagttacttgcaagtcgggcgatttctcgtgtggaggaagagtgaatcgctgcattccgcagttctggagatgcgacgggcaggtggactgcgataacggaagcgatgagcagggctgcccgccaaaaacttgttcgcaagatgagttccgctgtcatgacgggaagtgcatctctcgccaattcgtctgcgactcagatcgcgattgtctggatggctcagacgaagccagctgccccgtgctcacttgtggaccagcatcattccagtgcaattcctcaacgtgcatcccccagctttgggcgtgtgacaatgatccagattgcgaggatggttcggatgaatggcctcaacggtgcaggggcctctacgtgttccagggggattcctcgccgtgttccgcattcgagttccattgcctcagcggagaatgcatccatagctcttggcgctgtgatggaggtcccgattgcaaggataaatcggacgaagaaaactgcgccgtggcaacttgccgccctgatgaattccaatgttcggacggaaattgcatccacggatcccgccagtgcgacagggaatatgactgcaaggacatgtcagatgaggtcggttgcgtcaacgtgactctgtgcgagggtcctaataagttcaagtgtcattccggcgaatgcatcaccctggataaggtgtgtaacatggctagagactgcagagattggtcggatgaaccgattaaggaatgcggaactaacgcatgcctcgacaacaacggcggatgctcccacgtgtgtaatgacctcaaaattggatacgagtgcctgtgcccggacggattccagttggtcgcccagagacgctgcgaggacatcgacgagtgtcaggacccggatacttgctcgcagctgtgtgtgaatctcgagggcgggtataagtgccagtgcgaggaaggcttccagctcgacccacatactaaggcttgcaaggcggtgggctccatcgcatacttgtttttcactaacagacacgaggtccggaagatgaccttggaccggtcagagtacacctctctgatccccaacctgcgcaatgtggttgcacttgatacggaggtggcgagcaataggatctactggtcagatctgtcacagcgcatgatttgcagcactcagctggaccgggcacacggagtgagctcctacgataccgtcattagcagggatatccaagcacccgacggactggctgtggattggatccactcgaacatctattggacggattcggtcctcggtaccgtgtcggtggccgacaccaaaggtgtcaagcgcaagaccttgttccgggagaacggaagcaagccgagggcgatcgtcgtggacccagtgcacggattcatgtactggacggactggggcaccccagccaagatcaagaagggcggattgaacggagtcgacatatactcacttgtgactgaaaacattcaatggccaaacgggatcactctggacctcttgtcaggacggctttactgggtggattcaaaattgcactcgatctcctcaattgacgtcaacggaggaaacagaaagaccatcctcgaggacgaaaagagactggcacatccatttagcctcgcggtgttcgaggacaaagtgttctggactgacatcatcaacgaggcgattttctcggcgaaccgtctcactgggtcagatgtcaacttgctggccgagaatctgctgagcccggaggacatggtgctgtttcataatctgacccagccgcggggggtcaactggtgcgaacgcactacgctctcaaacggaggctgtcagtacctgtgtctcccagccccgcagatcaatcctcattcgccaaaattcacctgcgcctgccctgacggcatgctccttgcccgagatatgaggtcctgcctgaccgaggccgaggccgctgtggcaactcaggaaacctcgaccgtgcgactgaaagtctcctcaactgccgtgcgcacccagcacactactaccaggccggtgccggacacttcccgcctgcccggagctacgccgggactgactaccgtggagatcgtgactatgtctcaccaggcactcggtgatgtcgctggtcggggtaacgaaaagaagccgtcaagcgtgcgggcgcttagcatcgtgctcccgatcgttctgctggtgttcctgtgcttgggggtctttctgctgtggaaaaactggcggttgaagaacatcaattccatcaatttcgataatcctgtgtaccagaaaaccaccgaggacgaagtccatatctgtcacaatcaggatgggtattcgtacccatctaggcaaatggtgtcccttgaggatgacgtcgcg

SEQ ID NO: 11299 - DNA, 2580 bp, Artificial Sequence
  derived and/or modified sequence
atggggccctggggctggaaactgcgctggacagtggccctcttgcttgcagcggcagggacagccgtcggggatcggtgtgagcgaaatgagtttcagtgccaggatggaaagtgcatcagctataaatgggtgtgtgacggaagtgctgagtgtcaggacggctccgacgagtcccaggaaacttgcttgtcagtgacctgtaagtcgggggatttctcttgcggggggcgggtcaatcggtgcatcccccagttttggaggtgcgacggccaggttgattgcgacaacggaagcgatgagcagggctgcccacccaaaacatgttcacaggatgaatttcggtgtcacgacggaaagtgtatctcccggcagttcgtatgtgatagcgatagggattgcctagacgggtcagatgaggcctcttgccctgttctgacatgcggacccgcctcattccagtgcaacagtagtacctgtattccccagctgtgggcctgtgataatgatccagactgtgaggacgggtctgacgagtggccgcagcgctgtcggggattatatgtgtttcagggagacagtagcccctgcagcgcgttcgagtttcactgcctcagtggcgaatgcattcacagtagttggagatgcgacgggggacccgactgcaaggacaagagcgatgaagagaactgcgcggtcgcaacatgccgtccagacgagttccagtgctcagacggcaactgtatccatgggtctaggcagtgtgatcgtgagtacgactgcaaggacatgtcagacgaagttgggtgtgtcaatgtgaccttatgcgagggaccaaacaagtttaaatgtcatagcggggagtgcatcaccctggacaaggtctgcaacatggcacgtgactgtagagattggtctgacgagccaatcaaggaatgcggaacaaacgcttgtttggataataatggtggctgctcccacgtgtgtaacgatttaaaaatcggttacgaatgcctgtgtcccgatggctttcagctcgtagcccagcggaggtgcgaagatattgacgagtgccaggacccagatacctgttcccagctatgcgttaacctggaaggaggttacaaatgccagtgcgaggaagggttccagctggatccgcatacgaaggcgtgcaaagccgtggggagcatcgcatatctgttcttcacaaacaggcatgaggtcagaaaaatgactttggatcgctctgagtacacgagtttgatccccaacctgcgaaatgtcgtcgcactagatacagaggttgcaagcaatagaatctactggagtgatctgtcacagaggatgatttgtagcacccagcttgaccgagcccacggcgttagttcttatgatacggtgatatctagggacatacaggcgccggacgggctggcagtggattggatccatagcaacatatattggacagactcggttctcggcacagtctccgtcgccgacaccaagggcgtgaagagaaaaactcttttccgcgaaaatggaagtaagccccgtgctatagttgtggatcccgtacatggttttatgtactggactgattgggggacccccgccaagatcaaaaaaggcggactgaatggagtagacatttattccctcgtgacagagaacatccagtggcccaatggtatcactctcgacctgctgtctggccgactgtactgggtagatagcaagctgcacagcatttcctccatcgatgtcaacggcgggaacagaaagacgattttggaagacgagaagaggcttgcccacccgttttccctggcagtgtttgaagataaagtgttttggaccgatatcatcaatgaagccatcttttctgccaacagactaaccggtagcgacgtaaacctgctcgccgaaaacctgctgtcacccgaggacatggtcttgttccacaatttaacgcagccccgcggcgtcaattggtgcgagcggactacattgagtaacggaggatgccagtatttgtgcctcccggcaccgcagattaacccccatagtccgaagtttacatgcgcttgccctgatggtatgctactggcacgggacatgcgttcttgtctgaccgaagccgaggcagccgtggccacacaggagacctctacagtgagactgaaggtgtcgtccaccgcggtgcggacacagcacacaaccacacgccctgtccccgacacctcaaggctgccaggggccacaccagggctcacaaccgtcgagatagtcaccatgtctcatcaggccctgggcgacgtagcagggaggggtaatgagaagaaaccctcaagcgtcagagcactgtcaattgtcctgccaattgttctgctggtttttctgtgcttgggcgtgtttctgctgtggaagaattggcgcctgaagaacatcaattcaatcaatttcgataatccagtgtatcagaaaaccaccgaggacgaggttcatatctgccacaaccaggacggttactcctacccgtcccgccagatggttagcttagaggatgacgtggct

SEQ ID NO: 11300 - DNA, 2580 bp, Artificial Sequence
  derived and/or modified sequence
atggggccatggggatggaaacttcgctggaccgtggcactccttcttgccgctgcaggaaccgcagtcggagatcgatgtgagagaaacgagttccagtgtcaggatggaaagtgtatttcgtataagtgggtgtgtgatggctcagctgaatgtcaagatggttcggatgaatctcaagaaacgtgtctgtcagttacctgtaaatctggagatttctcgtgcggtggaagagtaaacagatgcatcccacaattttggagatgcgacggacaggtggactgtgataacggatccgacgagcaaggttgccctcccaaaacctgctcccaggacgagtttagatgccacgacggaaagtgtatctcgagacagtttgtgtgtgacagcgatcgggattgtctcgacggctcagatgaagcaagctgccctgtgcttacctgcggtcctgcatcctttcaatgcaacagctcgacctgtattccacagctttgggcctgtgataacgaccccgactgtgaagatggatcagacgaatggccgcagcgttgccggggactctacgtgttccaaggcgattcatcaccctgcagcgctttcgagttccattgtttgagcggtgaatgcatccattcctcctggaggtgcgatggcggtcctgactgtaaagataaatcggacgaagagaattgtgcagtggccacctgccgacctgacgaattccagtgcagcgatggcaattgtatacatggatcgagacagtgcgaccgtgaatacgattgcaaggatatgtccgacgaagtcggatgcgtgaacgtgactctctgtgaaggcccgaataagttcaagtgtcatagcggggaatgcatcactctggataaggtgtgtaatatggcaagagactgccgcgactggtctgatgagcctataaaggaatgtggaaccaacgcctgtctcgataacaacggtgggtgctcccatgtgtgtaacgacctcaaaattggctacgaatgcctctgtcctgatggatttcagctggtggcgcagcgaagatgtgaggatattgatgagtgccaggaccctgacacctgttcccaactttgtgtgaacctggaaggaggctacaaatgtcaatgtgaggaaggattccaacttgatcctcataccaaggcatgtaaggcagtgggcagcatcgcctacctgtttttcactaacagacatgaggtgagaaagatgactcttgatcggtcagaatacacttcgcttataccaaatctgagaaacgtcgtggctctggatactgaagtggcatccaataggatttactggtcggaccttagccagcggatgatttgctccacccaactcgatagagcccatggcgtgtcgagctacgacaccgttatttcacgggatattcaagcccctgatgggcttgccgtggactggatccattctaacatatactggactgattcggtcctgggtaccgtgtcagtggccgataccaaaggcgtcaagcgtaagaccctttttcgcgagaacggatccaagccacgagcaattgtggtggatcctgtgcacggattcatgtactggacggattggggcacccccgcgaagatcaagaaaggtggtcttaatggtgtggacatctattcgctcgtcaccgaaaacatccagtggccgaacggtattacgttggatctgctgtcgggacgcctgtactgggtggatagcaaacttcactcaatttccagcatcgatgtgaacgggggaaaccgcaagaccattcttgaagatgagaagcgtctggcacaccctttttccctcgcagtgtttgaagataaagtgttttggaccgacattatcaacgaagccattttctcggcaaaccgcctcacgggcagcgatgtgaatttgttggccgagaatctgctcagtccggaagatatggtcctgtttcacaatctgactcagcccagaggtgttaactggtgtgagcgcaccaccctttccaacggcggctgccagtacttgtgccttcctgccccccaaatcaatccgcacagcccgaaattcacctgtgcatgtccagatggtatgctgctggcacgtgatatgaggtcctgccttaccgaagcggaagcagccgtggccacccaggaaacctcgactgtcagactgaaagtctcctccaccgcggtgcggactcaacacaccaccacgaggcctgtccctgatacttcccggcttcccggagcaactcctggattgactactgtcgaaattgtgaccatgagccaccaggcactcggtgacgtggcaggacggggtaacgaaaagaagccctctagcgtgagagccttgtctatcgtactcccaattgtgcttcttgtgtttttgtgcctgggcgtgttccttctgtggaaaaactggcgacttaagaacataaactcgatcaattttgacaacccggtttaccaaaaaacgactgaagatgaggtgcatatttgccataatcaagatggatacagctacccttcacgacagatggtcagcctcgaagatgatgtcgca

SEQ ID NO: 11301 - DNA, 2580 bp, Artificial Sequence
  derived and/or modified sequence
atggggccatgggggtggaagctcaggtggaccgtggcactgctattagctgccgccggaactgctgtgggagatcggtgtgaacgcaatgagttccaatgccaggacggcaaatgcatctcctacaaatgggtttgcgacggttctgccgaatgtcaggatggaagcgacgaaagccaggagacttgcctttccgttacatgtaaaagtggcgacttttcctgcggcggccgcgtgaacagatgcataccccagttctggcgttgcgacgggcaggttgactgtgataacggatctgatgaacagggctgtccacctaagacctgctctcaggacgaattcaggtgtcacgatggcaaatgcatttcgcggcagtttgtctgcgattctgaccgcgactgcttagacggttctgacgaggcatcctgtccagtcttgacttgtggcccagcaagttttcagtgcaactcatcgacatgcattcctcagctctgggcatgtgataacgacccagactgcgaggacggttccgatgagtggccacagaggtgtagagggctgtacgtgttccagggggactcttctccatgctccgcattcgagttccattgcctttccggagagtgtatacactcaagttggcggtgtgatgggggccccgattgtaaggacaagtctgacgaggaaaactgcgctgtggcgacctgcagaccggatgaatttcagtgcagcgacggtaattgtatccacggaagtcgccagtgcgatagagagtacgactgtaaagacatgtccgatgaggttggctgcgtgaatgttacactgtgtgaaggacctaacaagttcaaatgtcactctggagaatgtataaccctcgacaaggtttgcaacatggccagagactgtcgggattggtctgacgaacctatcaaggagtgcggaacgaatgcttgcttggataacaatggcggatgttcccatgtgtgcaatgatctcaaaatcgggtacgagtgtctgtgccccgacgggtttcagctagtggcccagcgcagatgtgaggatatcgatgaatgtcaggaccctgatacctgttcccagctgtgtgtgaacctcgagggcgggtataagtgccagtgcgaagaggggttccagctggatccccacaccaaggcatgtaaggcagtgggctctatagcctatctgttcttcacaaatcgccacgaggtgagaaagatgactctggaccggtccgagtacacctccttaataccgaacttgcggaacgtggtggcgctcgataccgaagtcgcttcaaacaggatctactggagcgatctttctcagaggatgatttgcagtacgcagcttgatcgtgctcatggcgttagctcgtatgataccgtcatctcgagggacatccaggccccagacggattggcggtggactggatccattcaaatatttattggaccgatagcgttttggggaccgtgtcagtggccgatactaagggcgtaaagcggaagaccctatttagggaaaatggctcaaaaccccgcgccatcgtggtggaccccgtccacggattcatgtattggacggactgggggacacccgccaagatcaaaaagggagggttgaatggcgttgacatttattctctggtgacagagaatatacagtggccaaacggaatcacccttgaccttcttagcggcaggctctattgggtggattccaaattacacagtatctcatcaatagacgtcaacgggggaaatagaaagacaatcctcgaagacgagaagcgcttggctcaccccttttcgctcgcagtcttcgaagataaagttttttggacagatataataaacgaagccattttttctgccaaccgattaaccggaagcgatgttaatcttctggccgagaacctgctgtcccctgaagacatggtcttgttccataatctgactcagcctaggggggtcaattggtgcgagaggacaacccttagcaacgggggctgtcagtacctgtgtttgccagccccgcagatcaatcctcactcccctaaatttacttgcgcctgccccgacggcatgctgctggctagagatatgagatcctgcctgaccgaagcggaggcggcggtcgcgacccaggaaacatcaactgtgaggctgaaagtttcatccaccgcagtgcggacccaacacacaaccacgagaccagtcccagatacatctcggctgccaggggccacacccgggctgacaacagtcgaaatagtcaccatgagccaccaggccctgggggacgtcgccggcagaggaaacgagaagaagccttcctctgtgcgggccctgtctatcgtgctgcctatcgtactgctggtgttcttgtgtttgggagtctttctcttgtggaaaaattggcgactcaagaatattaacagcattaactttgataatcccgtatatcagaagactactgaggacgaggtacacatttgtcataatcaggatggctattcatatccctcacgccagatggtgtccctggaggacgatgtcgca

SEQ ID NO: 11302 - DNA, 2580 bp, Artificial Sequence
  derived and/or modified sequence
atgggaccttggggctggaaacttcgctggaccgtggcccttcttttggctgcagctggaaccgcagtgggcgatcgttgcgaaagaaatgagtttcaatgtcaggatggtaaatgtattagctacaagtgggtgtgcgatggatccgcggaatgtcaagatgggtcggatgaatcccaggagacttgtctgagcgtcacgtgtaagtcaggagatttttcgtgtggaggaagagtgaaccgatgcattcctcagttttggcgctgcgatggacaggtcgattgtgacaacggttcggatgagcagggttgtcctcctaagacctgtagccaagatgagttccgatgccacgatggtaagtgcatatcgagacaatttgtgtgtgactcagatcgggactgtcttgatggaagcgatgaagcgtcatgccctgtcctgacctgcggaccagcatcctttcaatgtaattcgagcacctgcatcccacaactctgggcatgtgacaacgatcccgattgtgaagatggtagcgatgaatggccacagcgctgtcgcggtctttacgtctttcagggagattcctcaccatgttcggcatttgagtttcactgtcttagcggagaatgcatccactcgtcgtggcggtgcgacggaggaccggattgtaaggacaaatccgatgaagaaaattgcgcggtcgctacttgtcgaccggatgaattccagtgtagcgatggaaactgcatccatggttcaaggcagtgtgacagagaatacgattgcaaggatatgagcgatgaggtgggctgtgtgaatgtaaccctttgtgaaggacctaacaagtttaagtgccattcgggcgaatgcattactcttgacaaggtttgcaatatggcacgtgattgtcgtgactggtcggacgaaccaattaaggagtgcggaaccaacgcatgcctggataacaacggagggtgctcacacgtctgcaacgatcttaagattggatacgaatgtttgtgccccgacggattccaactggtggcgcagcggcgatgtgaagatatcgatgagtgtcaagaccctgacacttgctcccagctgtgcgtcaacctcgaaggaggatacaagtgtcagtgcgaggaaggctttcaactcgatcctcatactaaggcatgtaaagcagtgggttcaatagcatacttgtttttcaccaaccgacatgaagtgagaaaaatgacccttgatcgatcggaatatacctcgctgatcccaaaccttaggaacgtggtggcactcgatactgaagtggcttccaacaggatttactggtcagatctgtcgcagcgcatgatttgctccactcaactggaccgcgcacatggagtgtcctcgtacgatactgtgatctcccgcgacatccaggcccctgacggtcttgcggtcgactggatccattcgaatatctactggaccgattccgtgctggggactgtgtcggtggccgatactaagggcgtgaagagaaagaccctttttagggaaaacggttcgaaaccgagagcgattgtggtcgacccagtgcatggctttatgtactggaccgactgggggaccccagccaagataaagaaaggtggactgaatggagtggacatctactcactcgtcacggagaacattcaatggccaaacgggatcactcttgacctgctttcgggcagactgtactgggtggatagcaagctccattccattagttcaattgacgtaaacgggggtaatcgaaaaactatacttgaagatgagaagcgactcgcacatccctttagcctggcagtgtttgaggataaggtgttttggactgacataatcaacgaagccattttctccgcaaacagactgaccgggagcgacgtgaatttgcttgctgaaaacttgctgtcaccagaggatatggtgctgtttcataacctgacccagccccgtggtgttaactggtgtgagcgaactaccctgtcgaatggaggttgccaatacttgtgcctgcctgcgccacagatcaaccctcattccccaaagttcacttgcgcttgcccggatggaatgctgctcgcacgggatatgcgcagctgtctgaccgaggccgaagcagctgtggctacccaagaaaccagcactgtgcgccttaaggtcagctccacggccgtgaggactcagcatacgactaccagaccagtccccgatacttcgagactgccaggtgccacccccggtctgactaccgtcgagattgtgacgatgagccaccaagcacttggagacgtggcaggaagagggaacgaaaagaagccatcgagtgtgcgtgcattgtccatagtcctccctattgtcctgctggtgtttctttgtctcggagtgtttctgctctggaagaattggcggctcaagaacattaactccatcaacttcgacaatccggtctaccagaaaactactgaggatgaggtccatatctgtcataaccaggacgggtattcatacccgtcccgtcaaatggttagcctggaggacgatgtggca

SEQ ID NO: 11303 - DNA, 2580 bp, Artificial Sequence
  derived and/or modified sequence
atggggccttggggatggaagcttagatggacagtggctctcctattggctgccgctggaaccgctgttggagaccgttgcgaacggaacgagtttcagtgtcaggatggcaagtgtatctcttataagtgggtatgtgacggcagcgccgagtgtcaggacgggagcgatgagagccaggaaacatgcctatccgtcacctgcaaatcgggcgatttttcttgtggtggacgagtgaaccgctgtattccacagttctggcggtgcgacggtcaagtggactgtgataatggaagcgacgagcaggggtgtccccccaagacttgctctcaagacgagttccgctgccatgacgggaagtgcatttcccgtcaattcgtatgcgattcagacagggactgtctggatggatccgatgaggccagttgccctgtgctgacctgcggacccgcatccttccagtgcaactcaagcacttgcatccctcagctgtgggcctgcgacaacgaccccgattgtgaagatggttccgatgagtggccgcagcgctgtcgaggactgtatgtctttcagggtgattccagcccgtgttccgctttcgaatttcattgcctgtcaggcgaatgtattcactcctcctggcgctgtgacggcggccccgattgtaaagataagtcagatgaagagaactgcgccgttgccacttgccgcccagacgaatttcaatgttcagacggaaactgtattcacggcagcagacagtgcgatcgcgagtatgattgtaaagacatgtctgacgaggtgggttgtgttaatgtcactctctgtgagggccctaataagttcaaatgccactctggagaatgtataacactcgataaggtatgtaacatggcgcgagattgtagggattggagcgacgagccaattaaagaatgtgggaccaatgcctgtttagataacaacggggggtgttcccacgtctgcaatgatcttaaaataggatatgaatgtctgtgccctgacgggtttcagctggttgcccagaggaggtgcgaagacatcgatgaatgccaggatcctgatacctgttctcagctgtgtgtcaatctggaagggggatacaaatgtcagtgcgaagaaggcttccaattggatcctcataccaaagcgtgcaaggctgtgggatccatcgcctacttatttttcacaaaccgccatgaggttcgcaagatgacactagatcgttccgaatatacctctctgatccccaacctccgcaatgtcgtcgcgctggataccgaggttgcaagtaatcgcatatactggtctgatctaagccagaggatgatttgttcaacgcagctagaccgggcacatggcgtgagttcctacgacaccgtgatcagtagagacattcaagcaccagacggcctggccgttgattggattcatagcaacatctattggacagattctgttctcggaaccgtttcagtagcagatacaaagggcgtcaaacggaaaactctgttccgtgaaaatggatcaaaaccacgcgccatcgtggtggaccccgtgcacgggttcatgtactggaccgactggggcactcccgccaagatcaagaaaggcgggctgaacggggtggacatctattcactcgtgaccgaaaacatacagtggccaaatggaatcaccctggatttgctgtcgggtcggttgtattgggtggattccaagctgcatagcatttccagtattgatgtgaacggtgggaatagaaagacaattcttgaggacgagaagcggctggcacacccttttagcctcgccgtgttcgaggataaggttttttggaccgatatcatcaatgaggccatcttcagcgctaacagactgactggaagtgatgtgaatctccttgcagaaaatttgctgagccctgaagatatggttctctttcataacttgacccaaccaagaggcgtgaattggtgtgagcggaccaccttgagtaacggagggtgtcagtacctgtgccttcccgccccacagatcaatccgcactcacccaagttcacttgcgcatgccctgacggcatgctcctggcgcgtgacatgagatcctgtctcactgaagccgaggctgccgtagctacccaggagacatcaacagttcgactgaaggtgtctagcacggccgtgcggactcagcataccaccaccaggccagttcccgacacttctcggttgcccggcgccacacccggactgaccacagtggaaatcgtcacaatgagtcaccaggcactgggagacgtggctggcagagggaacgagaagaagccttcttctgtccgggccctatccattgtgctgcctattgtcctgctggtgttcctttgtctgggggttttcctcctgtggaagaattggagactaaaaaatataaactccattaattttgataacccagtatatcaaaaaaccactgaggacgaggttcatatttgtcataatcaggacggatactcatacccatctcggcaaatggtgagcctagaggatgatgtggct

SEQ ID NO: 11304 - DNA, 2580 bp, Artificial Sequence
  derived and/or modified sequence
atgggtccttggggctggaaactgagatggactgtggcattgcttttggctgccgccggaactgccgttggcgaccggtgtgaacgtaatgagttccaatgtcaggacgggaagtgcattagctataagtgggtttgtgacggcagtgctgaatgtcaggatggctctgacgagagtcaagaaacctgtctctctgtgacttgcaaatccggagacttcagttgtgggggcagagtgaaccggtgtattccacagttttggagatgtgacggccaggtagattgcgataacggcagcgacgagcaggggtgtccaccaaagacgtgttcccaagacgagttcaggtgccatgacgggaagtgcattagccgacagttcgtctgtgactcagatagggactgtctagacggctccgacgaggcatcctgccctgtactgacatgtgggcctgccagctttcagtgcaacagtagcacctgcatcccacagctttgggcctgcgacaacgatcccgattgcgaggatgggagtgacgaatggccccaaagatgcagaggactgtacgtcttccagggcgacagtagtccttgctcagcctttgagttccactgtctgagcggcgaatgtatccactcctcatggagatgcgacggcggtccggactgtaaggacaaaagcgatgaggagaattgtgcagtcgcaacttgtaggcctgatgagttccagtgtagcgacggaaactgcattcacggttcccgacagtgcgatagggagtatgactgcaaggatatgtccgatgaggttggttgcgtgaacgttacactgtgcgagggcccgaataagtttaaatgccattcaggagagtgtataaccctggataaggtgtgcaatatggcccgtgactgccgtgattggagtgatgaacctattaaggaatgcggtaccaacgcctgtctggacaacaacggagggtgtagtcatgtctgcaacgatttgaagattggttatgagtgcctgtgccccgacgggtttcagctggttgctcaacgccggtgtgaggatatcgatgaatgccaggatcccgatacttgtagccagctttgtgtcaatcttgagggcggatacaagtgtcagtgcgaggaaggttttcaactcgatccgcacaccaaagcctgtaaggcggtgggcagcattgcttacctgttcttcaccaaccgacacgaggtacgcaaaatgaccctcgaccgaagtgagtacacctccctgatcccaaatctgagaaacgttgttgcactcgacacggaggtggctagcaatcggatttattggagcgacctctcacaacgcatgatatgtagtacccagttggacagagcccatggcgtcagttcgtacgacactgtgatatcccgcgacatccaggctccagatgggctggccgttgactggatacattcgaacatatattggactgatagcgtgctcggtacagtctccgtagccgacacgaagggcgtcaaacggaagaccctatttagagagaacggctctaaaccacgcgcgattgttgttgatccggtgcatgggttcatgtattggacggattggggaacccccgccaagatcaaaaaggggggcttgaatggagtcgatatttactctctagtgacagaaaacatacaatggcctaacgggattacactcgacctgctctccggccggctgtattgggtcgactccaaacttcacagcatctcttctatcgacgtcaacggtggtaataggaagactatcctggaggacgagaagcgtctagcacacccattttcccttgctgtgtttgaagataaagtattctggactgatataattaacgaggccatttttagcgccaacaggctgaccgggtccgacgtgaatttgctggccgagaacttgttgagtccagaagatatggtgcttttccataatttgacccagcctagaggggtcaactggtgcgagcgcaccacgctgtcaaatggtggctgccagtatctgtgtttgcctgccccacagatcaatcctcactcccctaaatttacctgtgcttgccctgacggaatgctcctggcgcgagatatgcggagctgcctaactgaggccgaagccgctgtggccacccaggagacctcaacagtgaggctgaaagtgtcatccaccgccgtgcgcacacagcacactaccaccagacccgtgcccgacaccagcagattacctggcgctactcctggcttgaccacagtggagatagtaacaatgagccaccaggccctgggcgatgtagccggcagagggaatgagaaaaagccttcctcagtgcgggccctctctattgtactcccaatagtcctgctcgtttttctctgtttaggggtgttcttgctgtggaagaactggaggctcaagaatattaattccatcaacttcgataacccagtgtaccaaaagaccacagaggatgaggtgcatatttgccacaaccaagacggttattcctatccttcgagacagatggttagccttgaggatgacgtggcc

SEQ ID NO: 11305 - DNA, 2580 bp, Artificial Sequence
  derived and/or modified sequence
atggggccgtgggggtggaagttgagatggacggtagccctgctgctggctgctgcaggaacagctgtaggagataggtgcgaaaggaatgagtttcagtgccaggatggcaagtgcatttcctataagtgggtgtgcgatggcagtgccgagtgtcaggacggcagtgacgaatctcaggagacttgtctctctgttacttgcaaaagcggagacttcagttgtggcggacgagttaatagatgcataccacagttctggagatgtgacggccaggtggactgcgacaatggaagcgacgaacagggctgcccaccaaaaacgtgcagccaggacgagtttcgttgccacgacggcaagtgtatcagcagacagtttgtgtgcgattccgaccgggactgtcttgacgggagcgacgaggcttcctgccctgtgctaacatgtggccctgctagcttccagtgtaactcctccacatgcatcccacaattatgggcctgtgacaatgaccctgactgcgaggatgggtccgatgagtggcctcagcggtgccgcggattatacgtgttccagggcgactcatccccctgttccgccttcgaatttcactgcttaagcggggagtgcattcactcaagctggcgctgtgacggggggccggattgcaaggacaaatccgacgaggaaaactgtgcagttgctacttgccggcctgacgaattccagtgctccgatgggaactgtatccatggttcgagacaatgtgatagagaatacgattgcaaggacatgtcagatgaggtgggatgcgtgaacgtcaccttatgcgaaggaccaaataaatttaagtgtcacagcggggagtgcatcactttggacaaagtctgcaatatggcgagggactgccgggattggagcgacgaacctataaaagagtgcggcacgaatgcatgtctcgataacaatggggggtgtagccacgtctgcaatgatttaaagataggttacgaatgtttgtgtcctgatggattccagctggtggcacagcgtcggtgtgaggacatcgacgagtgtcaggatccggacacatgctcacagctgtgtgtaaacctggagggagggtataagtgccagtgcgaggagggattccaattagatccgcataccaaggcctgcaaagctgttgggtctattgcctaccttttttttacgaaccgccacgaagttcgcaagatgacattggatcgatccgaatatacaagccttattcccaacttacgcaacgtagtggctctggacacagaagtagcctcgaataggatctactggtccgacctcagccaacgaatgatttgcagtacacaacttgaccgcgcccacggggtaagctcttacgacacagtgatatcacgggatatacaggcacctgatggactagcggtagattggatccatagcaacatttattggaccgattctgttctggggacagtttcggttgccgacaccaaaggagttaagagaaagactttgttccgtgaaaatggatccaagccccgggcgatcgtcgtggatcctgtgcacggatttatgtattggacagattggggcacccctgccaagatcaaaaagggaggtctgaacggtgtggacatatactcactggttaccgaaaatattcaatggcctaatggcatcacgctcgacctattaagcggtcgcctatactgggttgattccaagctccactcgatcagctccatcgatgtaaacggcggaaatcggaaaaccattctagaagacgagaaacgcttagcccacccattcagtctggctgtgttcgaagataaagtgttttggaccgatatcatcaatgaagcgatcttcagtgcaaataggctcacggggtctgacgtcaacctgcttgccgaaaaccttctgagtccagaggacatggtcctgttccacaacctaactcagccccggggagtcaattggtgcgaacgtactacattgtctaatggcgggtgtcagtatctgtgtctgccagcgcctcagattaatcctcactctccaaagttcacatgcgcctgccccgatggtatgctgttggcccgtgacatgcgctcttgtcttacagaggccgaggccgctgtggccacacaggagacctccacagtccggcttaaggtctccagtacagctgtgagaactcagcacacaacaaccagaccggtgccagacacctctaggctccccggagctactccaggactaactacagtggaaattgtgacgatgagccatcaagctcttggagacgtggctgggcgtggaaatgagaagaaaccatcgtcggttagagccctctctattgtactacctatcgtcctgctcgtcttcttgtgcctcggagtgttcttactttggaagaactggaggcttaaaaacattaacagcattaactttgacaatcccgtctaccagaaaaccactgaagacgaagtgcatatctgtcacaaccaggatgggtattcctacccctccaggcaaatggtgtccctggaagacgacgttgct

SEQ ID NO: 11306 - DNA, 2580 bp, Artificial Sequence
  derived and/or modified sequence
atgggaccgtggggatggaaacttaggtggacagttgcacttctgttagccgcagcaggaactgctgttggagatcgttgcgaacgaaatgaatttcaatgtcaagatggaaagtgtatttcatataaatgggtgtgtgacggatcagccgaatgccaggatggctccgatgagtcacaggaaacatgtttgagtgtgacctgtaagtcaggagatttctcttgcggaggaagagttaacaggtgcatcccccaattttggagatgcgatggacaagtcgattgtgataatggatctgacgagcaaggatgtccaccaaagacttgctcccaggacgaatttcggtgtcatgacggaaaatgtattagtcgccaatttgtttgcgattcggaccgtgattgcctcgacggaagtgacgaggcatcatgtcccgttttgacgtgtggaccagcgagtttccagtgcaatagttccacatgtattcctcaattgtgggcttgcgataacgatccggactgcgaggatggttctgatgaatggccgcagcgatgtcgaggactatacgtattccagggtgatagctcgccatgctcagccttcgaatttcactgtttaagtggagaatgtattcatagttcatggcgatgcgatggaggaccagattgcaaagacaagtccgatgaggagaactgcgccgttgcaacgtgtcgaccggacgaatttcagtgttcagacggaaactgtatccatggatcacgacaatgtgaccgagaatacgattgcaaagatatgtccgatgaggtgggctgtgtgaatgttaccctctgtgaaggaccaaacaagttcaaatgccatagtggggaatgtattacgttggacaaggtttgcaacatggcaagagattgccgagattggtctgatgaaccgatcaaagagtgtggcacaaacgcttgtctggataacaacggaggttgttcgcatgtttgcaacgacttgaagataggctatgaatgcctctgtcctgatggatttcaacttgtcgctcaaagacgttgcgaggatatcgacgagtgccaggacccagatacatgttcacaactttgtgtcaacttggaaggaggatataagtgtcagtgtgaggaaggattccagttggacccacatacaaaagcttgtaaggcagtcggtagtattgcatacctattttttaccaatcgtcatgaagtgcgaaagatgacgctggatagaagtgaatacacatcccttattccgaatttgcgtaatgtagttgctcttgatactgaggtggcttcaaaccgcatctattggtcagacctctcacaacggatgatctgtagtacacaattggaccgtgctcatggtgttagctcatacgatactgttattagccgggatattcaggctccagacggattggcagtagactggatccattctaatatttattggaccgattccgttctaggaacagttagcgtcgcagatacaaaaggagtcaagagaaagactctttttcgagagaatggctcaaagccccgagctattgtagttgatccagtgcatggatttatgtactggactgattggggcacaccagctaaaatcaagaagggaggcttgaatggagttgacatttacagtttggttacagagaacattcaatggcctaatggaataactctggatcttctttcaggaaggctgtattgggtggattcgaaactccatagtatttcttctatcgacgttaatggaggaaatcgaaaaactattctcgaagatgaaaaaagacttgctcacccattctcccttgctgtgtttgaagacaaggttttttggacagatattattaacgaagcaatcttttcagcgaatcgcttgactggctctgatgtgaatttactggcggaaaatctgctttcgccagaagatatggtactttttcacaatctcacccagccacgtggagtcaattggtgcgagcgaacaacactgtcaaatggtgggtgtcaatatttgtgcttgcccgcccctcaaattaatcctcactctccgaagtttacatgtgcctgtccagatggaatgctcctggcccgtgatatgaggagttgccttactgaagcagaagctgcggtggcaacacaagagacgtcaactgtcagattaaaagtttcaagcacagctgttcgaacccagcatactactacgaggccagttccagatacttcacgtttgccgggagcgaccccaggtcttacgactgtcgagatagttacgatgtcccatcaggctttaggagatgtcgccggacgcggaaatgaaaaaaaaccatcatcagtgcgtgccctgagtatcgtgctgccaattgtcctactggttttcctgtgtctaggtgtatttttattgtggaaaaattggcgtctcaaaaatattaattcgattaattttgataatcctgtttaccaaaaaacgacggaggatgaggtgcatatctgccacaatcaagacggctactcatacccatcgaggcaaatggtttctttagaagacgatgtcgct

SEQ ID NO: 11307 - DNA, 2580 bp, Artificial Sequence
  derived and/or modified sequence
atgggaccttggggatggaagctgagatggaccgttgccctgctgctcgccgcagctgggactgctgtgggcgataggtgtgagagaaatgaatttcaatgtcaggacggtaagtgcatttcatacaagtgggtgtgtgacggaagcgccgaatgccaagatggtagcgatgagtcccaggaaacttgtcttagcgtcacttgtaagtctggagattttagctgtggaggacgggtcaatcggtgtatccctcaattctggcgatgtgacggtcaggtcgattgcgataacggttccgacgaacaggggtgccctcctaagacctgctcgcaagatgagttccgatgccacgatggtaaatgtatctcgagacagtttgtctgcgatagcgacagagattgtttggacggatcagatgaggccagctgccccgtcttgacttgtggaccagcttcctttcaatgtaacagcagcacttgtataccacaactgtgggcatgtgataacgatcctgattgtgaggatggatccgatgaatggccccaacgctgccgcggactctacgtgtttcagggcgattcgtcaccttgttccgcattcgaattccattgcctctccggcgaatgtattcactcttcctggcgttgcgacggtggcccagactgtaaggataaatcggacgaggaaaactgcgcagtggcaacttgtcgacccgatgagtttcagtgtagcgatggtaactgtattcacgggtcacgccagtgcgaccgggagtacgactgtaaggacatgtccgatgaggtggggtgcgtgaatgtcaccctgtgtgaagggcctaacaagtttaagtgtcattcgggagaatgtattacgctggataaagtgtgtaacatggcccgggactgccgcgattggtccgatgaaccgatcaaggaatgtggaactaatgcatgcctggataacaatggggggtgtagccatgtgtgtaacgatctgaaaattggatacgaatgtctctgccctgatggatttcagcttgtggcgcagagacggtgtgaggacattgatgaatgtcaggatccagatacttgctcgcagctgtgcgtgaacctggaaggcggttataagtgccaatgcgaagaaggttttcaactggatcctcataccaaggcatgtaaggcagtggggtcgatcgcctaccttttctttaccaaccgccacgaagtgagaaagatgactcttgacagatcagaatacacctcactgatccctaacttgcggaacgtggttgcgctcgatactgaagtggcatccaaccgcatctactggagcgacctgtcgcaacgaatgatctgctcgacgcaactggacagagcccatggggtatcgtcctacgacacggttatatctagggatattcaagcaccagatggactggcagtcgattggattcattcgaacatttactggactgattccgtcctgggaactgtgtccgtggccgacactaaaggagtgaagagaaaaaccctgttcagagagaatgggtcgaagcctcgggcaatcgtggtggatccagtccatgggtttatgtactggacggactggggcactccagccaagattaagaagggtggactcaacggcgtggatatctactcccttgttactgagaacattcagtggcctaacggtatcaccctggacctgctttccggaaggctctattgggtcgactcaaagctgcattcgatcagctcgattgacgtgaacgggggcaataggaaaacgatactggaagatgaaaagagacttgcacaccccttttcccttgcggtgttcgaagataaggtgttctggactgacattatcaacgaggccattttctcggcaaatcgcctgaccggctccgatgtcaacctgcttgcagagaacttgttgtcccccgaggatatggtgctgttccataacctgacccagccacgtggggtgaactggtgtgaaaggactactctctcaaacggtggctgtcagtacttgtgtctgccagcacctcagattaatcctcattcgcccaagttcacctgtgcgtgcccagatggaatgcttctcgccagagatatgcgctcttgtcttactgaagcagaagcagcggtggccactcaggaaacctctaccgtgcgcctgaaagtttcgtcgactgccgtgcggacgcaacacactaccaccagaccggtgcctgatactagccggctgcctggtgctactcctgggctgacgaccgtggagatcgttactatgtcacaccaggcactcggtgacgtggcaggtaggggaaatgaaaagaagccttcctcggttcgtgcactctcgatcgtgcttcccattgtccttcttgtttttctgtgtctgggcgtgttcctcctttggaagaactggaggttgaagaacattaactcgattaacttcgacaacccagtgtaccaaaagacgaccgaggacgaagttcacatctgtcataatcaggatggttactcctacccctcgcggcaaatggtcagcctggaggacgatgtggca

SEQ ID NO: 11308 - DNA, 2580 bp, Artificial Sequence
  derived and/or modified sequence
atgggcccctgggggtggaagctgcggtggaccgtggccttattgcttgcagctgctggaacagcagtgggagatagatgcgagcgaaacgagttccagtgccaggacggtaaatgcatttcctataagtgggtgtgcgatggaagtgccgaatgccaggatgggtctgacgagagccaggagacatgtctgtccgtgacctgtaaatccggtgatttctcctgcggcggaagagtgaatcggtgcattccgcagttctggcgttgcgacggtcaagtggactgtgataatggtagtgatgagcaaggctgcccccccaaaacctgctcccaagacgaatttcgctgccatgatggaaaatgtatctcaaggcaattcgtgtgtgacagtgatagggactgccttgacgggtccgacgaagccagctgccctgtgttgacctgcggccccgcatctttccaatgcaactccagcacctgtatcccacaactgtgggcttgtgacaatgaccctgattgcgaagatggatcagatgaatggccacagaggtgtcgtgggctgtatgtgtttcaaggagatagcagcccttgctccgctttcgaatttcattgcctgagcggcgaatgtatccacagcagttggcgatgtgatggaggacctgactgtaaagataagtcagacgaggaaaactgcgctgtcgcaacatgtagaccagacgagttccaatgctccgatggaaactgtatccacgggagccgccagtgtgacagggaatacgactgcaaagacatgtcagatgaagtgggatgtgtcaacgtcaccctgtgcgaggggcccaataaattcaagtgccacagtggagagtgcatcacacttgacaaggtgtgcaatatggctagggattgtagggactggagcgacgaaccgataaaagagtgcgggactaatgcatgccttgacaacaacggtggatgttcccatgtgtgtaacgatctcaaaattgggtacgagtgcctgtgtcccgacggatttcaactggtggcccagcgcaggtgcgaagacatagacgagtgccaggatcctgacacttgtagccaactctgcgtgaacctggagggaggctataagtgccagtgcgaggagggatttcagcttgacccacatacaaaggcttgtaaagcagtcggctccatcgcatatctgttttttaccaaccgccacgaggtcagaaaaatgacactagataggtcagaatatacctctttgattcccaacctccggaacgtggtcgcactggacaccgaggtcgcctcaaacaggatttattggagcgacctgtcacaaaggatgatttgttctacgcagctggacagagcccacggcgtaagttcttacgacacagtcattagcagagatatccaagcaccggacggtctggcagttgactggatccatagcaacatttactggactgacagcgtgctgggaacggtgtcagtcgcagacaccaagggggtgaaacggaaaaccttgttccgcgagaacggatctaaacccagggcgatcgtggtggatccggtacacggatttatgtattggacagattggggcacccccgccaagatcaaaaaaggcgggcttaacggcgtggacatatatagtttggtaaccgagaacatccagtggccgaatggcatcacattggacctcctcagcgggaggctttactgggtggactctaagctgcatagcatctcttctattgatgtgaatggcgggaaccggaaaactattctggaggacgagaagagactcgcacacccattcagcctggccgtcttcgaagataaggttttttggaccgatattattaacgaagccatcttttctgctaataggctcaccggatcagatgtcaatctcctggctgagaacctgctgagtccagaagacatggtgctgttccataatcttacacaacctaggggcgtcaactggtgcgagagaacaacacttagcaacggaggctgccaatacctgtgtctccccgctccccagataaacccccactcgccaaaatttacttgcgcttgtccagatggaatgctgctggcaagggatatgagatcgtgcctaactgaggcagaagcggctgtggctacacaggagactagcacagtgcggttgaaggtgtcctcaaccgctgttaggactcagcacaccactacaaggccagttccggatacctcacgtctacccggagccactccaggtctgaccaccgttgagatcgtaactatgagccatcaggctcttggcgatgttgccggccgaggtaacgaaaaaaaacccagctcagtgagagcattgagcattgtgttaccaatcgtcctgttagtctttctttgtttgggcgtctttcttttgtggaagaactggagactcaaaaatatcaattccatcaactttgacaatcccgtttatcaaaaaaccaccgaggacgaagtccatatctgccacaatcaagacggatactcctacccaagcagacagatggtgagcttggaagatgacgttgcg

SEQ ID NO: 11309 - DNA, 2580 bp, Artificial Sequence
  derived and/or modified sequence
atgggcccttggggatggaaactgaggtggaccgttgccttgcttcttgccgcagccgggaccgccgtgggagaccgttgcgagcgtaacgaattccagtgccaggatgggaaatgtatatcttataaatgggtgtgcgatggcagcgcagaatgccaggacgggagtgatgaatcacaggaaacttgtctgtccgtcacctgtaagtcgggcgatttttcctgtggtgggagggtgaaccggtgtattccccagttctggcgctgcgatggccaggtggactgtgataacggctctgacgagcagggctgtcctcctaagacctgttcccaggacgagtttagatgtcacgatgggaagtgcattagcaggcagttcgtctgcgattctgaccgtgattgcctggatgggtcagatgaggccagctgtcctgtattgacttgtggtccagcctcctttcagtgtaatagttctacctgtattccccagctgtgggcttgtgacaacgatcctgactgcgaggacggttctgatgagtggccccaacgatgtagaggcctgtatgttttccagggtgacagctctccctgctcagcctttgagttccactgcctatccggggaatgtatccactcttcatggagatgcgacggggggccagactgcaaagacaagagcgacgaggagaactgcgctgtggccacttgcaggccagatgaattccaatgctcagatggcaactgcattcacggtagccggcagtgcgaccgcgagtatgactgtaaggacatgagtgatgaggttgggtgtgtcaatgtaactttgtgcgagggtccgaacaagttcaagtgtcatagtggagagtgtatcacactggataaggtctgcaatatggcccgagactgtagggattggtcagatgaacccatcaaagagtgtggtacgaatgcgtgcctggataacaacggagggtgcagtcacgtgtgtaacgacctcaaaatcggatatgaatgcctttgtcccgatgggttccaactggtggcccagaggaggtgtgaagacattgacgagtgccaggaccctgatacttgcagtcagctgtgtgtgaacctggagggaggttataagtgccagtgtgaggaaggattccaattggacccacatacaaaagcatgcaaggcggtaggatcgatagcttatctgttcttcacgaaccgccacgaggtgcggaaaatgacactagatcggagcgagtatacatccctaatcccgaacctgaggaatgtcgtagcattagacacagaagtcgctagtaatcggatctattggtccgatctgtctcagcggatgatctgcagcacgcagctcgatcgggctcacggggtgtcttcctacgataccgtgatctctcgcgacatccaggccccggacggactggccgtcgactggattcactcgaatatctattggaccgacagcgtgctaggtacagtcagcgtggctgacaccaagggcgtgaaaagaaaaacactatttcgggagaacggatctaagcccagagctattgtcgttgatccagtccatggcttcatgtattggactgactggggcaccccagccaaaatcaagaaaggggggctcaatggtgttgatatatatagcttggtgactgaaaacattcaatggccaaacggaatcacactcgacctgctatccggaagactgtattgggtggactcaaaactgcatagcataagtagcatcgatgtcaacgggggcaacagaaaaactatattggaagatgagaaacgcttggcccaccctttcagcctggcggtctttgaggataaggtgttttggactgacattataaacgaggctatcttctccgcaaatagactcactggatctgacgtgaacctgctagccgaaaacctcctttcacccgaagatatggtcctctttcataacttaacacagccccgaggtgtgaattggtgtgagcggaccaccctgtccaacggcggatgccagtacctgtgtctgcccgcaccccaaattaacccacatagtcccaagtttacttgtgcatgccctgacgggatgcttctggccagagatatgagaagctgtcttactgaggcagaggccgccgttgcgacccaggagacttccactgtgcgtctgaaggtcagttctacagccgtgcggacccaacataccactacccgaccagtacctgatacatctcggttgccaggcgcgacccccggcctaaccactgtggaaatcgtcactatgtcacaccaggctcttggagatgtggctggtagaggaaacgagaaaaagccctcgagtgtgagggctctgtctattgtgcttcctatagtcttgctggtcttcttatgcttgggcgtgttcctgctgtggaagaattggaggctgaaaaatatcaactctattaacttcgacaatcctgtgtatcagaagacaacagaagacgaggtgcacatatgccacaaccaggacggttatagttatcctagtcgccagatggtgtcgttagaggatgatgtcgcc

SEQ ID NO: 11310 - DNA, 2580 bp, Artificial Sequence
  derived and/or modified sequence
atgggcccttggggatggaaacttcggtggacggtggcactgctgctcgcagccgcgggaactgccgtcggggaccggtgcgaacgcaatgaattccaatgccaagatggaaagtgtatcagttacaagtgggtgtgcgacgggagcgcggaatgtcaggatggaagtgacgagagccaggaaacttgcctttcagtcacgtgtaaatcaggcgacttcagctgcggtggccgagtcaacaggtgcatcccgcagttctggcggtgcgacgggcaggtggattgtgacaacggcagcgacgagcagggttgtcctcctaagacgtgctcgcaggacgaattcaggtgccatgatggaaaatgcatcagccggcagttcgtctgtgactccgaccgggattgcctggacggctccgacgaggcaagctgcccagtgttgacttgtggaccggcctccttccaatgcaacagctccacttgcatcccccagctgtgggcgtgcgacaacgatcctgactgcgaggatggttcagatgagtggccgcagcgctgccgcggactgtatgtgttccagggggatagttcgccatgttccgccttcgaattccattgcttgtccggagaatgtattcactcgtcctggcgctgcgacggaggaccagattgcaaggacaaatcggacgaggaaaattgcgctgtggctacctgccggcccgacgaattccagtgctccgacggaaattgcatccacggatcgcgccaatgcgatagagaatacgactgcaaggatatgtctgacgaagtgggatgcgtgaacgtgactctgtgcgagggtccgaataagttcaagtgtcactccggagagtgcatcacgctggacaaggtgtgtaacatggcgagagattgtagagactggagcgacgaacctatcaaagagtgcggcactaacgcatgcttggacaataatggcggatgttctcacgtctgcaatgatctgaaaatcggttacgagtgtctctgcccagacggcttccagctggtcgcgcagcgccgctgcgaggatatagacgaatgtcaggacccagacacctgttcgcaactctgtgtgaacctcgaaggaggctacaagtgccaatgcgaagagggctttcagctcgatccgcataccaaggcgtgcaaggcagtgggtagtatcgcctacctgtttttcactaaccggcatgaagtgcgcaaaatgactctggacagaagcgagtacacctccctgatcccgaacctgcggaacgtggtcgccctggacaccgaggttgcatccaataggatctactggtcggacctgagccagagaatgatctgctccacccaattggatagagcgcatggagtctcctcctacgatactgtgatctcgagggatatccaagctccagacggactcgctgtcgactggattcactcgaacatctactggactgattcggtgcttggcaccgtgtccgtggcagataccaagggcgtaaagcggaaaactctcttccgcgaaaacgggtcgaagccgcgcgccattgttgtggacccagtccacgggttcatgtactggaccgactggggaaccccagccaagatcaaaaaaggcggattgaatggagtggacatctacagccttgtcaccgaaaacatccaatggccgaatggaatcactctggatcttctctcagggcgcctgtactgggtggactcgaaactccactcgatttcctcaatcgacgtgaacggtggcaaccgcaagaccatcctcgaggacgaaaagcgcctggcacatccgtttagccttgccgtgtttgaggataaggtgttctggaccgacatcattaacgaggccatctttagcgccaataggctgactggatcggatgttaatcttctggcggaaaaccttctgtcacctgaggacatggtcctctttcataatcttacccagccgcgcggtgtgaactggtgcgaacgaaccactctctcgaatgggggatgccagtacctctgcctgccggcgccacagatcaacccgcatagcccaaagtttacttgcgcttgcccggacggtatgctgttggctcgggatatgcgctcttgcctgactgaagccgaggccgcggtggcgactcaagaaacctccacggtgcggctgaaggtatcatcaaccgccgttagaactcaacacactaccacccgccccgtgccggacacctcacggttgccaggagccacccccggactgaccaccgtggaaattgtgactatgtcacaccaggcactcggagatgtggccgggcggggaaacgaaaagaagccgtcatccgtcagggctctgagcattgtgctccctatagtgctgctggttttcttgtgcctgggagtgttcctgctgtggaagaactggcgactgaagaacatcaactcgatcaacttcgacaaccccgtctatcagaaaaccacggaggacgaagttcacatctgccacaatcaagacggctactcgtaccctagtagacagatggtatcgctcgaggatgatgtcgcc

SEQ ID NO: 11311 - DNA, 2580 bp, Artificial Sequence
  derived and/or modified sequence
atgggaccttgggggtggaagttgaggtggacggtagcacttctcttagcagctgctggaaccgctgtgggggatagatgcgagcgtaatgagtttcagtgtcaggacggcaagtgcatctcatacaagtgggtctgtgacgggagcgcagagtgccaagatggctcagacgagtcccaggagacgtgtttatctgtgacttgtaagagtggtgacttttcctgcggcgggcgcgtcaatcgatgtattcctcagttctggaggtgcgacggtcaggttgactgcgataacgggtcggacgagcagggatgtcccccaaaaacttgttcacaggatgaattccggtgccacgatggaaagtgcatcagccgtcagttcgtgtgtgactcagaccgcgactgtctggatgggtcagacgaagcatcatgccccgtcttgacttgtggaccagctagtttccagtgcaactccagcacatgtattccccagctatgggcctgcgataacgatccagattgcgaggatggatccgatgagtggccccaaaggtgcaggggcctgtatgtgttccaaggagactctagcccttgtagtgcattcgagttccattgcttgagtggggagtgcattcatagcagctggcgatgcgacggcggtcctgactgtaaggacaaatccgatgaggagaactgcgcagtagccacgtgccggccagatgagtttcagtgctccgatggaaactgtatacatggaagccggcaatgtgatcgggaatacgattgtaaggatatgtctgacgaggtgggttgtgtgaatgtgactctctgcgaaggcccaaataagttcaaatgccatagcggcgaatgcatcacattggacaaagtctgtaatatggcccgagactgccgagactggagtgatgagcccattaaggaatgcggcaccaacgcatgcctggacaacaacggagggtgttctcatgtgtgtaacgacttaaagatcggttatgaatgtttgtgccccgatggcttccagttggtggcccagcgccgatgtgaggatatcgatgaatgtcaggaccctgatacctgcagccagctgtgcgttaatctagaaggtggatacaaatgccagtgtgaggaaggctttcaattggacccacacacgaaagcatgcaaagcagttgggtcaattgcgtatctgtttttcacgaatcggcatgaggttagaaagatgacgctggaccgaagcgagtacacaagcttaatcccgaatttgcgcaacgttgtcgcgctggatacagaggtcgcatccaataggatttactggtctgacctgagtcagaggatgatctgcagcacacagttggaccgcgctcacggagtttccagctacgacacggtgatctcgagagacatacaagctcctgatggcctagctgtcgattggatccattctaatatttactggactgacagtgtgctcggaacagtctcggtggctgacaccaagggggtcaaacgcaaaaccctcttccgcgaaaacggctctaagccaagggctatcgtggtggaccccgtccatggcttcatgtactggaccgattggggcacccctgccaaaattaagaaggggggcctgaacggggtggacatttactccttagtgactgagaatattcagtggcctaatggcattacgttggacctgctgtctgggcggctatactgggtggacagcaagctgcatagcatcagcagcatcgatgtgaatggtggaaatcggaaaacaatcttggaggatgaaaagcgcttggcacacccgttcagtctcgccgtgtttgaagacaaggtgttttggacggacattatcaatgaggccattttctcagccaacaggttgactggtagtgacgtgaatctcctcgccgagaacttgctttcacctgaagacatggtccttttccacaatcttacccagccccgcggagtgaactggtgcgagagaactaccctcagtaatggtggctgtcagtatctttgcctacccgcaccacaaataaaccctcatagtcccaaatttacctgcgcttgccctgacgggatgttattggctagggacatgcgcagctgtttgacagaagctgaggcagccgtcgctacacaggagactagtactgtgcggctgaaagtcagcagcactgcggtgagaacccagcacaccacaacacggccagtaccagatacaagtaggctccccggcgccactcctggtctgaccaccgtggaaatcgtcaccatgtcccaccaggcactgggagatgtggcaggccgcggtaacgagaagaaacccagtagcgttagggccctgagcatagtgctgcccatcgttttactggtgtttctgtgtttgggcgtttttctcctgtggaaaaattggaggctcaaaaatatcaattctatcaatttcgataaccccgtgtatcagaagacaacagaggacgaggtccacatttgtcacaatcaagatgggtactcatacccctcacgacagatggtctccttagaagacgacgtggct

SEQ ID NO: 11312 - DNA, 2580 bp, Artificial Sequence
  derived and/or modified sequence
atgggcccatggggatggaaactgagatggacggtcgccctcctgctagctgccgccggcactgctgtgggggaccggtgtgagcggaacgaattccagtgccaggatggcaaatgtatatcctataagtgggtgtgcgacggcagtgctgagtgccaagacgggagcgacgagtctcaagagacctgtctaagtgtcacctgcaagagcggcgatttcagctgtggcggccgagtgaaccgctgcataccacaattctggcggtgcgatgggcaggtcgactgcgacaacggatccgatgaacagggatgcccaccaaagacctgttcccaggatgaattcaggtgtcatgatggtaaatgcatttcgagacagtttgtgtgtgactctgatcgagactgcctcgatggctccgacgaggcatcctgccccgtgctgacatgtgggcccgcatcctttcaatgcaatagtagcacttgtatacctcagctgtgggcatgcgataacgacccagattgtgaggacgggagcgatgaatggccgcagaggtgtaggggactgtacgtgttccaaggagatagctccccctgctccgccttcgagttccactgtctcagtggggagtgtatccactcgagctggaggtgcgacggcggtcccgactgtaaggacaaatcggatgaggagaattgcgcggtggccacctgtagacccgacgaattccagtgctccgatgggaactgtatacacgggtcgcgacagtgtgaccgggagtatgactgcaaggacatgtctgacgaagtggggtgcgttaacgtgactctgtgcgagggtcctaacaagttcaagtgccacagcggcgaatgcattacgctggacaaagtatgcaatatggcgagagattgtcgagactggtccgacgagcccatcaaggagtgcggcactaatgcctgtctagataataatggcgggtgttcccatgtctgcaatgatctcaaaattggctatgaatgtttgtgtcccgatggatttcagttggtggcccaaagaaggtgtgaagacattgatgagtgtcaggatccagacacatgttcccaactctgtgtgaatttggagggcgggtataagtgtcagtgtgaggagggcttccagctcgacccccacacgaaggcttgcaaagccgtcggcagtatcgcctacctgttttttacgaaccgtcacgaagttagaaagatgacactagaccgctcagagtacacttccctgattcctaatttacgtaacgtagtagctctggacacggaagttgcttccaacaggatctattggagtgacctgtcccagaggatgatatgttccacccagctcgaccgtgcccacggggtgtcctcatatgacacagtaatatcccgggacattcaggccccagatggcctggccgtcgattggattcactcaaacatatactggactgactcggtgcttggcaccgtgtctgtggcagataccaagggagtgaagcgaaaaaccctgtttagggagaatggatcaaaacccagggccatcgtcgttgaccctgtgcatgggttcatgtactggacagactggggcacacccgctaaaatcaaaaaagggggcttaaacggagtggacatctactccctcgtgaccgagaacatacagtggcctaacggtataacacttgacctattatctgggaggctctattgggtggattctaaactgcactctatttccagcatcgatgtcaacgggggaaacaggaaaaccatcctggaagatgaaaagcggttggcccaccctttttctctcgctgtgttcgaggacaaggtattctggactgatattatcaacgaggccatctttagcgcaaatcgcctgaccggatctgatgtgaatcttctggcagagaatctgctctcccccgaggatatggtgctctttcataacttaacacagccgcgcggtgttaactggtgcgagcggacaactctgtctaacgggggctgtcagtatctttgtctgccggcaccacagatcaacccgcactcccctaagttcacgtgcgcatgtcccgatgggatgttgctcgcccgggacatgcgctcctgcctcaccgaggccgaagctgcagttgctactcaggagacctcgacagtgagacttaaagtcagcagcacagccgtgcgcacccagcacacaacaactagacccgtgcctgacacttctcgactcccaggtgcaacgcccggcctgacaactgtcgagatagtgaccatgagtcaccaggcccttggggacgtcgccggacgggggaacgaaaagaagccctctagcgtcagggcactgtcaatcgttctgccaatcgtgctgctggtgtttctgtgcctgggcgtcttcctattatggaagaactggcgcctgaagaacatcaactctataaattttgacaaccccgtctaccagaagacgacagaggacgaggttcatatctgccacaatcaggatggctattcttatccctctaggcagatggtgagcctcgaggacgacgtggcc

SEQ ID NO: 11313 - DNA, 2580 bp, Artificial Sequence
  derived and/or modified sequence
atgggaccctgggggtggaagctgcgctggacagttgctcttctactggctgctgctggaactgcagtgggagaccggtgtgaacgaaacgagtttcaatgccaagacggcaaatgcatatcctacaaatgggtttgtgacggctccgccgagtgccaagacgggtcagacgaaagtcaggaaacatgcctaagcgtgacatgcaagtcaggggatttcagctgcgggggccgagtaaaccgctgtattccacaattctggaggtgcgacgggcaggtggattgcgacaacggatccgatgagcaaggatgtccccccaaaacatgctctcaggacgagttcaggtgccatgacggcaagtgcatctcgcgacagtttgtctgcgactccgatagggactgcttggatgggtcagacgaggcttcctgtcctgttttgacttgtggaccagcctcgtttcagtgcaacagttcaacttgtataccccagctatgggcctgtgacaacgatccggattgcgaagatggcagcgacgaatggccccagaggtgcagaggcctatatgttttccaaggagactcctccccttgctccgcttttgagtttcactgcctgagcggggaatgtatccattccagctggagatgcgacggtggtcctgactgtaaggacaaaagcgatgaagaaaactgtgccgttgctacgtgccgccccgacgaatttcaatgcagtgatggaaattgtatccatggctcacgccagtgcgatcgagagtatgattgcaaggatatgtctgatgaggtggggtgcgtgaacgtaactctgtgcgagggccccaacaagtttaagtgccatagcggggagtgtatcacgcttgataaggtatgtaacatggcccgagactgccgagactggagcgatgaacctattaaagaatgcggtactaacgcctgcctcgacaacaacggaggctgtagccatgtgtgtaatgacctgaagatcggctacgagtgtctgtgtcctgacggattccagttggtggctcagcgacgatgcgaagatatagatgagtgccaagaccccgacacttgtagccagctctgcgtcaatttggaaggggggtataagtgccagtgtgaagaaggctttcagctggatccccacacaaaagcttgtaaggccgtgggatccatcgcgtatctgttcttcaccaacaggcacgaagtcaggaagatgaccctcgatcggtctgagtacacctcacttattccaaacctgaggaacgtggtagccttagataccgaggttgcctcaaatcggatatattggagtgacctgtctcagagaatgatctgctcaactcagctcgacagagcacacggtgtttccagttatgacaccgtgatctcgagagacatccaagcccccgatggcctggccgtggactggattcactcgaatatctactggacagactcggtgctggggacggttagtgtggccgacaccaagggtgtgaaacgaaagaccttgtttagggagaatggctcaaaaccacgggccatagttgtcgatcctgttcatggattcatgtactggaccgactgggggacgccggcgaagataaaaaagggcgggctgaacggcgtggacatctactctctggtcactgaaaatatacagtggccaaacggaatcaccctggatctgttgagcggccgactctattgggtggatagtaaactccattccattagttcaattgacgtcaatggaggaaacaggaaaaccatcctggaggatgagaagcgactagcccatcccttcagcctagcggtgtttgaagataaggtgttttggactgacatcattaatgaggctattttttccgccaaccgactgaccgggagcgatgtcaatttgctggccgaaaacttgctgagtcccgaagatatggtactgttccacaacctcacccagcctcgtggagttaactggtgtgaaaggactaccctgtccaacggtggttgccagtatctgtgcctccccgcaccccagataaacccccactctcccaaatttacttgcgcatgcccagacggtatgcttctggcaagggacatgaggtcttgtctgaccgaggccgaggcggccgttgccacacaagaaacctctaccgtgcgactgaaagtctcctccacggcagtgcgaactcagcatactacaacaaggcctgtccccgacacaagccgactgccaggcgcaacccccgggttgacgactgttgagattgtcaccatgtctcaccaggccttgggggacgttgccggaagaggcaacgaaaagaaaccaagctccgtccgagctctgtcgattgtgttaccaatagtgctcctggtgtttttgtgcttgggcgtttttctgctgtggaagaattggcggctgaaaaacataaatagcataaacttcgacaatccggtgtaccagaagaccacagaagacgaagttcacatctgccacaatcaagacggatattcctaccctagccggcagatggtctcgttggaggacgacgtggca

SEQ ID NO: 11314 - DNA, 2580 bp, Artificial Sequence
  derived and/or modified sequence
atgggcccttggggctggaagctgcgctggacggtggcgctgctgttggcggcagccggtacggctgtgggggacagatgtgagcgcaacgagttccagtgtcaggacggaaagtgtatctcgtacaaatgggtctgcgacggaagcgctgaatgccaggatggcagtgatgaatcacaggaaacctgcctcagtgtcacttgtaagagcggcgacttcagctgcgggggacgcgtgaacagatgcattcctcagttttggcgttgcgacggacaggtggattgcgataacggcagcgatgagcaaggatgcccgccgaaaacgtgtagccaggatgagttcagatgccacgacgggaaatgcatctcaaggcagttcgtgtgcgactcggaccgcgactgtctcgatggctccgatgaagcaagctgccctgtattgacctgcggaccagcatcctttcaatgcaactcgtccacctgcatccctcaactgtgggcctgcgacaacgatccggattgtgaggacggatccgacgaatggccccagcggtgtaggggactttacgtgttccagggggactcgtccccgtgctcagcattcgaattccactgcttgtcaggagagtgcatccacagttcatggcgctgcgatggaggtccggactgcaaggataagtcggatgaagagaattgcgccgtggccacctgcagaccggacgagtttcaatgctccgacggcaattgcatccacggttcccggcagtgcgatcgagagtacgattgcaaggacatgtccgacgaggtgggatgtgtcaatgtcaccctctgtgagggtccgaataagttcaaatgccattcgggtgaatgtatcactctcgataaagtttgcaacatggcccgcgactgccgcgattggtcagacgaacctatcaaggaatgcggaaccaacgcttgcctggataacaacggagggtgttcccatgtctgcaacgacctgaagattggatatgaatgtttgtgccccgacggattccagctcgtcgcccaacgcaggtgtgaggatatcgacgagtgccaggacccagacacctgttcccagctctgcgtgaacttggaaggaggatacaagtgccaatgtgaagaaggatttcaactcgacccgcacaccaaagcctgtaaggcggtggggtccatcgcttatctctttttcactaaccggcatgaggtccggaagatgaccctggatcgcagcgaatacaccagcctcattccgaacctcaggaacgtcgtggcactggataccgaggtggcttccaaccggatctactggtcggacctctctcaacggatgatctgttctacccaattggaccgcgcgcatggcgtgtcgtcgtatgacacggtgatcagccgtgatattcaggcacctgacgggctggcggtggactggatccactcgaacatttactggaccgatagtgtgttgggaactgtctcggtagccgatactaagggagttaaacgtaagactctcttccgggaaaatgggtcgaaaccgcgggccatcgtggttgatcccgtgcatgggtttatgtactggactgactggggcacccccgccaagatcaaaaagggagggctgaatggagtcgacatttactctctcgtcactgagaatatccagtggccaaacggcattactctcgacctgctgtcgggtcggctgtactgggtggattccaaactgcattctatttcgagcatcgacgtgaacggtgggaatcgcaagactatcctggaagatgagaaacggcttgcccacccgttcagtctggccgtgtttgaggacaaagtcttttggactgacataatcaacgaagccatcttctcagccaatagacttaccggaagcgacgtgaatcttctggccgaaaatcttctgtccccggaagatatggtgttgttccacaatctcacccagccgcgaggcgtcaactggtgtgaacgcactaccctgagcaacggaggctgccaatacctgtgcctgcctgcgccgcaaatcaacccacacagcccaaagttcacttgcgcatgcccagatggaatgctgctggcccgggacatgcggtcctgcctgaccgaagctgaagcggccgtggcgacccaggaaacttctaccgtcagactgaaggtgtcctccactgcggtgcggacgcagcatactaccactagaccagtgcctgacacttcgcggctgccaggagccaccccgggtctgacgactgtggaaatcgttactatgtcacaccaggctctgggcgacgtggcaggtagaggaaatgagaagaagccctcctcagttcgcgcgctgtccatcgtgctgccgatcgtgctgcttgttttcctctgcttgggagtgttcctcctctggaagaactggcgcctgaagaacatcaactccatcaatttcgacaacccagtgtaccaaaagacgactgaggacgaggtacacatctgtcataatcaggacggttactcctacccatcgcgccaaatggtgagcctggaggatgatgtcgca

SEQ ID NO: 11315 - DNA, 2580 bp, Artificial Sequence
  derived and/or modified sequence
atgggaccgtggggctggaagctgcgctggactgtggccctccttttggcggctgctggaactgccgtgggggaccggtgcgaaagaaacgaatttcaatgccaagacggaaaatgcatctcgtacaaatgggtgtgcgatggatccgcagaatgccaggacggctcagatgagtcacaagaaacctgcctgagcgtgacctgcaagtcgggagacttctcgtgcggcggtcgcgttaataggtgcatcccgcaattctggcggtgtgatggacaggtcgattgcgacaacggctcggacgaacagggttgcccgccaaagacgtgttcacaagacgaatttcgctgccatgacggcaagtgcatctcgcggcagtttgtctgcgatagcgacagagattgtcttgacgggtccgacgaagcatcgtgcccggttctgacctgcgggccagcctcattccagtgcaattccagcacctgtattccgcaactgtgggcttgcgataacgaccccgattgtgaagatggaagcgacgaatggcctcagagatgcaggggcctgtacgtctttcagggcgactcctccccgtgctcggcgttcgaatttcactgcctttcgggagagtgtattcattcctcgtggcggtgcgacggaggacctgattgtaaggataagtcggacgaggaaaattgcgcggtggcgacctgccggcctgatgaattccagtgcagcgatggaaactgcatccacggatcgcgccagtgtgacagggagtacgactgcaaggatatgtctgatgaagtgggatgcgtgaatgtgaccttgtgcgaaggcccaaataagttcaaatgccattccggagaatgtatcaccctcgacaaggtgtgcaacatggccagggactgtcgggattggagcgatgagccgatcaaagagtgcggaaccaatgcttgtctggacaataacggaggatgctcgcacgtgtgcaacgacttgaaaatcggctacgagtgcttgtgcccggacggatttcagctcgtggcccagcggcgctgcgaggatatcgacgaatgccaagacccggacacctgcagccaactgtgcgtgaacctggaaggcggttacaagtgccaatgcgaagaaggatttcaactggacccacatactaaggcctgtaaggccgtgggctcaattgcgtacctgttcttcactaaccggcacgaagtgagaaaaatgaccttggatcgctcagagtacaccagcctcatcccgaacctgcgcaatgtcgtggccctcgacaccgaagtggcatcgaataggatctactggtccgacttgtcgcagagaatgatttgtagcacgcagctggatagagcacacggagtctcatcatacgacactgtgatttcccgggacatccaggccccggatggccttgctgtagactggatccactccaacatctattggactgactcagttctgggaactgtgtcggtggctgacaccaagggcgtcaaacgcaagaccctgttcagagagaacgggagcaagccacgggcgatcgtggtggatccagtgcacggtttcatgtactggactgattggggaactccggcgaagatcaaaaagggaggcctgaatggagtggatatctactcactcgtgactgagaacatccagtggccaaacggcatcaccttggacctgctgtccggtaggctctactgggtggactccaagctgcactcaatcagctcgatcgacgtgaacggaggtaaccgaaagacgatcttggaggacgaaaagaggctcgcccacccattcagcctcgccgttttcgaagataaagtgttctggaccgacatcattaatgaggccatcttctcagccaacaggctcacgggatctgatgtgaacctgcttgctgagaatttgctgtcacccgaggatatggtgctgtttcacaatctgacccagcctcggggagtgaattggtgcgaacggactactctctccaatggcggatgccagtacctgtgcctgccggctccccagatcaatccccatagccctaagttcacgtgcgcgtgtccggacggaatgctgcttgccagggatatgcgctcgtgcctcactgaagcggaggcagccgtggctactcaggagacgtcgaccgtcagattgaaagtatcttcaactgcagtgcggacccagcacaccaccacccggccggtgccagatacctcccggctgccgggtgcaaccccgggactgactacggtggaaatcgtgactatgtcgcaccaagcactcggggatgttgccgggaggggaaacgaaaagaaacctagctccgtgcgggcactgtcgatcgtgcttccaattgtgctgctggtgttcctgtgcctgggggtgttcttgctttggaagaattggcgcctgaaaaacattaactcgatcaattttgacaatccagtgtatcaaaagaccaccgaggatgaagtgcacatctgccacaaccaggacggctactcctacccttcgagacagatggtgtcccttgaggatgatgtggcc

SEQ ID NO: 11316 - DNA, 2580 bp, Artificial Sequence
  derived and/or modified sequence
atgggcccgtggggatggaagctgagatggaccgtggcactgctcttagctgcggccggaacagccgtcggagataggtgtgagagaaatgaattccaatgccaagatggaaaatgcatttcgtacaagtgggtgtgcgatggatcagcggaatgccaagatgggtccgacgaatctcaggaaacttgccttagtgtcacatgtaagtctggcgacttttcctgcggaggccgcgtgaaccggtgcataccccagttctggcgctgtgacggacaggtggactgcgataacggaagtgacgaacagggatgtccgcctaaaacctgtagccaggacgaattcagatgtcacgacggcaaatgcataagcagacagttcgtatgcgactcggaccgcgactgtctggatggatcggatgaagcatcctgccctgtgctgacatgcggccctgcaagtttccaatgcaattcaagcacctgcattccccaattgtgggcatgtgacaatgacccagactgtgaggacgggtcggatgagtggccgcagcgatgtcgtggcctgtatgtgtttcagggcgattcatcgccatgctccgcctttgagtttcactgtctttcaggcgagtgcattcattcttcatggaggtgcgacggaggacccgactgtaaggacaagtccgacgaggagaactgcgcagtggcaacctgtaggcctgatgaatttcaatgtagcgacggcaattgtattcatggcagtaggcaatgtgatagggaatacgactgcaaggacatgtctgacgaggtcgggtgtgtcaatgtaacactctgtgagggccccaataagtttaaatgtcactcaggcgagtgcatcacactggacaaggtgtgcaacatggcgcgcgactgccgggactggagtgacgaacctatcaaggaatgtgggactaacgcatgcctggacaataacggcggatgttcacacgtctgcaacgatttgaagatcgggtatgaatgtctctgccccgacgggttccagcttgtggctcagagacggtgtgaggacatcgacgagtgtcaggatccggatacgtgctcccagctttgcgtcaatctagagggcggctataaatgtcagtgtgaggaggggttccagctcgaccctcataccaaggcttgtaaagctgtgggtagcatagcttacctgttcttcactaacagacatgaggtaagaaagatgactctggacagatctgagtacaccagcttgataccgaacttgcgaaacgtcgtggctctggacaccgaggtggcctctaatcgcatttactggtcagacctgagccagagaatgatttgttcaacccagctcgaccgggcccatggcgtgtcatcctacgacactgtgatatcaagggacatacaagcgccagatggattggccgtggactggatccactcaaacatttattggaccgatagtgttctgggcacagtttccgtggcagacaccaagggagtgaagcgaaagacactgttccgggagaacgggagcaagccacgagccattgtggtggaccccgtgcatgggttcatgtactggacagattggggaactcctgctaagattaagaagggaggcttgaatggcgtagatatttactccctggtgaccgagaatatccagtggccaaacggaatcaccttggacctgctgtccggtagactttactgggtggattcgaagcttcatagtatttctagcattgatgtgaacggaggcaatagaaagaccattctggaagacgaaaaacgccttgctcatcctttttctctcgccgtcttcgaggataaggtattctggacagatataattaatgaggccatattctcagccaaccgtttgaccggaagtgatgtcaacctgcttgctgaaaatctgctatccccggaggacatggtgctgttccacaatctgactcagccacgaggagtgaactggtgcgagcgcaccaccctgtccaacggtgggtgccagtacctctgtctgcccgctcctcaaatcaacccccatagccctaagttcacttgcgcctgccctgacgggatgctcctggcacgggatatgaggagttgtctgacagaagccgaggccgcggtcgccactcaagagacgtctaccgtgaggctcaaggtcagctcaaccgccgtccggacgcagcacactacaacccggcctgtgccggatacatctagacttcctggtgcgacccccggcctgacaacagtcgagattgtgactatgagtcaccaagctctcggtgatgtggccggaagaggaaatgagaaaaaaccctcttccgttagagccctaagcattgtgttgccgatagtgctgctagtctttttgtgcctgggtgtattcttattatggaagaattggcgcctgaaaaatattaattccatcaactttgacaacccagtataccaaaaaaccactgaagatgaggtccacatttgtcataaccaggacgggtatagctacccctcaagacaaatggtgtctctggaagatgacgttgcc

SEQ ID NO: 11317 - DNA, 2580 bp, Artificial Sequence
  derived and/or modified sequence
atgggaccttggggatggaaattaagatggactgttgcattattactcgcagcagcaggaacagctgtcggggatagatgtgaaagaaatgaatttcaatgtcaggacggaaaatgtatttcatataaatgggtttgtgatggatcagcagaatgtcaggatggaagtgacgaaagtcaggaaacatgcttgtctgtaacgtgtaaatcaggagattttagttgtggagggagagttaatcgttgtattcctcaattttggagatgtgatggacaagtagattgtgacaatggatctgatgaacaaggatgtccaccaaaaacttgttctcaagatgaatttagatgtcatgatggaaaatgtatttctagacaatttgtttgtgatagtgatagagattgtttagatggatcagatgaagcatcttgtccagttttaacatgtggaccagcatctttccaatgtaattcttcaacttgtattccacaattatgggcttgtgataacgatcctgattgtgaagatggttcagatgaatggccacaaagatgtagaggtttatatgttttccaaggagattcatcaccatgttcagccttcgaattccattgtctttcaggagaatgtatacattcatcatggcgttgtgacggaggacctgactgtaaggataaatcagatgaagaaaattgtgctgttgcaacttgtagaccagacgagtttcaatgttcagatggaaactgtattcatggatcaagacaatgtgatcgtgaatatgattgtaaggatatgagtgatgaagttggatgtgttaatgtaacattatgtgaaggtcctaataaatttaagtgtcattcaggagaatgtattacattagataaagtttgtaatatggctagagattgtagagattggtcagacgaaccaataaaggaatgtgggacaaatgcatgtttagataataatggaggttgtagtcatgtatgtaatgatttaaaaattggatatgaatgtttatgtccagatggatttcaacttgtagctcaaagaagatgtgaagatatagatgaatgtcaagatcctgatacctgttcacaattatgcgttaatttagaaggtggatataaatgtcaatgtgaagaaggttttcaattagatccacatactaaagcatgtaaagcagtaggatcaattgcttatttattctttacaaacagacatgaagttagaaaaatgacattagatagatcagaatatactagtcttatcccaaatttgagaaatgtagttgctcttgatacagaagtcgcttctaatagaatatattggtcagatctttcacaaagaatgatttgttcaacacaattagatagagctcatggagttagtagttatgatactgttatttctagagatatacaagcaccagatggattagcagttgattggattcattctaatatctattggacagatagcgttcttggaactgtatcagttgcagacacaaaaggagttaaaagaaaaacacttttcagagaaaacggaagtaaaccaagagctattgtagttgatcctgttcatggatttatgtattggacagattggggaacacctgcaaaaattaaaaaaggaggattaaatggagttgatatttattccttagttacagaaaacattcaatggccaaatggaattacattagatttattgagtggtagactttattgggttgattctaaattgcattctatttcatcaattgatgtaaatggtggaaatcgaaaaactattcttgaagatgaaaagcgtctcgcacatccattttcattggcagtatttgaagataaagttttttggactgatattattaacgaagcaattttctctgccaatagacttacaggtagtgatgttaatttattagctgaaaatcttcttagtccagaagacatggtattatttcataatttaactcaaccaagaggagttaattggtgtgaaagaacaacacttagtaatggaggttgtcaatatctttgcttaccagcaccacaaattaatccacattctccaaagtttacatgcgcatgtccagatggaatgttattagctagagatatgagaagttgtcttactgaggctgaagctgcagtagccacacaagaaacttcaactgttagattaaaagtttcatcaacagcagttagaacacaacacacaacaacaagaccagtaccagatacttcacgtctaccaggagcaacaccaggattaaccactgttgaaattgttactatgagtcatcaagctttgggagatgtcgctggaagaggaaatgaaaaaaaaccatctagtgttagagctttatccattgttttacctattgtattattggtttttttatgtttaggagtttttcttttatggaagaattggagattaaaaaatataaattctataaatttcgataatccagtctatcaaaaaacaacagaagatgaagttcatatatgtcataatcaagatggatattcttatcctagtagacaaatggttagtcttgaagatgatgttgca

SEQ ID NO: 11318 - DNA, 2580 bp, Artificial Sequence
  derived and/or modified sequence
atgggtccctggggatggaagttaagatggaccgtggcccttctgctcgccgctgccgggaccgctgtgggagacaggtgtgagagaaacgagttccagtgtcaagatgggaagtgtatatcgtataagtgggtatgcgacgggtctgcggagtgccaggacggttcggacgagagccaggaaacttgcttgtccgttacatgtaaatctggagacttctcctgcggcggccgggtgaatcggtgcataccccaattttggcggtgcgacggccaggtggactgtgacaatggctcggacgaacaggggtgtccgccaaagacttgttcacaggacgaattcaggtgtcacgatggtaagtgtatcagccgccagttcgtgtgcgattctgatcgggactgcctggatgggagtgatgaggcctcgtgccccgtattaacttgcggaccggccagcttccagtgtaatagttccacctgcattccacagctctgggcatgtgataacgacccggattgcgaggacgggtcagatgaatggccccaaagatgccggggactgtacgtgtttcagggcgacagtagtccatgtagtgcatttgagtttcactgtctgagtggagagtgcatccatagctcgtggcgctgcgacggcgggccggactgtaaagataaaagcgacgaagagaactgcgctgttgccacgtgccgccctgatgagttccagtgcagcgatgggaactgtattcacggctcgcgtcagtgcgatcgagagtatgactgtaaagacatgtctgatgaggtagggtgcgtgaatgtaacactgtgtgagggaccgaataaatttaaatgtcattctggggaatgcatcaccctggataaggtatgtaacatggcacgggattgtagggattggtccgatgagcccatcaaggagtgtggcacaaatgcttgcctcgacaataatggcgggtgcagccatgtgtgtaatgatcttaagattgggtatgagtgtttgtgcccggacggcttccagctggtcgctcagaggcggtgcgaggatatagatgaatgccaggatcccgacacttgttcgcaactgtgcgtgaatctagaggggggatacaagtgtcaatgtgaggagggctttcagctggacccccacaccaaggcttgtaaagccgtgggtagtatagcctatctgttcttcaccaaccggcacgaggtccggaaaatgacactggataggagtgaatacacgagcctcatcccaaatcttcgcaatgtggttgcgctagatacggaagttgccagcaacaggatatattggtctgatctgtctcagcggatgatctgttcaacccagcttgaccgcgcacacggcgttagttcatatgataccgttattagccgagacatccaagcccctgacggtcttgccgtagactggatccacagtaacatttactggacggactccgtactgggaaccgtttcagtggctgataccaagggcgtcaagcggaaaacactttttcgcgagaatggaagcaaaccaagggcaattgtggtagatccggtgcatgggtttatgtactggacagactggggaaccccagcgaaaatcaaaaagggcggcctgaatggtgtggatatatatagcctcgttaccgagaatatccagtggccaaacggcatcactcttgatctgctttcgggacggttgtattgggtggactctaagctccactccatatcctcaatcgacgtaaatggggggaatcgcaagactattctagaagatgagaaacgtctagcccatcccttctctctggctgtcttcgaagataaagtcttctggaccgatattatcaatgaggccatctttagcgccaacagactcaccgggtcagacgtgaacctgctcgctgagaacttgctgagtcctgaggatatggttctctttcacaacttgacccagcctcgaggagtaaattggtgtgaaagaaccacgctttccaatggtggctgccagtacctctgtctcccagctccacaaattaatccccatagtcctaagttcacctgcgcttgtcccgacgggatgctgctagctcgggatatgaggtcatgcctaaccgaggctgaggccgccgtagccacccaggagacatcaaccgtgcggctgaaagtgagttctaccgcagtccgaacacagcacactactaccagacccgtgccagacacctctagactgccgggggctacaccaggtctgacaaccgtggaaattgtgacaatgtcccatcaagcgttaggggatgttgccggacggggcaatgagaagaaaccctcatccgtgcgcgccctctccattgtcttgcccattgtcttattagtattcctgtgtctaggcgtttttctgttatggaaaaattggagactaaaaaacatcaacagtattaattttgacaacccggtttatcagaagacaaccgaggacgaggtccatatctgccataatcaagatggttactcataccctagccgccagatggtgtcactggaggacgatgtggcc

SEQ ID NO: 11319 - DNA, 2580 bp, Artificial Sequence
  derived and/or modified sequence
atgggcccgtggggatggaaacttcggtggacagtcgctcttttgctcgcagctgcaggcacggccgtaggagacaggtgcgagagaaatgaattccagtgtcaggacgggaaatgcatttcatataagtgggtgtgcgacggctccgctgagtgtcaagacggatcggacgagagccaggagacgtgcctgagcgttacttgcaagtcgggagacttttcatgtgggggacgcgtgaaccggtgcattccccagttctggcggtgcgacggtcaggtggattgcgataatggttctgatgagcagggttgcccgccgaagacctgttcccaggatgagttccggtgccatgatggaaaatgtataagcaggcagttcgtttgcgactcagatcgggattgtcttgacgggtccgatgaagccagctgccccgtgttgacatgcggcccggccagtttccagtgcaattcctcaacatgcattccccagttgtgggcctgtgacaacgaccccgactgcgaagacgggtcagacgaatggccccagaggtgtaggggcctttacgtgttccagggtgattcttctccttgctccgccttcgagttccactgcctgtctggcgaatgcatacattcttcctggcgttgcgacggcggccctgactgcaaagacaaatctgacgaggagaactgcgccgttgcaacttgcagaccggacgaattccaatgttccgatggcaactgtattcacggtagcagacaatgtgaccgcgaatacgactgtaaggacatgtcggacgaagtcggctgcgtcaacgtgactctgtgtgagggcccaaataagtttaagtgccacagtggggagtgtatcacgctggataaagtgtgtaatatggccagggattgtcgcgattggtcagatgagcccataaaggaatgtggaacgaatgcttgcctggataacaatggcggatgtagtcatgtgtgtaacgatttgaaaattgggtacgagtgtctgtgtcctgacgggtttcagcttgtggcccagcggaggtgcgaggacatagatgagtgtcaggaccctgatacttgctcgcaactgtgcgtgaatctagaaggcgggtataagtgtcaatgtgaagagggctttcaattggaccctcatacaaaggcctgcaaggcggtgggaagcatcgcttacctgttttttactaaccggcacgaggtgagaaagatgacactggaccggagcgagtacaccagtcttattccgaacctgaggaacgtggtcgcccttgatacggaggtggcctctaatcggatctattggtccgatctatctcaacgcatgatttgcagtacccagttggatcgcgcacacggcgtgagttcgtacgacacggtgatctcgagagacatacaggccccagatggactagccgtggattggatacacagcaacatctactggacagatagcgttctggggaccgtgtctgtcgccgatacaaaaggcgtgaagagaaagacgcttttccgggagaatggctctaaaccacgggctatagttgtggacccagtccatggcttcatgtactggaccgattggggaacacccgcgaagatcaagaagggaggcctcaacggggtggatatatactccctggtgactgaaaatatacagtggccaaatggcattaccctggacctcttatcaggtagactgtattgggtcgactcaaagctgcactccatttctagcattgatgtgaatggtggcaaccgtaagactattctcgaagacgagaagagactggcacatcctttctcacttgcggttttcgaggacaaagtcttctggacagacatcatcaatgaagctattttctccgctaatagattaacaggttccgacgttaacctgttggccgaaaatctgctgtcacctgaggacatggtgcttttccacaaccttacccagcctcgcggtgtcaactggtgcgagcggaccaccttgtcgaatggaggatgtcaatatctctgtttaccagccccacagatcaatccacacagccctaagtttacgtgcgcatgtccagatgggatgctactcgcacgagatatgagatcttgtttgacggaagctgaggctgctgtggcgacccaagaaacaagcaccgtgcgtctgaaagtgtccagtacggccgtgcgcacacaacatacaactacacgtcctgttcctgacacaagcagactccctggggccacacctggactgaccaccgtagaaatcgtgacaatgagccatcaggcgctgggcgatgttgccggacgtgggaacgaaaagaaacctagctccgtccgtgccttgagcatcgtgttacctatagttctgctggtgtttctatgtttgggcgtattcctgctttggaagaattggcgcctgaagaacattaactctattaactttgacaacccagtgtaccagaaaactactgaggacgaagtccacatttgtcacaatcaggacggatacagctacccatcgcgccagatggtgtctctggaagacgacgtggct

SEQ ID NO: 11320 - DNA, 2580 bp, Artificial Sequence
  derived and/or modified sequence
atggggccctggggatggaagttgcggtggacagttgccctgcttctggctgcggcggggacggccgtgggcgaccggtgtgaacgaaatgagttccagtgccaggacggaaaatgtattagctataagtgggtatgcgatgggagtgctgaatgccaggacgggagtgacgagtctcaggagacatgtcttagtgtgacctgtaaaagtggcgatttcagctgtgggggccgcgtgaataggtgcatccctcagttctggcgatgcgatggacaggttgattgcgataatggatccgacgagcaggggtgtcctcccaaaacatgcagccaagacgagtttagatgccatgacggcaagtgtattagtcgccaattcgtgtgtgactcagatagggattgtcttgatggctctgatgaagcctcctgccctgtgttgacatgtggaccggcgtcattccagtgcaactcctctacctgcatacctcagctgtgggcttgtgataacgatcctgattgtgaggacggatcagacgagtggccgcagcggtgtcgcgggctgtatgtctttcagggagactcctcaccgtgctccgctttcgaattccactgtttgtctggcgagtgtatccactcatcatggcgatgcgatggaggccctgattgtaaagataagagcgacgaagagaactgcgccgtggccacctgtagacctgatgaattccaatgttccgacggcaattgtattcatggtagtcggcagtgcgacagggaatacgactgcaaggacatgtcagacgaggtgggatgtgttaacgtaaccctgtgcgagggccctaataagtttaaatgtcactcaggagaatgtatcactctggataaagtgtgtaacatggctagagactgcagagactggagtgacgaaccgataaaggagtgcggcacgaatgcgtgtctggacaacaatggtggctgttctcacgtgtgtaacgacctgaagatcgggtacgagtgtctgtgtcctgatggctttcagttggtagcacagcggcggtgtgaggacatcgacgagtgccaggaccccgacacttgctctcaattgtgcgtaaaccttgagggggggtacaagtgccagtgtgaggaaggcttccagctcgatccccacactaaggcttgtaaggccgtgggcagtattgcttacctgttttttaccaaccgacatgaggtccgcaagatgaccctggaccgaagcgagtatacatccttgatcccaaatctccggaacgtggtggctttggatacagaagtggcttccaaccgaatctattggagtgatctcagtcagagaatgatttgctcaactcagcttgatagagcccatggggtgtcttcctatgataccgtcatttccagggacatccaagccccagatggcttggccgtcgattggatccatagtaacatatactggacagattccgtgctcggaacagtatctgtggcggacacaaaaggtgtgaaacggaaaaccctgttccgggaaaacggatccaagcctcgcgcaattgttgtcgatccagtgcatggctttatgtactggaccgattggggtacccccgccaagattaagaaggggggactgaacggagtcgacatttatagcctggttaccgagaatatccagtggcccaatgggattaccctcgacctgctgagcggacggctctactgggtagactcaaaactgcatagcattagtagcatcgatgtgaacggagggaaccggaaaaccattcttgaagacgagaaacgactcgcccacccgtttagtcttgccgtgtttgaagataaggtcttctggaccgatatcattaatgaagctattttcagcgctaacagacttactggaagcgacgtgaatctgttggcagagaatctgctgtctcccgaggacatggtcctctttcacaatctcacacagccccgaggagtgaactggtgtgaaaggaccactctcagtaatggtggttgccagtacctctgcctgccagccccacagattaacccccattcccctaaattcacctgcgcttgccccgatggtatgttgctggcccgggatatgaggagctgtctgaccgaggcagaagccgcagtggctactcaggagacaagcaccgtacggcttaaggttagttccaccgcggtcaggacccaacacacaactactaggcctgtaccagataccagtcggcttccaggagccacacccggccttactacagtagagatcgttacaatgagtcaccaggcgcttggtgacgttgccggaagggggaatgagaaaaaaccctcctccgtgcgcgcactcagtatcgtcctccctatagtgctcctggtgttcctgtgtctgggagtcttccttctgtggaaaaattggcgcctgaagaatatcaactccatcaactttgataacccagtgtatcagaagactacggaggatgaggtgcacatctgccacaatcaggacgggtatagttacccatccagacagatggtgagcctggaggacgatgtagct

SEQ ID NO: 11321 - DNA, 2580 bp, Artificial Sequence
  derived and/or modified sequence
atgggtccctggggctggaagctccgctggaccgtggcactcctcctggcagctgccggaacagcagtcggagaccgctgtgagagaaacgagttccagtgccaggacggtaagtgtatctcctacaagtgggtgtgcgatggaagtgctgaatgtcaggacggtagcgacgagagccaggagacttgcctgagtgtgacctgtaaatctggagacttctcctgcggcggccgcgtcaataggtgcataccacaattctggaggtgcgacggacaggtcgattgcgacaatggatcagatgaacagggatgtccacctaagacttgtagtcaagacgaattcagatgtcatgacggtaagtgtatttccagacaattcgtctgcgatagcgacagagattgtctggacggctctgacgaagcttcctgtccagtacttacctgcggcccagcatcttttcaatgtaactcttcaacttgcatccctcagctgtgggcctgcgataacgatcctgattgcgaggatggtagcgatgagtggcctcaaaggtgccgcggtctgtacgtatttcagggagactctagcccctgctcagcctttgaattccactgtctctccggcgagtgtattcatagctcctggaggtgcgatggaggtcccgactgtaaggacaagtcagacgaggagaattgcgccgtagctacctgccgccctgatgaattccagtgttccgacggcaactgcattcatggttccaggcagtgtgatagagagtacgactgcaaggacatgagcgatgaggtcggttgcgtcaatgtgaccctgtgcgaaggcccaaacaagttcaaatgtcacagcggcgagtgtatcacactcgataaggtctgtaatatggccagagactgcagagactggtcagacgagcctattaaggagtgcggcacaaacgcctgcctggacaacaacggcggttgcagccacgtgtgtaatgatctgaaaattggttatgagtgcctctgtcctgacggattccaattggttgctcagaggcgttgcgaagacattgacgagtgtcaagatccagacacatgctctcagttgtgcgtgaacttggagggcggctataagtgtcaatgcgaagagggttttcaacttgatcctcataccaaggcatgcaaggctgtcggcagtattgcatacctgttcttcacaaaccgccacgaggttcgcaagatgaccctcgaccgttctgagtacaccagtttgatccccaacctgagaaatgtggtggctctcgataccgaggtagctagtaacaggatctactggagtgacctgtctcagcgtatgatttgttccactcaactcgatcgcgcccacggcgttagtagctatgataccgtcatctctcgtgacattcaggcccctgacggcctggccgtcgactggatccactcaaacatctactggaccgattcagttctgggtaccgtaagtgtcgccgacaccaaaggtgtgaaacgcaagactctttttagggagaatggaagcaagccccgtgcaatcgtcgtggatcccgtacacggtttcatgtattggactgactggggaactcccgcaaagatcaaaaaaggcggtctgaacggagtcgatatctacagtctcgtgacagagaatattcaatggcccaacggtatcacactcgatctgctgagtggacgcctgtactgggtggactccaagctgcacagtatcagcagtattgacgtgaacggcggcaaccgtaaaacaattctcgaagatgaaaagcgcttggctcacccattcagcctcgctgtctttgaagacaaagtgttctggacagatatcatcaacgaagctatcttttcagccaatcgtctgaccggttccgacgtgaatctcctggcagagaaccttctgtcccccgaggacatggtcctgttccacaacctgacacaaccaagaggagtcaactggtgcgaaaggaccaccctgtctaatggcggctgtcagtacctgtgccttcctgctcctcaaatcaatccacactctcctaaattcacctgcgcatgccccgatggaatgttgcttgcccgtgatatgaggtcatgtctgaccgaagccgaggccgctgtggctacccaggagacatccaccgtgcgcctgaaggtctccagcactgctgtgagaacccaacatactacaacccgtcctgttcctgacacatccaggctgcctggtgcaacacctggactcactacagtagagatagtcacaatgagccatcaggcactcggcgatgtagctggacgtggtaatgagaaaaagcccagctccgtgcgcgccctttctatcgtgctgccaatcgtgctcctggttttcctgtgcctcggcgtcttcctgctttggaaaaattggcgtttgaagaatattaactctataaatttcgacaatcccgtttaccagaagaccacagaggatgaggtacacatatgccacaatcaagatggttattcttacccaagtcgtcagatggtgtcactcgaggacgatgtagca

SEQ ID NO: 11322 - DNA, 2580 bp, Artificial Sequence
  derived and/or modified sequence
atgggaccttgggggtggaaactccgatggactgttgctctgttgctcgctgcagctgggacagcagttggggatcggtgcgaacggaacgaattccagtgtcaggatgggaaatgcatatcatacaagtgggtctgtgatgggagtgctgaatgtcaggatgggagtgatgaatcccaagaaacttgtctgtctgtgacttgtaaaagtggagacttttcttgcggaggacgcgtcaacagatgcatcccacagttttggaggtgtgatggacaggttgattgtgataatgggagtgatgagcagggatgcccacctaagacatgctcccaagatgaatttaggtgccatgatgggaaatgcatctctaggcaatttgtgtgcgacagtgatcgagattgtttggacggatctgatgaagcttcttgtcccgtgctcacatgtgggcctgcatccttccagtgcaattcctcaacttgcatcccccagctttgggcttgtgacaatgatcccgattgtgaggacggatctgatgagtggccacagcgctgtcggggattgtatgtttttcagggggattccagtccttgctctgctttcgaatttcactgcttatctggagaatgcatacacagttcttggaggtgtgacgggggacctgattgcaaagataaatctgacgaagaaaactgtgctgttgcaacatgtagaccagatgaattccagtgtagtgatgggaactgcattcacggatcgcggcagtgcgaccgagagtacgattgtaaggatatgtctgatgaagttgggtgcgttaatgtcacactgtgtgaagggcctaacaaattcaagtgtcactctggagagtgtatcactctcgataaagtttgcaatatggctagagattgtcgcgattggtcagatgaacctataaaagagtgtggaactaatgcttgcttagacaacaatggggggtgttctcatgtgtgtaacgatctaaagatagggtatgaatgcttatgtcctgatgggttccagttagttgctcagcggcgttgtgaggatatagatgaatgtcaggaccccgatacatgtagtcaattgtgtgtcaacctcgaaggggggtacaaatgccagtgtgaagagggatttcagctcgatcctcacactaaagcctgcaaagccgtggggtccatcgcctatctcttttttactaatagacatgaagtgaggaaaatgacactcgatcggtctgaatacacttcattaatacccaacctaaggaatgttgttgctcttgatactgaagtcgctagtaacaggatctattggagtgatctgtcacagaggatgatctgttcaacacagttggatcgggctcatggagtgtcatcatatgatactgtgatctctcgggatatccaagccccagatggactcgctgtggattggatacatagtaacatttactggacagatagtgtactcggaacagtctccgtggcggatacgaaaggagttaaaagaaaaactctctttcgggagaatgggtcaaaaccccgggcgatcgtggttgatcctgttcacggattcatgtattggacagattgggggacacctgccaaaatcaagaaagggggactcaatggagtcgatatttatagtctggtcactgaaaacatacaatggcccaacggaataacactcgatcttctttcagggaggctctattgggtcgattctaaactccactctatctcatccattgatgtgaatgggggaaatagaaaaacaatcctcgaagacgaaaagcggcttgctcaccctttctcactcgcggtgttcgaagataaagtattttggacagacataataaacgaagccatcttcagtgctaatcggttgactgggtctgacgtgaacttattagctgaaaacttgctcagtccagaagatatggtgctattccacaacctgactcaaccacggggagtgaactggtgtgaacggactacattatcaaatggagggtgccagtatctctgcctgcccgcgcctcaaatcaacccccatagtcctaaattcacgtgtgcctgcccagatggaatgctgttagcacgagatatgagatcctgtctgacagaagccgaggccgccgtagcgactcaggaaactagtacagtaaggctcaaagtgtcatccactgctgtgcgcactcagcacacaacaactcgaccagtacccgatacaagtcggctgcccggggcaacacccgggctaactactgtagaaattgtgactatgtcacatcaggctctgggagatgtagctggacgggggaacgagaagaaacctagttcggtgagggctctttccatagttctccctatcgttctcctcgtgtttctgtgtttaggagtatttttactgtggaaaaattggaggctaaaaaacataaacagtattaacttcgacaatccagtctatcagaagacaacagaagacgaagtccatatctgtcataaccaggatggatattcttatcccagtcggcagatggtctccctcgaggatgatgttgca

SEQ ID NO: 11323 - DNA, 2580 bp, Artificial Sequence
  derived and/or modified sequence
atggggccctggggctggaagttgcgttggaccgtagcacttctgctcgccgcagcaggcactgctgtaggagaccgatgcgagcgaaacgaattccagtgtcaggatggcaagtgtatcagctacaagtgggtgtgcgacggatccgctgaatgccaggatgggtctgacgagtctcaggagacatgtctttccgtgacctgtaagagcggtgacttttcgtgtggagggcgggttaacagatgtattccacagttctggcggtgtgacgggcaggttgattgcgacaatggatcagacgagcagggttgcccacccaaaacctgcagccaagatgaatttaggtgccacgatggtaagtgtatttcacgccagtttgtctgcgattcggatcgagactgcttagacggctcagatgaggcatcatgtcctgtgttaacatgtggccctgcttcatttcagtgcaattctagcacctgcatcccccagctctgggcttgtgacaacgatcctgattgtgaggatgggtcagatgagtggcctcagcgatgcaggggcctttacgtcttccagggcgatagttcgccctgctcggcattcgagtttcattgcctgagtggagagtgcatccactctagctggcgatgcgacggcgggcctgattgcaaagacaagtcagacgaagagaactgtgctgtggccacctgcagacctgatgagtttcaatgctcagacggaaattgcatccacgggagtcggcaatgcgaccgtgagtacgactgcaaagatatgagtgacgaagtgggatgcgtgaatgtcaccctatgcgaaggcccgaacaagttcaagtgtcactctggagaatgtatcaccctcgataaagtgtgtaatatggctagagattgtcgagattggtcggacgaacctatcaaagagtgcgggaccaatgcctgcctcgataataatggggggtgttctcacgtctgcaatgatttaaagattggctatgagtgcctgtgccccgacggctttcaacttgtagcacagaggcggtgcgaagacatcgacgagtgtcaggaccctgacacatgttctcagctctgtgtgaacttggaaggcgggtataaatgtcagtgtgaggagggctttcaacttgacccacataccaaggcgtgcaaagcagtcgggtccatcgcctatctgttcttcaccaaccggcacgaggtaagaaagatgacactcgaccgatccgagtatacatctttgattcccaatcttcgcaacgttgtggctctcgatacggaagtggcatccaaccggatatattggtcagacctgtcgcagcgtatgatctgtagtacccagcttgaccgggcccacggcgtcagctcatatgatactgtgatcagccgggatattcaggcccccgatggtctcgctgtcgactggatacactctaatatatattggacggattccgtgcttgggactgtctcagttgcggacacaaagggagtgaagcgcaagacactctttagagagaacggctccaagccccgcgctattgtggtggaccctgtacatggctttatgtattggacagactggggcacgcccgctaaaattaagaaggggggactcaacggagtggatatctactcgctcgtgacggagaacatccagtggcccaacggcattactctggacctgttgagcggacggctctactgggttgactctaaacttcattcgatttcttctattgacgttaacggtggtaaccgtaaaacgatcctcgaggatgagaaacggctagcccacccgttttctcttgccgttttcgaggataaagtgttttggacagacatcatcaatgaggcaatttttagcgcaaatcgcctaaccgggtctgacgtgaacttgctggccgaaaatctgcttagccctgaggatatggtgctattccataacctcacgcagccccgcggcgtgaactggtgtgaaagaactaccttgagcaacgggggctgccagtacctgtgtctgcccgcaccacaaattaatccacatagcccaaaattcacttgcgcctgtccggatggcatgctcctcgctcgggacatgcgcagctgtctcactgaggctgaggcagcggtcgcgacacaggaaacctctaccgtgagactcaaggtaagttccaccgcagtgcgaactcagcatacaacgacaaggcccgtgccagatacttcccggctgccgggagcaacacctgggctgacaactgtggaaatcgtgacaatgagccatcaggcactgggtgacgtggcggggcggggtaatgaaaagaagccctcttcagtgcgagcactttccatcgtgttgccgatcgtgcttctggtttttttatgtctaggcgtctttctgctctggaaaaattggcggctgaagaatattaatagtatcaatttcgacaatccagtctatcaaaaaacaacggaagacgaggtgcacatctgtcacaatcaagatggctactcttatccatcaaggcaaatggtgagcctggaagatgatgtcgcc

SEQ ID NO: 11324 - DNA, 2580 bp, Artificial Sequence
  derived and/or modified sequence
atgggaccttggggatggaaactgcgatggactgttgcactcttgcttgccgctgcgggtaccgcagtgggagatcggtgcgagagaaacgaatttcagtgtcaggatggaaagtgcatttcgtacaagtgggtttgtgatggttccgccgaatgtcaagacggttccgacgaatcccaagagacttgcctgtcggtgacgtgcaagagcggcgacttttcatgcggcggaagagtgaacagatgtattccccaattctggaggtgtgacggacaggtggattgtgataacgggtccgacgaacaaggttgccccccaaagacgtgttcacaagatgagtttagatgtcacgatggcaagtgtatctcgcgacagttcgtgtgtgatagcgatcgcgactgtctggatggttcggatgaggcctcgtgccctgtcctcacgtgtggacctgcgtcgttccagtgtaattcctcgacctgtattccccagctgtgggcttgtgacaacgaccccgattgcgaagatggatcggacgaatggcctcagcgctgtcgcggactgtacgtgttccaaggggacagcagcccatgctcagcgtttgagtttcactgtctctccggcgaatgtatccactcgtcctggcggtgtgatggtggccctgactgtaaggataagtcggacgaggagaactgtgcagtcgcaacttgtagacccgacgagtttcagtgttcggacggaaactgtattcacggttccagacaatgtgatcgagaatacgattgtaaagatatgtcagacgaagtgggttgtgtgaacgtgaccctgtgtgaaggaccaaataagtttaagtgccatagcggagaatgcatcactctggataaggtgtgtaatatggcaagagactgccgagactggtccgatgaaccaatcaaggaatgcggaacgaacgcctgccttgacaacaacggaggttgctcgcacgtgtgtaacgatttgaaaatcggatacgagtgtctttgtccagacggttttcaacttgtcgcacaaagaaggtgtgaagatatcgatgaatgccaagatcctgatacctgtagccaactgtgtgtgaatctggaggggggctacaagtgccaatgtgaagaaggttttcagctcgatcctcatactaaggcatgcaaggcagtgggttcaattgcatacctgtttttcaccaatcgccacgaggtccgaaagatgactttggatcgctccgaatacaccagcctcattcctaaccttcgcaacgtcgtggccttggataccgaagtcgcatccaaccgaatttactggtccgatctttcgcaacgcatgatttgctcgactcagcttgatagggcacatggggtgtcctcatacgataccgtgatctcgcgagacattcaggcgcccgacggactggcagtggactggattcactcgaacatttactggaccgattctgtcctgggtaccgtttccgtcgcagataccaagggtgtgaaacgtaaaacgctctttcgcgaaaacggttcaaagccgcgggcaattgttgtcgatcctgtgcatggctttatgtactggactgattggggcactcctgctaagataaagaaaggaggtcttaatggagttgacatttactcgcttgtgactgagaatattcagtggccgaatggaataacgctcgatcttctgtcagggagactgtattgggtggattcaaagctccatagcatttcgtctatcgacgtgaacgggggtaatagaaagaccatcttggaagatgaaaaaagacttgcacatcctttttctctggcagtgttcgaagataaagtgttctggaccgatatcatcaacgaggctatcttttctgccaaccggttgactggtagcgacgtgaacttgctggcagaaaatctgctttcaccggaggatatggtgctcttccataatctcacccaaccaagaggggtcaactggtgtgagaggactactctctcgaatggtggatgccagtatctttgccttccagcaccccagataaatccacatagcccaaagttcacttgtgcgtgtccggatggcatgcttctggctcgggatatgcgtagctgcctgactgaagcagaggcagcagtggcgactcaagaaacttcaactgtgaggctgaaagtgtcatcgacggcagtgcgaactcaacataccactactaggcctgttcctgacacgtcgagattgccaggcgcgactcccgggcttaccactgtcgagatagtcaccatgtcgcatcaagcattgggcgacgtggcaggacgcggtaatgagaaaaaaccatcttccgtccgcgccctctccatagtcctgcctattgtgttgctcgtctttctgtgcctgggcgtctttctgctgtggaagaactggcggctgaaaaacattaactccatcaacttcgataaccctgtgtaccagaaaaccaccgaggacgaggtccacatatgccacaatcaagacggttacagctacccctctcgccaaatggtgtcacttgaagatgacgtggcg

SEQ ID NO: 11325 - DNA, 2580 bp, Artificial Sequence
  derived and/or modified sequence
atgggtccatggggttggaagctgcgctggactgtggccctgctgcttgccgccgctggcaccgccgtcggcgaccggtgcgagcgcaacgaattccagtgccaggacggaaagtgcatctcgtataagtgggtgtgcgacggcagcgccgagtgtcaggacggatcggacgaatcgcaggaaacctgcttgtcggtgacctgcaagagcggtgacttctcgtgcggcggacgggtgaacaggtgtatacctcaattctggcggtgtgacggacaagtcgactgcgacaatggctcggacgagcaaggatgcccccctaagacctgctcccaggatgaatttagatgccacgacggcaagtgcatttcacgccaatttgtctgcgactccgacagagattgcctcgatggatccgacgaagcgtcctgcccggtcctgacttgcggcccagcctctttccaatgcaacagctcaacgtgtatccctcagctctgggcatgcgacaacgacccggactgtgaggacggaagcgacgagtggccacaacgctgccgggggctgtacgtgttccaaggagattcctcgccttgtagcgcgttcgaattccactgtcttagtggcgagtgtattcatagctcgtggaggtgtgacggcggaccggactgcaaggacaagtctgatgaggaaaattgcgccgtggcgacttgccggccggacgagttccagtgttcggatggtaactgcatccatggctcaagacagtgcgaccgcgagtacgactgtaaggatatgtcagatgaagtgggatgcgtcaatgtcaccctctgcgagggaccaaacaagtttaagtgccacagcggagagtgtatcactcttgacaaggtgtgtaatatggcccgggactgccgcgactggagcgatgagccaattaaggaatgtggcactaacgcatgtcttgacaacaatggaggatgttcgcatgtgtgcaacgatctgaaaatcggttacgaatgcctgtgcccggacggatttcagctggtggcgcagcgccggtgtgaagatatcgatgaatgccaagacccggacacctgttcccaactctgtgtgaatctggaaggggggtacaaatgccaatgtgaggagggattccagctggatccgcacaccaaggcgtgcaaggcagttggatcgattgcgtacctgttctttactaataggcatgaggtcagaaagatgactctggaccggagcgagtacactagcctgatcccaaatctgcgcaatgtggtggccttggacacggaggttgcgtcgaatcggatctactggtcggacctctcacagcgcatgatctgctcgacccaactggaccgggcccatggtgtgtccagctacgataccgtgatcagcagggacatacaagctccagatgggctcgctgtggactggattcattcaaacatctactggacggattccgtgctcggaaccgtgtcggtcgctgacactaagggagtgaaacgtaagactctgttcagggaaaacggatcaaagccacgcgcaatcgtggtggaccccgttcatgggttcatgtactggaccgactggggaaccccggcgaaaatcaaaaagggcggcctcaatggtgtggacatctacagtctcgttactgaaaacatacagtggcccaacggaatcaccctcgatctcttgtctggacggctttactgggtagattccaagctgcactcgatcagcagcatcgacgtgaatggcggaaaccgcaaaaccatcctggaggatgaaaaacgcctggcccacccattttccctcgctgtgttcgaggataaggtgttctggactgacatcatcaacgaagccatcttctcggcgaatcgcctgacgggctccgatgtcaatttgttggccgagaacttgctgtcgccagaggatatggtgctgttccacaatctgacccagccacgcggagtcaactggtgcgaacgcaccaccctgtcaaacggcggctgccagtacttgtgcttgccggccccgcaaatcaacccgcacagcccgaagtttacgtgcgcatgtccggacggaatgctcctcgcccgcgatatgcgctcgtgtctcacggaggccgaagcagccgtggcgacgcaggaaacttcgactgtgagactgaaggtgtcatcgactgccgttcgcacccagcacactactacgcgtcccgtccctgatacttcgcggctgccgggcgcaaccccgggactgaccaccgtggaaatcgtgaccatgtcccaccaggcgctgggagatgtggcaggaagaggaaacgagaaaaagccatcgtcagtccgcgcactgtccatcgtgctgccaattgtcctgctcgtgtttctgtgcctgggagtctttctgctgtggaagaactggaggctcaagaatatcaattccatcaatttcgacaaccctgtgtaccaaaagactacggaggacgaagtccacatctgtcacaatcaagacggatactcgtacccaagccggcaaatggtgtcgctggaagatgatgtggcg

SEQ ID NO: 11326 - DNA, 2580 bp, Artificial Sequence
  derived and/or modified sequence
atgggtccttggggctggaaacttcggtggacagtcgctttacttctggcggctgctggcacggcggttggagataggtgtgagcgcaacgaatttcagtgccaggatggcaaatgtatttcctataaatgggtatgcgacggctctgcggaatgccaggatggatctgatgaatcacaagaaacatgtttaagtgtgacatgcaaatcaggagacttctcatgcggcggcagggtaaatagatgcatcccgcagttttggaggtgcgatgggcaagtagattgcgataatggatctgacgaacaaggatgccctccgaagacttgttcgcaggacgaatttcgttgtcatgacggcaaatgcatttccagacaatttgtgtgtgattctgatagggattgtttggatggttcagacgaagcaagctgtccggtattgacctgcggccctgcatcatttcaatgcaatagctctacctgcattccgcagctctgggcttgtgacaacgatccagattgtgaagatgggtctgatgagtggccgcagcgctgcagaggtctttacgtttttcagggggacagctccccttgttctgcctttgaattccattgcctgagtggcgaatgcatccatagcagctggcggtgcgacggcggcccggactgcaaagataaaagcgatgaagagaactgcgcagttgccacatgtaggccggatgagtttcagtgctctgatggcaattgcatccatggcagccgtcaatgtgatcgtgaatatgattgtaaagatatgtcagatgaagtcggatgcgttaatgtcacattatgcgagggcccgaataaatttaaatgtcattctggtgaatgcattacactcgacaaagtttgtaacatggcaagggattgtagagattggtcggacgaaccaatcaaagaatgtggaactaacgcttgccttgacaacaatggaggatgtagtcatgtttgcaacgatttaaagatcggatacgaatgtttgtgtccggacgggtttcagcttgtagctcagcgccgctgtgaagacattgatgagtgccaggatccagatacttgcagccaactgtgcgttaatctcgaaggcgggtataagtgccagtgcgaagaaggctttcaattagaccctcataccaaagcttgtaaagcagtcggtagcattgcctacttatttttcacaaaccgtcacgaggtccgaaaaatgacactggaccgctccgaatatacgagcttaattcctaatttgcggaacgttgtggcactggataccgaggtcgctagcaaccgtatttattggtccgacttaagccagcgtatgatttgtagtacacaattggacagagctcatggcgttagctcatatgacacggtcatatccagggatatccaggctccagacggattagcagtagattggatccattcaaatatctattggacggactcagtgcttggcactgtatctgttgccgatacgaaaggggttaaacgcaaaaccctttttcgggaaaatgggagcaaacctcgcgcgattgttgtggatccagttcacggttttatgtattggactgattggggtacaccagctaaaatcaagaaaggaggccttaacggggtggacatctactccctggtgacagagaacattcagtggcctaacggaatcactctggatcttttatccggtcgcctttattgggttgatagcaagcttcattcaatctccagcattgacgtaaacggagggaatcgcaaaacaattctcgaagacgagaaacgacttgcgcatccattttcacttgctgtctttgaggataaggttttttggacagatatcattaacgaagccattttcagcgcgaatcgacttaccggctctgatgtgaatttgctggcagaaaatctcctgagtcccgaagatatggttttgtttcacaatttaactcaacctagaggtgtcaattggtgcgaaagaacaaccctaagtaatggcggctgccaatacctttgtttgccggccccccaaatcaacccgcattcccccaaatttacatgtgcctgtccggatggtatgcttttagcccgcgacatgcggtcttgcttgacggaagcagaagcggcagtggctacacaggaaacatctacagttagattgaaggtctcctctacagcggttaggacacagcatacgaccacgcgcccagtcccggacacctcgcggctaccgggagcgacccctggtttgacaacagtcgaaattgttactatgtctcatcaggccctcggagatgtggctgggcgtggcaatgaaaaaaagcctagttcggtcagggcactctctatcgttttgccgattgtcttactggtgtttttatgcctaggggtctttctgctttggaaaaattggagattgaaaaatataaattctattaactttgataatccggtgtatcaaaaaacaacagaggatgaggtgcatatatgccataatcaagacgggtactcctatccaagccgccaaatggtgtcattggaggatgatgtcgct

SEQ ID NO: 11327 - DNA, 2580 bp, Artificial Sequence
  derived and/or modified sequence
atgggcccgtggggctggaaactgaggtggacagttgcactgctcttagctgctgctggcacggccgtgggcgaccggtgcgaaaggaatgaattccagtgccaggacggaaaatgcataagctataaatgggtgtgcgacggctcggctgaatgccaggatggaagtgatgagagtcaggaaacctgcctttcagtgacgtgtaaaagcggcgacttcagctgcggaggaagggtaaaccgctgtatcccacaattttggaggtgtgatggtcaagtcgattgcgacaacgggtctgacgagcagggatgccctcccaaaacgtgctcccaggatgagtttagatgccacgacggcaagtgcatttccagacagttcgtgtgtgactccgatcgggattgccttgacggctccgacgaagcatcctgccccgtcctgacctgtgggcctgctagtttccagtgtaacagttccacctgcatccctcagctttgggcctgtgataacgatcctgattgcgaggatggctcagacgaatggccacagcggtgcaggggcctgtacgttttccaaggggatagctcaccctgtagcgcttttgagttccactgtttatctggtgagtgcatccattcgtcctggaggtgcgacggtggacccgactgcaaagacaagagtgacgaagagaactgtgcagtcgctacctgccggcctgacgagttccaatgtagtgatggaaattgcatacatggctcaagacagtgtgaccgggagtacgattgtaaagacatgagtgacgaggtggggtgcgtgaatgtgactctgtgcgaaggtcctaataagtttaagtgtcattccggagagtgtattacacttgacaaggtatgcaacatggctcgagactgccgagattggagcgacgagcccatcaaggagtgcggcacaaatgcctgtctcgataataatggggggtgctcacacgtatgcaacgacctcaaaatcggctatgagtgtttgtgcccagacggttttcagctggtcgcccagcggcggtgtgaagacatagatgaatgccaagatcccgatacctgctcccaactttgcgtgaatctcgagggaggatataagtgccagtgcgaagagggttttcaactcgacccccacaccaaagcctgcaaagctgtggggtctatcgcctacctattctttaccaacaggcatgaagttcgtaaaatgaccctcgatcgcagtgagtacacatctttgattcccaacttgcgaaacgttgtcgcactcgatactgaggtcgcctctaaccgaatatactggtctgacctctcccagcgaatgatttgcagcacacagctggaccgcgcgcatggcgtgtccagctacgatacagtgatcagcagggacatccaagctccggatggactggctgtggactggatccatagcaacatttactggaccgactcggtgctggggactgtttcagtcgcagacaccaagggggtgaagcgcaagaccttgtttagggagaatggcagcaaacccagagcaattgttgtagatcccgtgcatggatttatgtattggactgattggggcactccggccaaaatcaaaaaaggtggcctcaatggggtggatatttactcactggtaacagagaacatccagtggcccaatgggattacactggatctactatcggggaggctctactgggtggacagcaagctacatagcatatcctccatcgacgtcaacggggggaatcgtaagacgatcctggaagacgagaagcggctggctcaccctttcagtttggccgtgttcgaggacaaagtgttctggactgacattatcaatgaagcaattttcagcgcaaatcgtttaaccgggtctgacgtgaatttgttggcagaaaacttgctgagcccagaggatatggttctgttccacaaccttacgcagccgaggggagtcaactggtgcgagaggacaaccctctctaacggcggctgccagtatttgtgtctgcccgcccctcagatcaacccacattccccgaagtttacctgcgcctgcccagacggcatgctcctagccagggatatgagaagctgccttactgaagccgaggcggcggtggcgacgcaggagacatctaccgtgcgcctcaaggtttctagcaccgctgtgcgtacccaacacaccactacaagacctgtaccagacacctcccgcctaccgggagcaaccccaggtctgaccactgtggaaatcgtaaccatgtcccatcaggccctaggtgacgtggccgggagaggtaacgaaaaaaagcctagtagcgtgcgagcactgtctatagtgcttcccattgtactgcttgtttttctatgtctcggggtctttctactttggaagaattggagattgaaaaatataaattctattaatttcgataatcccgtgtatcagaagacaaccgaagacgaagtgcatatctgccataatcaggatggatactcgtaccctagtcggcagatggtgtccctcgaagatgatgtggcc

SEQ ID NO: 11328 - DNA, 2580 bp, Artificial Sequence
  derived and/or modified sequence
atgggaccctgggggtggaaactgagatggactgtagctctacttctcgccgcagctgggacagctgttggagatcgctgcgagaggaacgaatttcagtgtcaggatggaaaatgtatctcatataaatgggtgtgtgacgggtccgcagaatgccaggatggaagtgatgaatctcaggaaacatgcctttccgtgacttgcaaatccggggatttttcctgtggaggaagggtgaacaggtgtataccccagttttggaggtgtgatgggcaggtcgattgtgacaatggatcagatgaacaggggtgtcctcctaaaacttgctcccaggatgaatttaggtgtcacgatgggaaatgtatttcccggcagttcgtatgtgattcagatagggactgcttggatggatccgatgaagcctcttgtccagtgctcacttgtgggcccgcctcttttcaatgtaatagttccacttgcatcccccagctatgggcctgtgataacgatcccgattgcgaggacggaagtgatgaatggcctcagcgatgtcgggggctttacgtatttcagggagattctagtccctgctctgcatttgaattccactgtttatccggagaatgtattcattcatcatggcgctgtgatgggggacccgattgcaaagataaatcagatgaagaaaattgcgcagtggccacttgtcggccagatgagttccagtgttccgatggaaattgcattcacgggagtaggcagtgtgatagagaatatgattgcaaagatatgtcggacgaggttggatgtgtaaatgtgactctctgtgaaggaccaaataaattcaagtgtcactctggagaatgcattactttggacaaagtatgcaatatggctcgtgattgcagagattggtctgatgaaccaataaaagaatgtgggacaaacgcttgtctcgataacaacgggggatgctctcatgtttgcaacgacctaaaaatcgggtatgaatgcctctgcccagacggattccagttggtggcccagcggagatgcgaagacatcgatgaatgccaggatcctgatacttgctcccagctttgcgtcaatctcgagggagggtataaatgccagtgtgaagaaggattccagctggaccctcatactaaagcttgtaaagccgtgggatcaatcgcctacttatttttcacaaatcggcacgaagtgcgaaaaatgactctagataggtcggagtatacatcactcatccccaacctccggaacgttgtagccttagatactgaggtagcctccaaccggatctattggtccgatctgtcacagagaatgatatgctctacacagcttgatcgggcacatggagtgtcttcttatgacacagttatttctagagatatacaggctccagatggactcgcagtagattggattcactctaacatctattggacggattctgtcctgggaacagtgtctgtagcagatacaaaaggagtgaaaaggaaaactctcttccgggaaaatggatccaaacctagggccattgtcgtggatcctgtccacgggttcatgtactggacagactgggggacaccagctaagatcaaaaaagggggacttaacggggtggatatatattcactcgtgacagaaaatattcagtggccaaatgggataacactggacctactatcggggcgcctttactgggtggatagtaaactacactcaatctcttcaatcgatgtcaacggagggaaccgaaagacaatacttgaagatgaaaaacggctggcacatccattttcattagctgttttcgaagataaagtattttggactgacatcatcaacgaagcaatcttctctgcaaaccggcttactgggagtgatgtgaatctgctcgcagagaatttgctttcccctgaagatatggtgctcttccacaaccttactcagccacggggggtaaattggtgtgaacgcactacgctcagtaatgggggatgtcagtatctgtgtcttcctgcacctcagatcaacccccattcgcccaaatttacttgtgcctgtccagatggaatgctgttggcccgggatatgaggtcttgtctgactgaagccgaagcggctgtagcaacacaagagacatccactgttaggctcaaggtcagtagtacagcagtaagaactcagcatactacaacacgcccggtgcctgatacatctagacttccaggggcaactcctggactaactacagttgaaattgtgactatgtcccatcaggcactgggagatgttgctgggcgcggaaacgaaaaaaaaccctctagtgtccgagctctatctatagtactacccattgtcctcctagtattcctttgtcttggagtctttcttctctggaaaaattggagattgaagaacattaactcaattaactttgataaccccgtgtaccagaaaactacagaagatgaagtgcatatctgtcacaaccaggatggatactcatatccttcacggcagatggtgtctttagaggatgatgtggcc

SEQ ID NO: 11329 - DNA, 2580 bp, Artificial Sequence
  derived and/or modified sequence
atgggaccctggggatggaaactgcgctggaccgtggctctgctgctggccgccgccggcactgcggtgggggatcggtgtgaaagaaatgaattccagtgccaggacggaaagtgcattagctataagtgggtgtgcgatggtagtgcagagtgtcaggatgggtccgatgaatctcaggagacttgtctgagcgtgacttgtaagtcaggcgatttttcctgcggaggacgggttaaccgttgcataccacagttttggagatgtgacggccaggtggattgcgacaatgggagcgacgagcagggttgtcccccaaaaacatgctcccaggacgagttcagatgccatgacgggaagtgcatttctagacagttcgtctgcgactccgaccgagattgtctggatgggagtgacgaagcatcatgtcccgtcttaacatgcggacctgcctcttttcagtgcaacagctctacatgtatacctcagttgtgggcatgtgataatgatcctgactgtgaggacggtagcgacgagtggcctcagaggtgtagaggcctctacgtgtttcagggcgactcttcaccatgcagtgcttttgagttccattgcctctccggggaatgtattcacagttcctggcgctgcgacggggggccagactgcaaagataaatccgacgaagaaaattgcgctgtggctacatgccggccagatgaatttcagtgcagcgatggaaattgtattcacggctcccgccaatgtgatcgcgaatacgattgcaaggacatgagcgatgaggtcggatgcgtcaatgtgaccttatgcgaaggtcctaacaagttcaaatgccactcaggagagtgcatcaccctggataaagtttgtaatatggcgagagactgccgtgattggtccgacgagcctatcaaagagtgcggcacgaatgcttgcctggataataatggagggtgttcacacgtctgtaatgatctgaaaataggctacgagtgtttgtgtcctgatggtttccaactagtggcccagcgcaggtgcgaggacattgatgaatgtcaggatccagatacatgctcacaactgtgcgtgaatttagaaggcggttataagtgccagtgcgaagaaggcttccagctcgatccgcacacaaaggcctgcaaggcggtggggagtatcgcctatcttttctttacgaaccggcatgaagtcagaaagatgactctggaccgctccgagtacacatccctcatcccgaacctgagaaacgtggtggcactcgatacggaggtggcttctaatagaatctactggagtgacttgtcccaaagaatgatctgtagcacccagcttgatcgtgcccatggcgtgagctcgtatgacaccgtgatctcacgggacatccaggcacccgatggattggctgtggattggatacattcaaatatttactggacagattccgtgctggggaccgttagtgtggcagatacaaaaggggtgaagagaaagaccctcttcagagaaaatgggtctaaaccgagagctatcgtggtagaccctgtgcacgggttcatgtattggaccgattggggaacaccggccaaaatcaaaaagggcgggttgaacggtgtggatatttactccctggtgactgaaaacattcagtggcctaatggcatcaccctggatctgttgtcaggccgcctctactgggttgactctaagctgcactcgataagttcgatcgacgtgaacgggggcaaccgaaagacaattctggaagacgagaagcgtttggcccatcccttctccctcgctgtgttcgaggataaggtgttttggactgatattattaatgaagctatattttccgctaatcggctgacaggcagcgatgttaacctcttagcggagaatctgttatcacccgaggacatggttctgtttcacaatctgacacaaccccggggtgttaactggtgtgagcgcacaacgctaagtaacggcggctgtcagtacctctgccttccagcgccccagattaatcctcactccccgaagttcacatgcgcgtgccccgatggcatgctattggcgcgagacatgcgatcttgtctgaccgaagctgaagcggccgtggcaacccaggagacctccactgttcggttaaaagtgagttccacagccgtgcgaacccagcataccaccacccgccctgtgcccgataccagcaggctacccggtgctacccccgggttgactaccgtggagatcgtgaccatgagccaccaggcgctcggtgacgtggccggacggggcaatgagaagaagccttccagtgtgcgagctctctcaattgttctgccaatcgttttgctagtgttcctctgcctcggggtatttcttttgtggaagaactggcggctcaagaatatcaattcgattaattttgataacccagtgtatcagaagactacagaagacgaggtacacatctgccacaatcaggacggatattcatacccgagcaggcaaatggtgtctctggaggacgacgttgcc

SEQ ID NO: 11330 - DNA, 2580 bp, Artificial Sequence
  derived and/or modified sequence
atgggaccttggggatggaaactgcgttggacagtggctttgctccttgccgctgccggaactgcagtaggcgatcgttgtgagcgcaatgaattccaatgccaggacggtaagtgcatctcctacaaatgggtctgtgacggctctgcggagtgccaagacggatctgatgagagccaggaaacatgcctgtctgtgacttgcaagtccggcgacttttcatgcggaggtcgtgttaatagatgtattccccaattctggagatgtgacggacaggtcgattgtgataatgggtcagatgaacagggttgtcctcctaaaacctgttctcaggatgaatttcggtgtcacgatgggaaatgcattagcagacaattcgtatgtgattcagacagagactgccttgatggttccgatgaagcaagttgcccggtcctgacttgcggtccggcttcatttcagtgcaatagttccacatgtatccctcagctgtgggcgtgtgacaatgaccctgattgtgaagatggtagtgatgaatggccgcagcgctgccgcgggctgtacgttttccagggagactcttccccctgctcagccttcgaattccattgcctctctggtgaatgcatccacagctcgtggcgatgtgacggaggacctgattgcaaagacaagtcggatgaggagaattgcgcagtggctacatgtcgcccagacgagttccagtgctctgatggtaattgcatacacggatctcgtcagtgtgatcgagaatacgactgcaaagatatgtcggatgaggtgggctgtgtgaatgttaccctgtgcgagggtccaaacaagtttaagtgtcactcaggtgagtgtatcaccttggataaggtgtgtaacatggcgcgcgactgtcgtgattggtcggacgaaccgatcaaggaatgcggaactaatgcatgccttgataataatggtggatgtagccatgtttgtaacgatcttaagattggctatgagtgcctgtgtcccgatgggtttcaattagttgcgcagcgccgctgcgaggatatcgacgaatgccaggatcctgacacctgcagccagctatgtgtgaacctggaaggcgggtacaagtgccagtgcgaagaaggttttcaattggaccctcatacaaaagcttgtaaagcggtggggtcgatcgcgtacctgttctttaccaatcgccacgaggtgcggaagatgactctcgatcgcagcgagtacacaagcctcattcctaacttgcgtaatgtagttgccctcgacaccgaggttgcatccaaccgcatctactggtccgatttgtcccagcggatgatctgctcaactcagttggatcgagcccacggtgtctcaagctatgacactgttatttctcgggatatacaagcccctgacgggctagcagtggactggatccattctaatatctattggactgatagtgtacttggtacggtttctgtggccgacacaaagggagtcaagcgaaaaacattattccgagaaaacggatctaaaccaagggccattgtggttgacccggtgcacggtttcatgtattggactgactggggtacgccggcgaaaattaagaagggtggcctcaacggtgtggacatatattcgctggttaccgagaatatccagtggcctaacggcatcacactggatctcctttcgggtcgcttgtattgggtggactccaaactgcatagcatatctagtattgatgtgaacggtggaaaccgtaaaaccattctcgaggatgagaaacggctagcccaccctttcagcttagctgtgttcgaggataaagtgttttggacagatataatcaatgaggccatattttccgcgaatcggctcaccggttccgatgtcaatctcttggctgaaaatcttctttcgcctgaggacatggtccttttccacaatcttacacagcccaggggggtgaactggtgcgaacgcaccacacttagtaacggcggctgccaatatctctgtctcccagcgccccaaattaatccgcatagtccaaaatttacctgtgcttgccccgacggcatgctactcgcacgagatatgcggagttgtttaacagaagcagaggccgccgtcgctactcaggagacaagtacggtccgtcttaaggtcagttccacggcagtacggacacagcatacgactacccgtcccgtgccagacacgagcaggctgcctggtgccacgccaggtctaacaacggtcgagatcgtgactatgtcgcatcaagccctaggagacgtcgcaggcagaggtaatgaaaagaagcctagctctgttagggctttgtccatcgtcctccccattgtactcttagtcttcttatgcctaggagttttcctgctttggaagaactggagactgaagaacatcaacagtatcaattttgacaatcctgtctatcagaagacgactgaggatgaggtacacatctgccataaccaggacggctattcttatccaagccggcagatggttagtctcgaagatgatgtcgct

SEQ ID NO: 11331 - DNA, 2580 bp, Artificial Sequence
  derived and/or modified sequence
atgggaccctggggttggaaactgcgttggacagtcgctcttctcctcgctgccgctgggaccgcagtcggcgaccgatgtgagagaaatgagttccagtgtcaagatggcaagtgtatcagttacaagtgggtctgtgacggtagtgctgaatgtcaggatggctcagacgaatcacaggagacatgcctatctgtcacgtgtaagtctggcgatttctcctgcggcggtagagtcaaccgctgcatcccccaattttggcgatgcgatggccaggtcgattgtgacaacgggtctgacgagcaggggtgtccccctaaaacatgtagccaggacgagttcagatgccacgatggaaaatgcatctcacgacaatttgtctgtgactccgatcgtgactgccttgatggatccgatgaggccagctgccctgtactgacctgcggtcctgcttccttccagtgtaacagctctacgtgtatcccccagctttgggcatgtgataacgacccagactgcgaggacggctctgacgagtggcctcagcgctgccgaggtctttatgtttttcaaggggatagctcaccttgctccgcctttgaattccactgcctgagcggggagtgtattcatagctcctggaggtgtgacggggggccggattgcaaggacaaaagcgacgaagaaaactgtgccgttgcgacctgccgccctgacgaatttcagtgtagcgacggcaattgcatacatggttctcggcagtgtgatagagagtatgactgtaaggacatgagcgatgaggtaggctgcgtcaacgtcacactgtgcgaaggccctaataagttcaagtgtcattctggcgagtgcataacactggacaaagtgtgcaatatggcccgggattgccgggattggagcgacgagcctatcaaagaatgtgggacaaacgcttgcctcgacaataatggcggatgcagccacgtttgcaacgaccttaaaatcggatacgagtgcttgtgcccagacgggttccagttagtcgcccagcgtaggtgtgaagatattgatgagtgccaggatccagacacctgttctcagctgtgcgtgaacctcgagggcggttataagtgccaatgtgaagaagggtttcagctcgacccccacacaaaagcatgcaaagccgtgggctccatcgcatacctcttcttcacaaaccgacacgaagtcaggaagatgacactggaccgatccgagtacaccagtctcatccctaacctgcgaaatgtggtggctctagacacagaagtggcgtccaaccgcatctattggtccgacctctctcagagaatgatctgctctactcagctagaccgagcacacggagtgagttcatatgatacagtcattagcagagatatacaggccccggacggccttgctgtggactggatacactcaaacatctattggaccgattccgtactcggaaccgtgtctgtagcagacaccaagggagtgaaacgtaagaccctgttccgggagaacggctcaaaaccaagggctattgtggtcgaccctgtgcatggcttcatgtattggaccgactgggggacccctgcaaagatcaagaaaggcggattgaacggcgtggatatctactcactcgtgaccgagaacattcagtggcctaatggtatcacattggatctgttgagtggtcggttgtactgggtagactccaagctgcattcaatctcatccatcgatgtcaacggtggtaatcgcaagacgatacttgaagacgagaaaaggcttgctcacccgttctctctggcagtgttcgaagacaaagtgttctggacagatatcatcaacgaagcaatcttctcagcaaatcggctgacaggatctgacgtgaatttgctcgcagagaatctgctgagccccgaggacatggtcctgttccataacctgacccagccccggggtgtgaattggtgtgagcgcactactctgtcaaacggaggatgtcagtacctgtgtctgccagctccccagatcaacccgcacagcccaaagttcacctgcgcgtgccccgatgggatgctgctcgccagggatatgcggtcttgcttgactgaggcggaagcggccgtggcgacgcaggagacctcaaccgtcagactgaaggtgagctccacagccgtgagaactcagcatacgacaacgcgaccagttccagatacctcccggctgcctggagcgacacccggcctaactaccgtggaaatcgtgaccatgtcacaccaggcactgggagacgtggccggccggggcaacgaaaagaagcccagcagcgtgcgggcactgagcatcgttcttcccattgtgctgctggttttcctatgtttaggtgtgtttctgctgtggaagaactggcgccttaaaaatatcaatagcatcaatttcgacaaccctgtgtaccagaagactaccgaggatgaagtgcacatctgccataatcaggacggctactcttacccatcaaggcagatggtaagtctcgaggacgacgtggca

SEQ ID NO: 11332 - DNA, 2580 bp, Artificial Sequence
  derived and/or modified sequence
atggggccctggggatggaagctccggtggactgtggccctcctcctggccgcagctgggacagccgtcggagacaggtgtgaacgcaatgagtttcagtgccaggacggaaagtgcataagctataagtgggtgtgcgatggatcagctgagtgccaggacgggtccgacgagagccaggagacatgcctgtccgtgacctgcaagtctggtgatttcagttgcggtggtagagtcaatcgatgcatcccacagttttggcgctgtgacggtcaggtcgactgcgacaatggcagtgatgagcagggctgtccacctaagacgtgttctcaggacgaatttcgctgccacgatggaaagtgcatatcaaggcagttcgtgtgcgactcagacagggactgtttagacgggtcagacgaggcttcctgtccggtgctaacttgtggccctgcttcctttcagtgcaactcaagcacctgcattcctcaactatgggcctgcgacaacgatccagactgtgaggacggttcagatgagtggccacagaggtgtaggggactgtacgtcttccaaggggacagctccccctgctctgccttcgagtttcactgtctctcaggtgaatgtatccattcaagttggaggtgtgacggcgggcccgactgcaaggataaatcagacgaagaaaattgcgcagttgccacttgccggcccgatgagttccaatgcagtgacggcaattgcatacacgggtctcggcaatgcgatagagaatatgattgtaaggacatgagtgatgaggtgggttgcgtaaacgtaacactgtgtgagggtcccaataagtttaaatgtcattctggagagtgcatcacgctagacaaggtgtgcaatatggcaagggattgccgtgactggtccgacgaacctatcaaagagtgcgggacgaatgcatgtctggataataatggcggctgctcccatgtctgcaacgatctcaagatcggctatgaatgcctgtgccctgacggatttcaactggtcgcccagcgaagatgcgaggatatcgatgaatgccaagacccagatacctgctcacaactttgtgtcaacctggaaggtggctataagtgccagtgtgaggaaggcttccaattagacccccacaccaaggcttgcaaggccgtcggtagcatcgcctatttgtttttcaccaatcgccacgaggttagaaaaatgacattagaccgcagcgaatatacttctctaatacccaacttgcggaatgtggtggccctcgacaccgaggtggcaagtaatagaatctactggtcagatctgtcccagcggatgatatgtagcacacagctcgaccgggcgcacggcgtgtcatcctacgatactgtcatctctcgggacatccaggccccagacggtcttgcagtggactggattcatagcaacatctactggaccgattccgttttgggtaccgtatccgttgcggataccaagggggtgaaacggaagaccctgttccgcgagaatggttcaaagccaagagctattgtcgttgacccagtacacgggtttatgtattggacggactggggcacccccgccaagataaagaagggcggtctcaacggggtggatatatatagtctggttaccgagaacattcagtggccaaatggcataacactggacctgctgtcaggcagactgtattgggtcgactccaagttgcattcgatttcaagtatcgatgtgaacggtggcaaccgcaagaccattctcgaagacgaaaaacgccttgcccatcccttttcacttgcggtgtttgaggacaaggtattttggactgacataattaatgaagcaattttctccgccaacagactgacgggctcggacgtgaacttgctcgcagagaacttgctatcacccgaggatatggtgctgttccacaacttaacacaaccccgcggggtaaactggtgtgaaagaactaccttatccaacggcgggtgccagtacctctgcctgcctgcccctcagattaatccgcactccccaaaatttacatgcgcctgccctgatgggatgctgcttgccagagatatgcgcagctgtctgacagaagccgaggctgcggtggcgacccaagaaacatcaaccgtgcgcctgaaagtgtcgtctactgcagtccgcacacagcacactacgacacgaccggtaccagatacatcgcgactgcctggagctaccccaggtctcactaccgtggagatagtgactatgtcacatcaggctctcggtgacgtcgcgggacgcggcaacgaaaaaaagccttcctcggttagagcactatccatcgtcttgcctattgtgctgctggtgttcctttgtctgggggtgttcctgctctggaagaattggagactgaaaaacatcaattcaattaatttcgataacccagtgtatcagaagaccaccgaagacgaggtgcatatctgccataaccaggacggttattcgtaccccagcagacagatggtctcccttgaggacgacgtagct

SEQ ID NO: 11333 - DNA, 2580 bp, Artificial Sequence
  derived and/or modified sequence
atgggtccttggggatggaaacttcggtggacagtggcattgctgctcgccgccgccggcacagccgtcggagatcgctgtgagaggaatgagtttcaatgccaggatggaaagtgtatatcctacaagtgggtgtgtgatggttcggctgaatgccaggacgggtctgatgagagtcaggaaacttgtctgtccgtgacttgtaagtcaggcgattttagctgtggcgggcgcgtgaatagatgcattccacagttctggcgatgtgacggccaggtggattgcgacaacggcagtgatgaacagggttgtcccccaaagacctgtagccaggatgaattcaggtgtcatgacgggaagtgcattagccggcagtttgtgtgcgacagcgatagagactgtttggacgggtccgacgaggcttcctgtcctgtgcttacatgcggccccgcctcgtttcagtgtaattcgtcgacctgtatacctcagctctgggcttgcgacaacgaccccgattgcgaggacgggtccgacgagtggccacagcgttgtcgcggcttgtatgttttccagggagattcatcaccttgttccgcatttgaattccattgtttgagcggcgagtgtatccatagtagctggcgatgtgatggcggtcccgattgtaaggataagagcgacgaggaaaattgcgcggttgccacatgccgaccagatgagtttcagtgtagtgacggcaactgcatccatggaagtcgccagtgcgatcgtgagtatgattgtaaggacatgtccgatgaggttggttgtgttaacgttacactgtgtgagggaccaaacaagttcaaatgccactcgggagagtgcatcactctggacaaggtatgtaatatggcccgcgattgtagagactggagcgatgagcccatcaaggagtgcggaacaaacgcctgtctggacaacaacggaggatgcagtcatgtgtgcaatgatctgaaaatcggctacgagtgtctgtgtcctgatggcttccagctcgtggcccaaagaaggtgcgaggatatcgacgaatgtcaagacccagacacttgcagtcagttgtgtgtaaacctcgagggaggatacaagtgtcagtgcgaggaaggcttccagctcgacccacatacaaaggcatgcaaggcagtggggtcaatcgcctacctgttcttcaccaacaggcatgaggtgagaaaaatgacactggataggtccgaatatacatcccttattcctaatctgaggaacgtcgtggcactggatacagaggttgcaagtaacaggatctattggtcagacttaagccagcgcatgatctgcagcacccagctcgatcgcgcccatggggtctccagctatgacacagtgatctccagggacatccaggcccccgacggcctggccgtggattggattcactccaatatctattggacagattcggtgctgggaactgtgtcagtcgccgatactaagggcgtgaagcgcaagacactgtttcgcgagaatgggtccaagccgcgggctattgtggtcgaccctgtgcacggcttcatgtactggacagactggggtactcccgccaaaattaagaaggggggactgaatggcgtcgacatctactcattagtaactgaaaacatccaatggcctaatgggataaccctagatctcctgagtggcaggctttactgggtggacagcaaacttcattcaatttcttctatagacgtaaatggtggcaataggaagaccattttggaagacgagaagaggctcgcccaccccttctccctggccgtcttcgaagataaggtgttctggactgatataatcaacgaagcaattttcagtgcaaaccgactgacaggatctgatgtgaacctcctggccgagaaccttctgtcaccggaggatatggtacttttccataatctgacccagcctagaggagtgaattggtgtgagagaacaacgctcagcaacggtgggtgtcagtacctgtgtctgccagcaccccagatcaatccgcatagccccaaattcacgtgtgcatgccctgacggaatgttactggcgagggacatgcgcagctgtttgaccgaagctgaggccgccgtggccactcaggagacctctaccgtgaggttgaaggtgtcatccacagccgtgagaactcagcacactacaacccggcccgtacctgacaccagccgactgcctggagcaacccccggcttgacaaccgtggagattgtaaccatgtctcaccaggccctgggggatgtggctggtagaggcaatgagaagaagccctcatccgtgcgggccctctcaattgtgttgccaatagtgctcttggtcttcctgtgcctcggcgtgttccttctgtggaaaaattggcgactcaagaacatcaattccattaactttgataaccctgtctaccagaaaaccaccgaagatgaggtgcacatttgccacaaccaggatggctactcttacccttcccggcagatggtgtcgctggaagacgacgtggcc

SEQ ID NO: 11334 - DNA, 2580 bp, Artificial Sequence
  derived and/or modified sequence
atgggaccttggggctggaagctcagatggacggtcgctctcctcctcgcagcagccggaaccgcagtcggggataggtgtgagaggaatgaattccagtgtcaggatggaaagtgtattagctacaagtgggtgtgtgacggatcggctgaatgccaagatggctccgatgaatcgcaagaaacttgtctctcggtcacctgtaagtccggcgatttttcgtgtgggggccgggtcaatcgttgtattccacaattctggagatgcgacggacaagtggattgtgacaacggttcggacgaacaaggatgtcccccaaagacttgcagccaagacgagttccgatgccatgatggaaaatgtatatccagacaatttgtgtgtgactcagatcgtgactgtcttgatggttcagatgaggccagctgccctgtgcttacttgcgggccggcatcctttcaatgtaactcgtcgacctgtatacctcagctttgggcatgtgacaatgatcccgattgcgaggatgggtccgatgagtggcctcagagatgtagaggactctacgtttttcaaggcgatagctccccgtgctcggcttttgaatttcactgtctttccggagagtgcatccattcctcatggcgctgtgacgggggccctgactgtaaggacaagtcagacgaggaaaattgcgcagtggcaacttgccgaccggatgaattccaatgctcggatggaaattgtatccatggtagcagacagtgtgatcgcgagtacgactgtaaagatatgtcggatgaagtgggatgcgtcaacgttactctgtgcgaaggtccaaacaagttcaaatgccactcgggcgaatgcattactcttgataaggtctgtaacatggccagagattgtcgagactggtccgacgagccgattaaggaatgtggtactaacgcatgtctggacaataatgggggctgtagccatgtgtgcaacgatctcaagattggttacgaatgcctttgtccagatggattccaactggtggcacaacgaagatgcgaggacattgacgaatgtcaagatcctgatacttgctcccaactgtgcgtgaacctggagggcggctataagtgccagtgtgaagaaggtttccaactggaccctcatactaaggcatgtaaggccgtgggtagcatcgcatacctcttcttcaccaaccgacacgaagttcggaagatgactcttgatcgttcggaatacacctctctgatccctaatttgagaaatgtcgtggcacttgataccgaagtggcaagcaaccggatctactggtccgacctttcgcagcgtatgatttgctccacgcagctcgaccgggcacatggtgtgtcgtcgtacgatactgtcatctcacgggacattcaggctcctgacggactcgccgtggattggattcatagcaacatttactggactgactcggtgctgggaacggtgtcagtggctgacaccaagggcgtgaagcggaaaaccctctttcgggaaaacgggtcgaagccgcgggctatcgtggtggacccagtccatggattcatgtattggaccgactggggaactccagccaaaatcaaaaaaggtgggctgaatggggttgatatctacagtctcgtgaccgagaatatacaatggcctaatggaataacccttgatctgctctccggaaggctgtactgggttgattccaaactccatagcattagctcaattgatgtgaatggcggtaaccgcaagactatcctcgaagatgaaaagagacttgcacatccattcagccttgccgtatttgaggacaaagtgttctggactgacattatcaacgaggcgatcttttcggcaaaccggcttaccggttcggatgtgaacctgcttgcagaaaacttgctgtccccggaagatatggtcttgtttcataatcttactcagccacggggagtgaactggtgcgaaaggactactctgtccaatggaggctgccagtacctgtgccttcccgcacctcagatcaacccacattcccccaagttcacttgcgcgtgtccagacggaatgctgctggcaagggatatgaggagctgcctgactgaagcagaggcagccgtggcaactcaagaaacttcgaccgtgaggctcaaggtgagctcgactgcagtgagaactcaacataccaccacccgcccagtgcccgatacttcgcgccttccaggagccactccagggctcaccactgtggaaattgtgaccatgtcgcatcaagcgctcggagacgttgcgggaagaggtaacgagaagaaaccatccagcgtgagagcactctcgatcgtccttcctattgtgcttttggtgtttctctgccttggagtgttcctcctgtggaagaactggagactcaaaaacatcaacagcataaactttgacaaccctgtgtaccaaaaaacgaccgaagatgaagttcacatctgccacaaccaggatggttacagctacccttcgcggcagatggtgtctcttgaggacgacgtcgcg

SEQ ID NO: 11335 - DNA, 2580 bp, Artificial Sequence
  derived and/or modified sequence
atgggaccctgggggtggaaattgcggtggaccgtcgccctgctgcttgcagcagccggtaccgccgtgggagatagatgcgaacggaatgagttccaatgccaagatggtaagtgcatctcgtacaaatgggtctgcgacggctcagcggagtgtcaagacggctccgatgagagccaggagacttgcctttcggtcacgtgtaaatcgggtgatttctcgtgcggaggacgggtgaatagatgtatcccccaattctggaggtgtgatggtcaggtcgactgtgacaacggttctgacgagcaaggttgcccaccaaagacttgtagccaggatgaatttagatgtcatgacggtaaatgtatctcacgacagtttgtgtgtgattccgaccgcgactgtctggatggatcggacgaagcatcctgcccagttctgacctgtggacctgcttcgtttcaatgtaactcatcgacttgcatcccgcaactttgggcctgcgacaacgatcctgattgtgaagatggttcagatgagtggccccagcgttgtagaggactgtatgtgtttcagggcgactcctccccatgctcggcattcgaatttcattgcctgtcgggagagtgcatccactcgtcctggagatgtgacggaggtcctgactgtaaagataagagcgatgaagaaaattgtgctgttgcaacttgcagaccggacgaatttcaatgctcggacggaaattgtatacatggatccagacagtgcgatcgagaatatgattgcaaggacatgtcagacgaagtgggatgtgtcaacgtcaccctgtgtgagggacctaataagtttaagtgtcactcgggagaatgcattacgctggacaaagtatgtaacatggcacgcgactgtcgcgattggtcggatgaaccaatcaaagaatgtgggactaatgcgtgtctggacaataacgggggttgtagccacgtctgtaatgatctgaagataggatacgagtgtctgtgtccagacggcttccaattggtggcacaacggcggtgtgaggacattgacgaatgccaagaccctgatacgtgttctcaactctgtgtgaacctcgaaggaggctacaaatgtcaatgcgaggaaggatttcaacttgatcctcacaccaaagcatgtaaggcagtgggttcgatcgcatacctcttcttcactaacagacatgaggtgagaaaaatgaccctcgaccggtccgaatacacttcgctgattcctaatctgcgcaatgtggtcgcgctggataccgaggtcgcttccaacagaatttactggtcagatctttctcaaagaatgatttgctccacccaactggatagggcgcacggagtgtcctcctacgatactgtgatcagtcgtgatatccaggccccagacggtctggcagttgattggattcattcaaatatctactggaccgattcggtgttgggtactgtcagcgtggcagatactaaaggcgtcaaaagaaagacccttttccgggagaacggtagcaagcctcgggcaatcgtggtcgatcctgtgcatggatttatgtactggactgattggggtactcctgcaaagatcaaaaaaggaggcctcaacggcgtggatatctactcgctggtgaccgagaatattcagtggccgaacggcattactctggaccttctgtccggtaggctgtactgggtggacagcaagctccatagcatttcttcaattgatgtgaacggtggtaaccgaaagactatcctggaagatgaaaagagattggcccatcccttttcacttgcggtctttgaggacaaggtgttttggaccgacatcattaatgaagcaatcttctccgccaaccggctgacgggctcagatgtgaaccttctggcggagaacctgctgtctccggaagatatggtcctctttcacaatcttactcaaccacgaggagtcaactggtgtgagagaacgaccctgtcaaacggaggttgtcagtacctttgtctgccagcacctcagatcaatccgcattccccaaagtttacctgtgcctgtcctgatggaatgttgctggcacgcgatatgcgctcgtgtcttacggaagcagaagccgcagtggctacccaggagacttcaaccgtccgacttaaggtgtcctccactgcggtgcgtacgcagcatactaccacgcgtcctgtgccagacacctcgcgcctgccgggggcaactcccggcttgactactgtcgaaattgtgaccatgtcccatcaggctctgggagatgtggcaggccggggaaacgagaaaaagccatcctcggtgcgtgcgctgtccatcgtcttgccaatcgtcctcttggtgttcctttgcctgggagtgttccttctctggaagaattggagactcaagaacattaactccattaactttgataacccggtgtaccaaaagacgaccgaagatgaagtgcacatctgtcacaaccaagatggctactcatacccctcgcgacagatggtgtcgctggaagatgatgtggca

SEQ ID NO: 11336 - DNA, 2580 bp, Artificial Sequence
  derived and/or modified sequence
atgggtccgtggggatggaaacttcgctggactgtggctctgctgctcgcggcagcagggaccgccgtgggagacagatgtgaacgcaacgaattccagtgtcaagatgggaagtgtatttcatacaagtgggtctgcgatggatccgcagaatgtcaagacggcagcgacgagtcgcaggaaacttgtctctcagtgacttgtaagagcggagatttttcctgtggcggacgggtgaaccgatgtatcccgcagttttggcgatgtgatgggcaggtggattgcgataacggatccgatgaacagggctgcccgccaaaaacctgtagccaagatgagttcaggtgtcatgatggaaagtgtatttcgaggcagtttgtgtgtgattctgaccgcgactgtctcgatggaagcgacgaggcctcctgtcctgtgctgacttgcggcccggcaagtttccagtgtaacagcagcacttgcattccccaactttgggcatgtgacaatgatccagattgcgaagatggttccgacgaatggcctcaaagatgtagaggactttacgtgtttcaaggtgactcgtccccttgttccgcgtttgaatttcattgtcttagtggagagtgtatccactcgtcctggcgctgtgatggaggtccagattgtaaagacaagtccgatgaagagaactgtgcagtggccacttgccgacccgatgagtttcaatgttctgatggaaactgcatccacggttcacgccaatgcgatagagaatacgactgtaaggacatgtcagatgaagtcggctgcgtcaacgtgacgctctgcgagggtcctaataagttcaagtgccattcaggagagtgcattactctggataaggtgtgtaatatggcaagggattgtagggattggtcggatgagcctataaaggaatgtggcaccaatgcctgccttgacaacaatggcggatgcagtcatgtttgtaatgacctgaaaattggttacgaatgcctgtgcccagatgggtttcaattggtcgcccaacgccgctgtgaggacatcgacgagtgccaggatcccgacacgtgctcacaactgtgcgtgaacctggaaggtgggtacaagtgccagtgcgaagaaggatttcagcttgatcctcatactaaagcatgcaaggcagtgggctcgattgcatacttgttctttaccaatcggcacgaagtgcgtaaaatgacgctggacagatcggaatacacctccctcattcctaaccttagaaatgtggtggcacttgatactgaagtggccagcaacagaatttactggtccgatctttcacagcgtatgatatgtagcacccaactggacagagcacatggggtatcgtcatatgatacggtgatttcgagggacatccaggctccggatggacttgcggtcgattggattcacagcaacatttactggaccgactctgtgcttggtacggtgtcggtggcagataccaaaggcgtcaagcgtaagacgcttttcagagagaatgggtccaagcctcgagcaattgtggttgacccagtccatgggttcatgtactggactgactggggaactcccgctaagattaagaagggtggtcttaatggagtggacatctacagcctggtgaccgagaacatccaatggcctaatggcatcaccctcgatcttctttctgggagattgtactgggtagatagcaaactccactcgatctcatcaattgacgtgaacgggggtaatcgcaagactatactcgaagatgaaaaaaggttggcccatccattctcccttgcggtgtttgaggataaggtcttttggaccgatatcataaacgaagcgatcttttcggcaaaccggcttactggatcagatgtcaacctgctggcagaaaatcttctctcgcccgaggatatggtgctgtttcacaaccttactcaaccacgaggagtcaactggtgcgagaggaccacgctttccaacggtggttgtcaatacctctgtctgcctgcaccccagataaacccacattcgccaaagttcacctgtgcatgccctgatggcatgttgctggcaagggacatgcggtcgtgtctgaccgaagcggaagcggccgtggcaacccaggaaacttcgaccgtcagactgaaggtgagcagcactgctgtcaggacccagcataccactacccgtcccgtccctgacacctcgagactgcctggtgccacccctggtcttactaccgttgaaatcgtgactatgtcgcatcaggcccttggagatgtggctggacgcgggaatgaaaagaaaccaagttcggtgagagcgctgtcgattgtgcttccaatcgtcctccttgtgttcctttgtctgggcgtgtttttgctctggaagaattggcgcctcaaaaacattaacagcatcaatttcgacaaccctgtataccaaaagaccactgaagatgaggtgcatatttgtcacaaccaagacgggtactcctatccatcccgtcaaatggtatcgctggaggatgacgttgca

SEQ ID NO: 11337 - DNA, 2580 bp, Artificial Sequence
  derived and/or modified sequence
atgggcccatggggctggaagctccggtggactgtcgccctgctgctcgccgcagccggtaccgcagttggggatagatgcgaacgcaatgagtttcaatgtcaggatggcaagtgtataagctacaagtgggtgtgcgacgggtcagccgaatgccaggacggctctgacgagtcgcaggagacatgcctgtccgtgacgtgcaagtcgggcgatttttcctgtggtggacgggttaatcgctgtattccacagttctggcggtgtgacgggcaagtggactgtgataatgggtctgatgagcagggctgtcctccaaaaacttgttcgcaggacgaattcagatgccacgatggcaagtgcataagtaggcagttcgtatgcgacagcgatagggactgcttggacggaagcgacgaagcctcttgtcctgtgttgacatgtggaccagctagtttccagtgtaactcatctacctgcatccctcagctgtgggcctgcgacaacgaccccgactgcgaggatggtagcgacgaatggcctcagcgctgtcggggtctttacgtttttcagggggattcgagcccatgctctgcttttgagtttcattgcctgtctggagaatgcattcatagcagctggaggtgcgacggcggccccgattgtaaagacaagtctgacgaagaaaattgtgctgtggctacttgcagacctgacgaatttcagtgctctgatggcaattgtattcatggcagtcggcagtgcgatagggaatatgattgtaaggatatgtctgacgaggtgggttgtgttaatgtgacgctgtgtgaggggcccaacaaattcaagtgccacagcggggagtgcatcaccctcgacaaagtgtgcaatatggcgcgtgactgcagggactggagcgacgaacctataaaggagtgcggcaccaatgcatgcttagataacaacggtggctgtagccatgtttgcaacgatctgaaaatcggatatgagtgcctctgccccgacggcttccaattagttgcgcagcggaggtgtgaagacatcgatgagtgccaggacccggacacgtgctcgcagctgtgtgtgaatttggaaggaggctacaagtgccagtgcgaggaaggcttccagctggaccctcatacaaaagcctgtaaggctgttgggtccatcgcatatttattctttaccaatcggcacgaagtcaggaagatgaccttggaccggtctgaatacaccagcttgatcccaaatttaaggaatgtcgtggctttggataccgaggtagcttccaatagaatctactggtcggacctctcccagaggatgatttgttctacccagctggatcgtgcccatggcgtgagctcttatgataccgtgatcagccgcgatatccaagcacctgatgggctggcggtggactggatacactccaacatctattggactgacagtgtgcttggcaccgttagtgtcgccgatactaaaggggtaaaaagaaaaaccttgttccgagaaaacggatctaaacccagggcgattgtggtggaccctgttcatggattcatgtactggacagactggggaactcccgccaagattaagaagggggggttaaacggcgtggacatttattcactcgtgactgagaatatccagtggcccaatggtatcacgctagatctgctctcgggtcggctttactgggttgactcaaagctgcattccatctcatctatcgatgttaacggcggaaatcgaaagaccatcctggaagacgagaagcgtctggcacatccattttccttagcagtattcgaagacaaggtgttctggactgacattattaacgaggctatctttagtgcaaaccgtttgactggctccgacgtgaacctgctggccgaaaacctgctaagcccggaagacatggtgttattccacaacctgacccagccgcggggagtcaactggtgtgagcgaacaaccctctctaacggcggctgtcaatatctatgcttgcctgcgcctcagataaacccacacagcccaaagtttacttgtgcatgcccagatgggatgctgctagccagagatatgcggtcctgcctgacagaggccgaagccgctgtggcaactcaggagacgagcacagtgcgactgaaggttagtagcaccgcagtgagaactcagcacaccaccactcgtcctgtaccagatacttctcgattacctggtgcaacaccgggactaactaccgtcgagatcgttacaatgtctcaccaggctctgggagatgtagctggcagaggaaatgagaagaagcccagcagcgtacgcgcgttgtctattgtgctccctatcgtgctactggtattcctctgcctcggagtttttttactttggaagaactggcgactgaagaacataaattccatcaattttgacaacccggtttaccagaagacaacagaggatgaagtacacatatgtcacaaccaggacggctacagctatccatctagacagatggtttccctcgaagacgatgtggca

SEQ ID NO: 11338 - DNA, 2580 bp, Artificial Sequence
  derived and/or modified sequence
atggggccgtggggatggaagctgcggtggaccgtggctctcctcctggccgcggccggaaccgctgtcggtgaccggtgtgaaagaaacgaattccagtgtcaagatggaaaatgcatctcctacaagtgggtgtgcgatggatccgccgaatgccaggacggatcggacgagtcccaagaaacttgcctgtcggtgacgtgtaagtcaggagatttctcgtgcggagggagggtgaacagatgtatcccccagttctggagatgtgacggccaggtggactgtgacaacgggtcagacgaacaggggtgcccgccgaaaacttgttcccaagatgaattcaggtgtcacgacggcaagtgcatctcacgccagttcgtctgcgactcggaccgggactgcctggacgggtcggacgaggcttcctgcccggtgctgacgtgtggacccgcgtcgttccagtgcaattcctcgacttgtattccgcagctgtgggcctgcgacaacgacccggactgcgaggacggctcagacgaatggccccaacgctgccgaggcctgtacgtgttccaaggcgattcatccccgtgttccgccttcgaattccattgcttgagcggggaatgcatccactcgagctggcggtgtgacggcggtcccgattgcaaggacaaatcggacgaagaaaactgtgcggtggcaacgtgtcggccggacgaatttcagtgttctgatggaaactgcatccacggcagccggcaatgcgaccgggagtacgattgtaaggacatgagcgacgaagtcggatgcgtgaacgtcaccctgtgtgaaggtcctaacaagttcaaatgccacagcggcgagtgcatcacccttgataaagtgtgcaacatggccagagactgccgcgattggtcggacgagccgatcaaagaatgcggaaccaatgcgtgcctggacaacaatgggggatgttcacatgtctgcaatgacctcaagatcggttatgagtgcctgtgtccggacgggttccagttggtggcccaaaggcggtgcgaagatattgacgagtgtcaggaccccgacacttgctcccagctgtgtgtgaaccttgaaggcggatacaagtgccaatgcgaagagggcttccagctggatccgcacaccaaagcgtgtaaggctgtgggaagcatcgcctacctcttcttcactaaccggcacgaggtgcggaagatgactctggataggtcagaatatacgtcgctgatccccaatttgcggaacgtcgtggcgctggatacggaagtcgccagcaaccgcatctactggtcggatctttcgcagagaatgatctgctccacccaactggatcgcgcacatggggtcagctcgtacgacaccgtgatcagccgcgatatccaggctccagatggactggcggtggattggatccattcaaacatttactggactgactctgtgcttggaaccgtgagcgtggctgacaccaagggagtgaagcgcaagactttgttccgcgaaaacgggagcaagccgcgagcgatcgtggtggatccggtgcacggcttcatgtactggacggactggggcaccccggcaaagatcaagaaagggggtctgaacggagttgacatctactccctggtgaccgagaatatccaatggccgaacggcatcactctcgatctgctgtcaggtaggctgtactgggtcgactcgaagctgcattcgatcagctcaatcgatgtcaacggaggaaaccgcaagaccatcctcgaagatgaaaagcggctggcgcacccattctcgctcgccgtgtttgaggacaaggtcttttggaccgacattatcaacgaggcgatcttttcggccaaccgcctcacgggaagcgatgtgaacctgctggccgaaaatctcctctcaccggaggacatggtcttgttccataacctgacccagccgagaggtgttaactggtgcgaacggaccacgctttctaatgggggatgccagtacctgtgcctccctgcgccacagatcaatcctcatagcccgaagtttacttgcgcctgccccgacggaatgttgctcgccagagacatgcgctcgtgcctcactgaagccgaggcggcggtcgcaacccaggaaacttcgaccgtgcggctgaaggtgtcctccactgcagtgcgcacccaacataccactaccagaccggtgccagatacctcgagacttcctggggccactcccggactgaccaccgtggagatcgtcactatgtcgcaccaggcgctcggtgacgtggcaggaagagggaacgagaagaaaccgtcctcagtgcgggctctgtccattgtgctgcctatcgtgctgctcgttttcctgtgcctcggcgtctttctgctgtggaagaattggcgactgaagaacatcaatagcatcaacttcgacaatcctgtctaccaaaagaccaccgaggatgaggtccacatctgtcataaccaagacggctactcctacccatcccgccaaatggtgtcgctggaagatgatgtggcc

SEQ ID NO: 11339 - DNA, 2580 bp, Artificial Sequence
  derived and/or modified sequence
atggggccatggggatggaagctgcggtggactgtggccctgctgctggcagcggctggtactgcggtcggagacagatgcgaacggaacgaattccagtgtcaagacggaaagtgcatcagctacaaatgggtctgcgatggatccgccgaatgccaagacggttcggacgaatcacaggagacttgcctgtctgtgacttgtaagtccggagatttctcgtgcggcggacgcgtcaaccgctgcatcccgcagttctggcgctgtgacggtcaagtggactgcgataacgggtccgacgagcagggctgcccgcctaagacttgttcgcaggacgagtttcggtgtcacgacggcaagtgtatttcccgccagtttgtgtgcgactccgaccgcgactgcctcgacggatcggatgaagcgtcatgcccagtgctcacttgcggaccagcctccttccagtgcaactcttcgacttgcatcccccaactgtgggcctgcgataacgacccggattgcgaagacggatctgacgaatggccacagcgctgcaggggcctgtacgtgttccaaggcgactcgtcaccgtgctccgcttttgaattccactgcctgtcgggagaatgcatccatagcagctggagatgcgacggcggacccgattgcaaggacaaaagcgacgaagaaaattgcgccgtggccacttgccgcccggatgagttccaatgctcggatggaaattgcatccacgggagccggcaatgcgacagagagtacgattgcaaagatatgagcgacgaggtcggatgcgtgaatgtgaccctttgcgaagggcctaacaagttcaagtgccactcgggggaatgcatcactctggacaaagtgtgcaacatggcacgagactgccgggactggtcggatgagccaatcaaggagtgtggaactaacgcttgcttggacaacaacggcggttgttcacatgtgtgtaacgatctcaagatcggatacgagtgtctgtgcccggacgggttccagctggtggcgcaacggcggtgcgaggacatcgatgaatgccaagatcctgatacctgctcgcagctgtgcgtcaatctggaaggtggttacaagtgccagtgcgaggaagggttccaacttgacccgcacaccaaggcttgcaaagccgtcggaagcatcgcttatctgttctttaccaaccgccacgaagtgaggaaaatgaccctggacagaagcgagtacacctccctgatccctaatctgcggaacgtggtcgcgctcgacaccgaagtggccagcaaccggatctactggtctgacctgagccaacgaatgatttgcagcacccagttggaccgggcccatggtgtgtcgagctacgacacggtgatcagccgggacattcaggcgccggacggcctggctgtcgattggatccatagcaacatttactggaccgactcagtgctcggaactgttagcgttgctgacaccaagggagtgaagcggaaaactctcttcagagagaacggtagtaagccaagagctatcgtcgtagatccggtgcacggtttcatgtattggacggattggggaacgcccgcgaagatcaagaagggaggactcaatggagtggatatctacagccttgtcaccgagaacatccagtggccgaacggaatcaccctggacttgctgtccgggagactttactgggtggactcgaagctgcactcgatctccagcatcgacgtgaatgggggaaatagaaagaccatcctcgaggacgagaagcggctcgctcatcccttttcgctcgctgttttcgaggacaaggtgttttggacggacatcatcaacgaggccatcttttccgctaatcgcctgaccgggtcggatgtcaacctgctggcggaaaatctgctttcccctgaagacatggtgcttttccataacctcacgcagccccgcggagtcaactggtgcgagcgcactactttgtcaaacggagggtgccagtacttgtgtctcccggctccgcagatcaacccacacagccccaaattcacctgtgcatgccccgatggaatgctgctcgcccgggacatgcggtcctgcctcactgaagcggaggctgcggtcgcaacccaagagacttcgaccgtgcggcttaaagtgtcgtcgactgccgtccgcacccagcatactaccacgcggccggtgcctgacaccagccgcctcccaggcgcgactccaggactgacgacggtcgagatcgtgaccatgagccaccaggcactcggcgatgtggccgggcgcggaaatgagaaaaagccatcgtccgtgcgggccctttccatcgtgctgccgatcgtccttttggtcttcctctgcctcggggtcttcctcctgtggaagaactggcgcctgaagaacatcaacagcatcaacttcgataatcctgtctaccagaagactacggaagacgaggttcacatctgccataatcaggacggatacagctacccatcacggcaaatggtgtcccttgaagatgacgtggca

SEQ ID NO: 11340 - DNA, 2580 bp, Artificial Sequence
  derived and/or modified sequence
atgggtccatggggctggaaactgagatggaccgtagccctgctcctggcggccgcaggaacggcggtcggagatcgatgcgagaggaatgagttccagtgtcaggacggcaagtgtatatcgtacaagtgggtctgtgacgggtcagccgaatgtcaggatggttcggatgagtcgcaggagacgtgtctgtccgtcacttgcaagtcaggagatttctcatgtggaggacgggtgaacagatgcattccgcagttctggcggtgtgatgggcaagtcgattgtgacaacggatcggacgaacaagggtgcccgccaaagacctgttcgcaggacgaattcagatgccacgatggtaagtgtatctcgcggcagttcgtgtgcgattccgaccgggattgcctggatggatcagacgaggcgtcgtgccctgtgctgacctgcgggcctgcctcgttccaatgtaattcgtcgacctgtatcccccagctctgggcctgcgacaatgatcctgactgcgaagatggttcagacgagtggccccagagatgtaggggactgtacgtgtttcagggagacagctcgccttgtagcgcattcgagtttcattgccttagcggagaatgcatccattcatcctggcgctgcgacgggggaccggactgtaaggacaagtccgacgaagagaattgcgccgtcgcgacttgccggccggacgaattccagtgctcggacggtaactgtattcatgggtcccggcagtgcgaccgcgagtacgactgcaaagacatgtccgacgaggtcggctgcgtgaatgtgaccctctgcgaaggcccgaacaagttcaagtgccatagcggggagtgcatcacccttgataaagtctgcaacatggcccgcgattgccgcgattggtcggacgaaccgatcaaagagtgcggaactaacgcatgtctggacaacaatggaggatgctcgcatgtctgtaacgacttgaagattggctacgagtgcctgtgcccggatggattccaactggtggcccagcggcgctgtgaagatatcgacgaatgccaggacccagacacttgctcgcaactctgtgtgaacctggaaggagggtacaagtgccagtgcgaggaaggattccagcttgatccgcacactaaggcctgcaaagcggtgggatcaatcgcttacctgttctttaccaatagacacgaggtcaggaagatgactttggatcgcagcgagtacacgtccctgatccctaaccttcggaacgtggtcgccctggataccgaagtggcgtccaacagaatctactggtcggatctgtcgcagcgcatgatctgctctactcaactggaccgggcccacggagtgtcgagctacgacaccgtcatctcgagggacatccaagctccagacggactcgccgtcgattggatccactccaatatctactggaccgattcagtgctggggaccgtctccgtggcagacactaagggagtcaagagaaagacgttgtttagggagaatggttccaagccgcgcgccatcgtggtcgatcccgtgcatgggttcatgtactggaccgactggggaaccccggctaagatcaaaaaggggggactcaacggcgtggacatatacagcctcgtgactgagaatatacagtggcccaacgggattacgctggacctccttagcggaaggctgtactgggtcgactccaagctgcactcgatctcatcaattgacgtgaacggaggcaaccgcaagacgattctggaggacgagaagcggctcgcacatccgttctcgctcgccgtgttcgaagataaggtgttctggaccgatatcatcaacgaagctattttctccgccaaccgcctgactggatccgatgtgaacctgttggcggaaaacttgctgagcccagaggatatggtgctgttccacaacttgactcagccaaggggagtgaactggtgcgaaaggactaccctgagcaacggcgggtgccaatacctgtgccttcccgcgccccaaatcaatccgcactccccgaagttcacttgcgcttgccctgatggaatgcttctcgccagagatatgaggtcgtgcctgaccgaagcggaggcagccgtggccacccaggaaactagcacggtgcggctgaaagtctcgagcacggctgtgcggactcaacataccactactcgccctgtgccggacacctcccggttgccaggcgcgactcccggactgaccactgtggaaatcgtgaccatgtcacaccaggctttgggagatgtggcaggacgcggcaatgagaagaagccgtcgagcgttagagcattgagcatcgtcttgccgattgtcctcctcgtctttctgtgcctgggagtgttcctgctgtggaaaaactggcgcctgaagaacatcaactccatcaactttgacaaccccgtgtaccaaaaaactaccgaagatgaagtgcacatctgtcacaaccaggatggctactcgtaccctagccggcagatggtgtccttggaagatgatgtggcg

SEQ ID NO: 11341 - DNA, 2580 bp, Artificial Sequence
  derived and/or modified sequence
atgggtccttggggatggaaactccgctggacagtcgctctactgctggccgccgcaggaactgccgttggtgaccgctgcgaacgcaacgagtttcagtgccaggatggcaagtgcatctcttacaaatgggtgtgcgatgggtcggcagaatgtcaggacggtagcgacgaatcccaagaaacatgcctgtccgtcacctgcaaaagcggcgatttcagttgcggcggtagagtgaatagatgtattccgcagttctggagatgcgatgggcaagtggactgtgacaatgggagtgatgaacaggggtgcccgcccaagacatgtagtcaggacgaattcaggtgtcacgacggcaaatgcatctctaggcagttcgtctgtgatagcgatcgggattgtcttgatggatctgatgaggcctcatgtccagtattgacttgcggacctgcttctttccaatgtaactcatccacttgcatacctcagctgtgggcttgtgacaatgatcctgattgcgaggatggcagcgatgagtggcctcaacggtgtcgtggcctctacgtattccaaggggacagctccccctgtagtgccttcgagtttcactgcttaagtggcgagtgtatccatagtagctggagatgtgatggcggtccggattgcaaggacaagtctgatgaggagaattgcgctgttgctacgtgtcgccccgacgaatttcagtgcagcgatggcaactgcatccatggcagcagacagtgcgacagagagtacgactgcaaagacatgagcgacgaagtgggttgtgtgaatgtgaccctatgcgagggccccaataaattcaagtgtcactccggggagtgtataacactagataaggtttgcaacatggcccgcgactgtcgtgattggagtgacgaacctatcaaagagtgcggaacaaacgcatgcctggataacaatggcggctgtagtcatgtgtgcaacgatttgaagattggctatgaatgcctatgccctgatggctttcagttggtggctcagcgcagatgcgaggacatcgatgaatgtcaggaccccgacacctgctcacagctgtgcgttaatcttgagggcgggtataagtgccagtgtgaggagggcttccagctcgatccacacaccaaggcatgtaaggctgtggggtcaatcgcctatcttttctttaccaaccgccacgaggttcggaaaatgacactggaccgcagcgagtatacatcactgatcccgaacttgaggaatgtggtcgccttagataccgaggtcgcttctaacaggatctattggtcagacctttctcagaggatgatctgctctacacagcttgaccgggcgcacggagtcagttcctatgacaccgtcataagccgcgacatccaggctccagatggtctcgccgttgactggattcattcaaacatctactggaccgatagtgtgctgggcacagtcagcgtggctgacacgaagggcgttaaaaggaaaaccctgtttcgggaaaatgggtctaagccccgagccattgtggtggatccagtgcacggctttatgtactggacagattggggtactcctgctaagattaaaaaaggaggacttaatggggtagacatctatagcctggtaaccgaaaacatccaatggcccaatgggataactctagacctcctgagcgggagactgtactgggtagacagtaaacttcactcaatttcctccatagacgtgaacggcgggaatcgaaagactatattagaagacgagaagcggctggcacatccattcagcttggctgtctttgaagacaaggtattctggaccgacattatcaatgaggcaatatttagcgctaatcgcttgacagggtctgacgtaaatctccttgccgagaatctcctgtcccctgaagacatggtcttgttccacaatctgacccaacctaggggtgtgaactggtgtgagagaactacactaagtaatggtggatgtcagtatctctgcctgcctgcgcctcagatcaacccgcattcccctaagtttacatgtgcatgcccagacgggatgttgcttgcacgcgatatgcggtcttgtcttactgaggcagaggcggctgtggccacacaggagactagtaccgtgcgtttaaaagtaagctctaccgcagtccgcacccagcatacaacgacacgtccagtcccggatacatctcggctgcctggcgccacacccggtcttaccaccgtcgaaattgtcacaatgagtcatcaggcgcttggggacgtggctgggaggggcaatgaaaagaaacccagttccgtgagagcgttgagcattgtgctgcccattgtcctgctagtgtttttatgtttgggcgtgttcctgctgtggaaaaactggcgactgaagaacataaactccattaactttgacaatcctgtatatcaaaagaccacggaagacgaggtccatatctgtcataaccaggacggctactcctacccatccagacagatggtttccttggaagacgatgttgcc

SEQ ID NO: 11342 - DNA, 2580 bp, Artificial Sequence
  derived and/or modified sequence
atgggtccttggggctggaaactgaggtggaccgtcgcattactgctggcagctgccgggactgcggttggagaccgttgcgaacgcaacgagttccagtgtcaggatgggaagtgcatcagctacaagtgggtatgcgacggttccgccgaatgccaggacgggtccgacgagagtcaggaaacttgtctgtctgtaacatgcaagtccggggatttctcgtgcggaggccgggtgaatcgctgtatcccgcaattttggagatgtgacgggcaggtagattgcgacaacggcagtgacgagcagggttgcccgcctaaaacctgctcacaagacgaattccgatgtcacgacgggaagtgtatcagtcggcagtttgtgtgcgacagtgacagagattgtcttgatggatcagatgaagcttcctgtcccgtacttacttgtggaccggcctcattccagtgcaatagtagcacatgcatcccccagctgtgggcctgtgataacgacccagattgtgaagatggcagcgatgaatggccccagcgctgcagaggtttgtacgtgtttcagggagactcatctccctgttccgccttcgagttccattgccttagtggtgagtgcatacattcaagctggcgatgcgacggcggccccgattgtaaggataaaagcgacgaggagaactgcgccgtcgcaacttgccggccggacgagttccagtgttcagacgggaactgtattcacggttcccgccagtgtgaccgagagtacgattgtaaggatatgtccgatgaagtgggctgcgtgaatgtgaccttgtgtgagggccccaacaaattcaagtgccattcaggtgagtgtattaccctcgacaaggtgtgcaacatggctcgcgactgtcgggactggtcggacgagccgattaaggagtgtgggaccaacgcctgcctggataataacggcggctgctctcacgtgtgcaacgacctgaaaattggctatgagtgcctctgccctgatggctttcaactcgtggcacagcggaggtgcgaagacatcgatgaatgtcaggacccagacacttgtagccagctgtgcgttaatctagaaggaggctacaagtgccagtgtgaggagggttttcaactggacccgcataccaaagcctgcaaagccgtcggcagcatcgcgtacctgttctttactaatagacacgaagtcaggaagatgaccctggatagaagtgagtacacaagtctcatcccaaatctgcggaatgtggtggccctggacaccgaggtagcaagtaatagaatatactggtctgacttatcacagcggatgatatgcagtacccagttggatcgtgcccatggagtttcttcttacgacacggtgatatctcgggatatacaggctcctgatggactggcggttgactggattcattccaatatctattggactgatagtgtgctcggcactgtaagtgttgccgacaccaaaggggtgaagaggaaaacgttattcagagagaatgggtctaagccaagggctatagtcgtggatcctgtgcatggcttcatgtactggaccgactggggcaccccggcaaagatcaagaagggcggcctgaacggagtggacatttatagcctcgtgacagaaaacatacagtggccaaacggcattacattagacctcctctcaggcaggttgtactgggtggactcaaagttacactctataagttcaattgatgtgaatggtggaaatagaaagaccattctggaagacgagaagcggctggcccatcctttttcccttgctgtcttcgaagacaaagtgttctggacggacatcattaatgaagctatcttttcagctaaccggctaaccgggtcagatgtgaacctgctggccgagaacctgctctcgcctgaagatatggttctctttcataacctcacccagccccggggcgtgaattggtgtgaacgcacaaccctctcaaacggggggtgccagtatctttgtcttcccgcacctcaaatcaatcctcactctccgaagtttacatgcgcttgccccgacggcatgcttctcgctagagatatgcgttcctgcctgacagaagctgaggccgccgtggccacacaggagacaagtaccgttcgactcaaggtgtcctccacggctgtccgtacccagcatacaacgacaaggcctgtgcctgacacatcccgtctccctggggccactcccgggcttaccacagttgagatcgtgactatgagccaccaagcccttggtgatgtcgctggtcggggtaatgagaaaaagccctccagcgtgcgtgctctgagcatcgtgctgccaatcgtcttgctggtctttctgtgcctcggcgtgttcttactatggaaaaactggcggctcaagaacataaactcaataaactttgataaccccgtataccagaagaccacggaggatgaagtccacatttgtcataaccaggatggatattcgtatccttctaggcagatggtgtctctggaagatgacgttgcc

SEQ ID NO: 11343 - DNA, 2580 bp, Artificial Sequence
  derived and/or modified sequence
atgggaccttggggatggaagctgagatggaccgtggctcttctgctggctgcagccggaaccgctgtcggtgataggtgtgaacgcaatgagtttcagtgccaagatggaaaatgtatctcgtacaaatgggtgtgtgacggatccgccgaatgccaggatggaagcgatgaatcacaggaaacgtgtttgtccgtgacgtgtaaatccggagatttttcctgtggcggacgcgtgaacaggtgcattcctcagttctggagatgcgatgggcaggtcgattgtgataatggaagcgacgagcagggatgcccccctaagacctgttcccaggatgaatttagatgtcacgacggtaaatgcatttcgcgccaattcgtgtgcgattcggatcgagattgcctcgatggatcagacgaggcgagctgccctgtgctcacttgtggaccagcgtcgttccagtgtaactcgtcgacctgtataccgcaactgtgggcatgtgataacgatcctgattgtgaagatgggtcagatgaatggccccaaaggtgcaggggactttacgtgtttcaaggtgattcgtccccttgttcggccttcgagttccattgtctgtcgggggaatgtattcactcgagctggcgttgtgatggggggccagactgcaaagacaagagcgatgaagaaaattgtgcagtggcgacttgtcgccctgacgaatttcaatgtagcgatggtaactgtatccatggctcccgccaatgtgatcgagagtacgattgcaaagatatgagtgatgaagtgggatgcgtgaacgtgaccctgtgtgaaggtcctaacaagttcaaatgtcattcaggagaatgcattacccttgacaaggtgtgtaacatggccagagattgtcgggattggtcagatgagcctataaaggagtgtggaaccaatgcatgtctggataacaacggtggttgtagccatgtctgtaatgatcttaagattggttacgaatgcctttgcccagatggctttcaactggtcgcacagaggagatgtgaggatatcgacgaatgtcaagatccagatacctgttcgcaactctgcgtgaacctggaaggtggctacaagtgccagtgtgaagaaggttttcagctggatccccataccaaagcctgcaaggcagtgggctccattgcgtatctcttcttcactaataggcatgaagtccgcaagatgaccctggacaggagcgagtacacttcgcttattcctaatctcagaaacgtggtcgcactcgataccgaggtggcatctaacagaatttactggtcggacctgtcacagcgaatgatttgttcgactcagcttgacagagcacatggtgtgtcaagctacgataccgttatctcacgggacattcaagccccagacggattggccgtggattggatacactcgaacatctactggactgacagcgtgcttgggaccgtgtccgtcgcagacactaagggtgtcaagcgcaagaccctttttcgggagaacggttctaagccaagggcaatcgttgtggatccagtgcacggattcatgtactggaccgattggggaacccccgcgaaaatcaaaaagggtggccttaacggtgtcgatatctactcgctggtcactgaaaacattcaatggccaaatggtattacgctggacctgttgtccgggcggctgtactgggtggactctaagctgcattcaatcagctccattgatgtcaatggaggtaatagaaagactatacttgaggacgagaaaaggcttgctcaccctttcagccttgccgtgtttgaagataaggtgttttggactgacattatcaacgaggcgattttcagcgcaaaccggctcaccggatccgatgtgaatctgctcgcggagaacttgctgtcccctgaagatatggtcttgtttcacaatctgacccaaccccgaggggtgaactggtgcgaacgcaccacccttagcaacggaggttgtcagtacctctgcctgcccgccccccagattaatccccacagccccaagttcacctgcgcgtgcccagatgggatgcttttggcaagagatatgcgctcatgtcttaccgaagcagaagcggcagtggcgacccaggaaacttcaactgtgaggctgaaagtctcaagcactgctgtgaggacccaacataccaccaccagaccagtgcctgatacgtcacggctgccgggggcaacccctggacttacgaccgtggaaattgtgaccatgtcgcaccaagcactgggcgacgtggccggacgcggaaacgaaaagaaaccttcgtcggtgcgtgccctgtcaatcgtgcttcctattgtgcttcttgtgttcctgtgtcttggggtgtttctcctctggaagaactggagactgaaaaacattaactcgatcaactttgataacccagtctatcaaaagaccacggaggatgaagtccatatctgtcataaccaagatggatactcgtacccctcacgacaaatggtgtcactggaggacgacgtcgct

SEQ ID NO: 11344 - DNA, 2580 bp, Artificial Sequence
  derived and/or modified sequence
atgggaccatggggatggaaactccgctggaccgtggcactgcttcttgcagcagcgggaactgctgtgggtgatagatgcgaacgtaatgagttccaatgtcaagacggtaagtgcatttcgtacaagtgggtctgcgatggatcggcagaatgtcaagatgggtcagacgaaagccaagaaacctgcttgtccgtcacttgtaagtccggagacttctcgtgtggaggtcgggtcaatcgctgcattcctcagttctggaggtgtgatggacaagtggactgtgataacggttccgacgaacagggttgtcctcccaagacctgttcccaagatgaatttaggtgtcacgacgggaagtgtatcagcaggcaatttgtgtgcgattcggatcgggattgtttggatggctccgatgaagccagctgcccggtgctcacttgtggtccagcaagttttcaatgtaactcgtcgacttgtatacctcaactctgggcatgtgacaatgaccctgattgtgaggacggcagtgacgagtggccgcagcgctgcaggggactgtacgtctttcagggcgactcgtcgccctgttcggcatttgagttccattgtttgtcaggagagtgtatccactcctcatggagatgtgatggaggaccagattgtaaagacaagtccgacgaggaaaactgcgcggtggctacctgtcgcccagatgagtttcagtgttcggacggtaattgtattcatggtagcagacagtgtgatcgagaatacgattgcaaggatatgtcggacgaggtgggttgcgtgaatgtgactctctgtgaaggcccaaataagtttaagtgccattcgggtgagtgcatcactcttgataaggtgtgcaacatggcacgcgactgccgcgattggtccgacgaacctatcaaagaatgtggtaccaatgcgtgtctggataacaacgggggttgtagccatgtctgcaatgacctgaagatcggctacgaatgtctgtgtccagacggatttcaacttgtcgcacaacggcggtgtgaagatattgatgaatgtcaggaccctgacacctgtagccaattgtgcgtgaacctcgaaggggggtataagtgtcaatgtgaagaagggtttcagctcgatccacataccaaggcttgcaaagcagtgggatcgattgcctatctgttctttactaatcgacacgaagtgcgaaagatgaccctggacaggtccgagtacacctcgttgattccaaatttgagaaacgtcgtggccctggatactgaggtggcctctaatcgcatttactggtccgatctttcgcagagaatgatttgctccactcagctcgatagagcccatggagtgtcaagctacgataccgtgatcagcagggatatccaggcccccgacggacttgcagtggactggatacattctaacatttactggactgatagcgtcctgggcaccgtgtcggtggcggacaccaagggtgtcaaacggaaaactttgtttcgcgagaacggatcgaaacccagagcaattgtcgtggatcctgtgcacgggttcatgtattggactgactggggaactccagcaaaaatcaagaagggcggtttgaacggagtcgatatctacagcctggtgacggagaacattcaatggcccaatggcattaccctggatcttctctcaggacggctttactgggtcgattcaaaactgcactcgatttcctccatcgatgtgaacggcggaaatagaaagaccatccttgaagatgaaaagagacttgctcatccgttttcgttggccgtgttcgaagataaggtgttctggactgacatcattaatgaagcaatcttttctgcaaatagactgactggctccgacgtgaacctgctggcagaaaatctgctcagccccgaagatatggtcctctttcacaacctcacgcagccaagaggagtcaactggtgtgaacgcaccaccctgtccaatggcggttgtcaatacctttgcctgcctgccccgcagatcaatccgcattcgcccaaattcacctgtgcctgtccagatggcatgctccttgcgagagacatgagaagttgtttgactgaagcagaggctgccgttgctacgcaagagactagcaccgtgcgcctcaaggtgtcgtccactgccgtgaggacccagcatactaccacccggccagtgccagatacttcgcggctgccgggcgcaacgccaggactgaccactgtggagattgtgaccatgagccaccaagcacttggagatgttgcagggcgcggtaatgagaagaaaccttcatcggtgcgcgcactgtccatcgtgttgcctatcgtgcttctggtgtttctgtgtctgggggtctttcttctgtggaagaattggcgccttaagaacatcaacagcatcaattttgataaccccgtgtaccaaaagactaccgaagatgaagtgcatatctgccataaccaagatggatactcctacccttccaggcagatggtatccctggaagatgacgttgca

SEQ ID NO: 11345 - DNA, 2580 bp, Artificial Sequence
  derived and/or modified sequence
atgggaccgtggggatggaagctgcgctggaccgtggccctgctgctcgccgcggccgggactgcagtgggtgaccggtgcgagcgcaacgagttccagtgccaagacgggaagtgcatttcgtacaagtgggtctgcgacggtagcgcagagtgccaggacggttccgatgagtcacaggaaacctgcctttcagtgacgtgcaagagcggagactttagctgcggcggaagggtcaataggtgcatcccgcagttctggcggtgcgatggacaagtggattgcgacaatggatcagatgagcaagggtgccccccaaaaacttgctcacaagacgaattccggtgccatgacggaaagtgcatctcgagacagttcgtgtgcgactctgaccgcgactgtctcgatgggtccgacgaagcgagctgtccagtgctgacttgcggacccgcttcgttccagtgcaactcctcgacttgcattccgcaactgtgggcgtgtgacaatgacccagactgtgaggacggatcagatgaatggccgcaacggtgccggggtctgtacgtgtttcagggtgattcgtcgccttgctcggcattcgaattccactgcctgtcgggagagtgcatccattcatcgtggagatgtgacgggggaccagattgtaaggacaaatccgatgaggaaaactgcgcggtggccacctgccggccggatgaattccagtgctcagacggaaactgcatccacggatcccggcaatgcgaccgtgaatatgattgtaaggatatgtccgacgaggtcggatgcgtgaatgtcactctgtgtgagggacccaacaaattcaaatgccattcaggcgagtgtatcacccttgacaaggtttgtaacatggctcgcgattgcagagactggtcagatgaaccaattaaggagtgtggaaccaacgcctgtctggacaataatggaggctgctcgcatgtttgtaacgatctcaagatcggatacgaatgcctgtgccccgatggcttccagttggtcgctcaacggcggtgcgaggatatcgacgagtgccaggatccggacacctgcagccaactctgcgtcaatctcgagggtggctacaagtgccagtgcgaagaaggcttccagctggacccgcataccaaggcttgcaaggcggtgggatccatcgcgtacttgttcttcactaacagacacgaggttaggaagatgactctggatagaagcgagtacacctcactgatcccaaacctcaggaacgtggttgcactggataccgaagtcgcctcgaatcgaatctactggtcggacctcagccaaagaatgatttgctccactcagctggatagagcccatggagtctccagctacgacactgtcatcagccgcgacatccaggcaccggatggactggccgtggactggatccactcgaacatttactggactgactcagtattgggtactgtgtctgtggcggacactaagggagtgaagcgaaagactttgttccgggagaacggatcgaaaccaagggcaatcgtggtcgacccggtgcacggcttcatgtactggactgattggggaaccccggccaagatcaaaaagggcggactgaacggagttgacatctactcacttgtgactgaaaacatacagtggccaaacggaatcaccttggatctgctgtccggaaggctctactgggtcgactcgaagctgcatagcatctcttcaatagacgtcaacggtggcaacagaaagaccattctcgaggacgaaaaacgcctcgcgcacccgttttcgctggctgtgttcgaggacaaggtgttctggactgacatcatcaacgaggccatcttttcggccaatcggctcaccggatcggacgtcaatctcctggccgaaaacctcctttcgccagaggacatggtcctgttccataaccttacccaaccaaggggagttaactggtgcgaacgcaccaccctcagcaacggagggtgtcagtacctctgcctcccagctccacagattaatccacacagccctaagttcacctgtgcatgtccggacggcatgctccttgcacgggacatgcggagctgtctcactgaggcggaagcagctgtcgcgacccaggaaaccagcaccgtccgcctcaaagtgtcatcaactgctgtgcgcacccaacacaccactacccggccggtgccggatacctcgcgcctgccgggcgccactcctggactgaccaccgtggaaatcgtcactatgtcccatcaagcgctgggggatgtggcaggacggggtaatgagaagaaaccttcgtcggtgcgggccctgtcaatcgtcctgccgatcgtgctcctggtgttcctgtgcttgggagtgttcctgctttggaagaactggcggctgaagaacataaacagcatcaatttcgataaccctgtgtaccaaaagacgaccgaggacgaagtccacatttgccacaatcaagacggatactcataccctagccgccagatggtttcgcttgaggacgacgtggcc

SEQ ID NO: 11346 - DNA, 2580 bp, Artificial Sequence
  derived and/or modified sequence
atgggcccttggggctggaagctgcggtggacagtggctctgctgctggctgcggctggaactgcggtgggagacagatgtgagaggaatgagtttcaatgccaagacggcaaatgcatctcttataaatgggtgtgtgacgggtcggccgaatgtcaggatggctccgacgaatctcaggagacctgcctcagcgtgacttgtaagagtggggattttagttgcggagggcgagtgaaccgctgtatcccccagttctggagatgtgacggccaagtggactgcgacaatggaagtgacgaacaggggtgccctccaaagacctgttcccaggacgagtttcggtgccacgatggaaagtgcatcagcaggcagtttgtatgcgattccgaccgcgactgtctggacggctccgacgaggcatcgtgcccggtgttgacttgcggacctgcttcattccagtgtaattctagtacctgtatcccccaactgtgggcttgcgacaacgacccagactgcgaggacggctccgacgaatggccccagcgctgtaggggcctgtacgtgtttcagggcgacagttcaccatgcagcgcctttgagttccactgcctgagtggcgaatgcattcatagctcatggagatgcgacgggggacccgattgcaaagataagagtgatgaagaaaattgtgccgtcgccacctgcaggcccgacgaatttcagtgcagcgacggaaactgtatccacgggtcaaggcaatgtgacagagagtatgattgtaaggatatgtccgatgaggtggggtgtgtgaacgtgacactttgcgaggggccgaacaagttcaagtgtcattcaggcgagtgtatcactttagataaggtatgcaatatggcacgcgactgtcgagattggtctgacgagcccataaaagaatgcggcacgaatgcttgtctagacaacaatggcgggtgctctcacgtgtgtaacgatctaaagatcggctacgaatgcctgtgtcccgacggcttccagctggtagcccagcgcaggtgcgaagacattgacgaatgtcaagacccggacacttgttcccaactgtgtgtcaatctggaggggggatataaatgccagtgtgaggaagggttccagctggatccccacacaaaggcctgcaaggccgtggggtctatcgcctaccttttcttcaccaacaggcacgaagtccgaaagatgaccctggacaggtctgaatacactagcttaattccaaatttgagaaacgtggtggcgctcgacacagaagtagccagcaaccggatctactggtcggacctgagccaacggatgatttgctcaacacagctggacagggcacatggtgtatctagctacgatactgtaatctctcgcgacattcaggcccccgacgggctcgccgtcgattggatccactccaatatttattggaccgactcagtgcttggtaccgtctccgtggcagacactaagggcgtgaaacgcaagactttgtttcgcgagaatgggtccaagccccgagctatcgtggttgaccccgttcatggttttatgtactggacagattggggcaccccagctaagattaagaagggcggattgaacggggttgatatctattcactcgttactgaaaatatccagtggcctaatggcattaccctggatctgttgagtggtcggttgtactgggtcgacagcaagctgcattcaatttcctctattgatgtcaatggaggcaatcgaaaaaccatactcgaggatgagaagcgcctggctcacccattctcgttggccgtgttcgaggataaggttttttggaccgatatcattaacgaagccatcttttcagccaatagactgacaggatcagacgtgaacctgctggccgaaaaccttttatcccccgaagatatggttctgttccacaacttgacgcagccacgtggggtgaattggtgcgagcggaccacgctatccaatggcggatgccagtacctctgcctgcctgcccctcagatcaacccgcattctccaaaatttacatgtgcgtgccccgacggcatgctactggctagggatatgcggagctgtttaaccgaagccgaggctgccgtcgccacacaggaaactagcacagtcagattgaaagtctcgtcaactgcggtccgtactcagcacacgaccacaaggccagtgcccgacacgagccgccttcctggagccactccgggtctgactacggttgagatcgtgactatgagtcatcaggccctaggtgatgttgccggccgggggaacgaaaagaagccctctagcgttcgcgcgcttagcatcgtcctgcccattgtgcttctggtgtttctgtgtctcggtgtcttcctcctgtggaaaaactggaggctgaagaatattaatagtattaacttcgataatccagtttaccagaagaccactgaagacgaggtgcacatctgtcacaatcaggatggatacagctatccctctcggcaaatggtctcactggaggacgatgtagca

SEQ ID NO: 11347 - DNA, 2580 bp, Artificial Sequence
  derived and/or modified sequence
atgggtccgtggggttggaaattacgatggacggtagcgctattattagcggcggcgggtacggcggttggtgatcgttgtgaacgaaatgaatttcaatgtcaagatggtaaatgtatatcgtataaatgggtttgtgatggttcggcggaatgtcaagatggttcggatgaatcgcaagaaacgtgtctatcggtaacgtgtaaatcgggtgatttttcgtgtggtggtcgagtaaatcgttgtataccgcaattttggcgatgtgatggtcaagtagattgtgataatggttcggatgaacaaggttgtccgccgaaaacgtgttcgcaagatgaatttcgttgtcatgatggtaaatgtatatcgcgtcaatttgtatgtgattcggatcgtgattgtttagatggttcggatgaagcgtcgtgtccggtactaacgtgtggtccggcgtcgtttcaatgtaattcgtcgacgtgtataccgcaactatgggcgtgtgataatgatccggattgtgaagatggttcggatgaatggccgcaacgatgtcgaggtttatatgtatttcaaggtgattcgtcgccgtgttcggcgtttgaatttcattgtctatcgggtgaatgtatacattcgtcgtggcgatgtgatggtggtccggattgtaaagataaatcggatgaagaaaattgtgcggtagcgacgtgtcgtccggatgaatttcaatgttcggatggtaattgtatacatggttcgcgtcaatgtgatcgagaatatgattgtaaagatatgtcggatgaagttggttgtgttaatgttacgctatgtgaaggtccgaataaatttaaatgtcattcgggtgaatgtataacgttagataaagtatgtaatatggcgcgtgattgtcgagattggtcggatgaaccgataaaagaatgtggtacgaatgcgtgtttagataataatggtggttgttcgcatgtatgtaatgatttaaaaataggttatgaatgtctatgtccggatggttttcaattagtagcgcaacgtcgatgtgaagatatagatgaatgtcaagatccggatacgtgttcgcaactatgtgttaatttagaaggtggttataaatgtcaatgtgaagaaggttttcaactagatccgcatacgaaagcgtgtaaagcggttggttcgatagcgtatttattttttacgaatcgacatgaagttcgaaaaatgacgttagatcgttcggaatatacgtcgttaataccgaatttacgaaatgttgttgcgttagatacggaagtagcgtcgaatcgaatatattggtcggatttatcgcaacgtatgatatgttcgacgcaactagatcgtgcgcatggtgtttcgtcgtatgatacggtaatatcgcgagatatacaagcgccggatggtttagcggtagattggatacattcgaatatatattggacggattcggttctaggtacggtatcggtagcggatacgaaaggtgttaaacgaaaaacgctatttcgagaaaatggttcgaaaccgcgagcgatagtagtagatccggttcatggttttatgtattggacggattggggtacgccggcgaaaataaaaaaaggtggtttaaatggtgttgatatatattcgttagtaacggaaaatatacaatggccgaatggtataacgttagatctactatcgggtcgactatattgggttgattcgaaattacattcgatatcgtcgatagatgtaaatggtggtaatcgaaaaacgatactagaagatgaaaaacgactagcgcatccgttttcgctagcggtatttgaagataaagtattttggacggatataataaatgaagcgatattttcggcgaatcgattaacgggttcggatgtaaatttactagcggaaaatttattatcgccggaagatatggttctatttcataatttaacgcaaccgcgtggtgttaattggtgtgaacgaacgacgttatcgaatggtggttgtcaatatctatgtctaccggcgccgcaaataaatccgcattcgccgaaatttacgtgtgcgtgtccggatggtatgttattagcgcgagatatgcgttcgtgtctaacggaagcggaagcggcggtagcgacgcaagaaacgtcgacggtacgtttaaaagtatcgtcgacggcggttcgtacgcaacatacgacgacgcgaccggtaccggatacgtcgcgactaccgggtgcgacgccgggtttaacgacggttgaaatagttacgatgtcgcatcaagcgttaggtgatgttgcgggtcgtggtaatgaaaaaaaaccgtcgtcggttcgtgcgttatcgatagtactaccgatagtactactagtatttttatgtttaggtgtatttctattatggaaaaattggcgattaaaaaatataaattcgataaattttgataatccggtttatcaaaaaacgacggaagatgaagtacatatatgtcataatcaagatggttattcgtatccgtcgcgtcaaatggtatcgttagaagatgatgtagcg

SEQ ID NO: 11348 - DNA, 2580 bp, Artificial Sequence
  derived and/or modified sequence
atgggtccgtggggatggaagttgagatggacggtcgcactgttgctggcagccgccggcaccgctgtcggagacaggtgcgaacgcaacgagtttcagtgccaggacggtaaatgcatatcgtacaaatgggtgtgcgatggaagcgccgaatgccaagatggcagcgacgagtcgcaggaaacgtgcttgtccgttacgtgcaagtccggcgatttcagctgcggtggccgtgtgaatcgatgcatacctcagttctggcgctgtgatggccaggtcgattgcgacaatggctccgatgaacaaggctgtcctccgaagacatgctcgcaggatgagttccgctgccatgacggtaagtgcatcagccgccaattcgtgtgtgactccgatcgtgactgcctggatggctcggacgaggcctcatgtccagttctgacctgcggcccagcgtccttccagtgtaactcgagtacatgcattccgcagctgtgggcttgtgacaacgatcccgactgcgaggacggaagtgacgagtggccgcaacggtgccgcggattgtatgttttccagggcgatagtagtccatgttcggcattcgagttccactgcttgtcgggtgagtgcatccacagctcatggaggtgtgatggaggtccggattgcaaggacaaatccgatgaagagaactgcgcagtggcaacttgccgtccagacgagttccaatgctcagacggcaattgtatccatggatcacgtcagtgcgatcgggagtatgactgtaaggatatgagtgacgaggtgggttgtgtgaatgtcaccctgtgcgagggtccaaacaagttcaaatgtcactctggtgagtgcatcaccctggacaaagtttgcaacatggcgcgcgattgcagggattggagcgacgagccgatcaaagagtgcggaaccaatgcctgtctcgacaataatggcggctgttcgcatgtgtgcaacgacctcaagatcggatatgagtgcttgtgcccggacggctttcaattggttgcccagcgacgctgtgaagacatcgacgaatgccaggatcctgatacgtgcagccagttgtgtgtaaaccttgaggggggttacaagtgccaatgtgaggaggggttccaacttgaccctcacacaaaagcctgcaaagcagtcggttcgattgcctatttgtttttcacgaaccgtcacgaggtgcgaaaaatgacccttgacaggagtgaatacacaagtctgatacccaacctgaggaatgtggtggctctggatactgaggtggcctcgaatcgcatctattggtcggatttgagccagaggatgatatgctcaacgcagctggatcgagcccacggcgtgagctcgtatgataccgtgataagcagggatattcaggctcccgatgggctggctgtcgattggatccacagtaacatttactggaccgattccgttcttggcactgtgagcgtggcggataccaagggtgttaagcgtaagacgctatttcgcgaaaacgggtcgaagccccgtgccatcgttgtggacccagtgcatggatttatgtattggacggattggggtacccccgcgaagatcaaaaaagggggtctcaacggcgtcgatatctactcgctagtcacagaaaatatccagtggccgaacgggatcacactcgatcttctgtcgggccggctttactgggtggattcgaagctgcacagcatttcctccatcgatgtaaatggcggcaataggaaaaccatcttggaggatgaaaaaagactggcgcatccattttcattggcggtgtttgaggataaagtcttctggacggacatcataaacgaggcaatcttctcggcgaatcggctcactgggtccgatgtaaacctgctcgcggagaacttgctttcaccggaagatatggtgctcttccataatttgacccaaccccggggagtgaactggtgcgagcgcactaccctgtccaacggcggatgccagtacttgtgcctgcctgccccccagattaatccacacagccccaagttcacgtgcgcctgccccgacggcatgttgctggcccgcgatatgcggtcgtgcttaacggaggccgaggcagctgtcgcgacgcaggagaccagcacggtacgcctaaaggtgagtagcactgccgtcaggacccagcacaccaccactcgacccgtcccggatacatctcgcctgccgggtgctacccccggactaacgaccgtcgagatagttaccatgtcgcatcaagctctgggcgacgttgctggccgggggaacgagaaaaagccatccagcgtgcgtgccctgtcgatcgtactgccaatcgtgctgctggtcttcctatgtctaggcgtgttccttctgtggaagaactggcgcctgaagaacatcaatagtattaacttcgataatccggtttatcagaagacaacggaggatgaagtgcatatctgccataatcaggatggctactcgtacccctcgcgtcagatggtttcacttgaggacgatgtggcc

SEQ ID NO: 11349 - DNA, 2580 bp, Artificial Sequence
  derived and/or modified sequence
atgggaccatggggctggaaattgagatggaccgtggccctgctgctggccgcagctggaactgcagtgggcgataggtgtgaaaggaatgaattccagtgtcaggacggaaaatgcatttcatacaaatgggtgtgtgacggctcagccgaatgtcaagacggatccgacgagtcgcaagaaacctgtctttccgtcacttgtaagtcgggtgatttctcctgcggaggaagagtgaaccgctgcatcccgcaattctggcggtgtgatggtcaagtcgattgtgacaacggttccgatgaacaggggtgcccgcctaaaacctgtagccaggatgagtttcgctgccacgatggcaaatgcatttcgcgccaatttgtctgcgactccgatcgggattgccttgacgggtcggacgaagcgtcatgtccggtcctgacctgcgggccagcatccttccagtgcaactcgtcgacctgtatcccccaactctgggcgtgtgacaatgaccctgactgtgaagatggatcggacgaatggccgcagagatgtcgcgggctctacgtgttccagggagactcaagcccctgtagcgcctttgaattccactgcctctcaggagagtgcatccactcctcatggcggtgcgatggaggaccggactgtaaagataaaagcgatgaggagaattgcgctgtggcgacctgtcggcccgacgaatttcaatgtagcgatgggaattgcatccacggatcgagacagtgcgaccgcgaatacgattgcaaggatatgtcagatgaagtgggatgcgtgaacgtgaccctgtgcgaggggccaaataagttcaagtgccatagcggcgagtgcatcactctggataaggtctgcaacatggcacgggactgtcgcgactggagcgacgaaccgatcaaggagtgtgggactaatgcatgtctcgataacaacgggggctgtagccatgtgtgcaatgacctgaaaatcgggtacgaatgtctctgccctgatggattccaactggtcgcgcagaggaggtgtgaggacattgatgaatgccaggacccggacacctgctcccagctgtgcgtgaacctggagggcggatacaagtgtcagtgcgaagagggatttcaattggacccgcacaccaaagcctgtaaggccgttggttcaatcgcctaccttttctttaccaacagacatgaggtccggaagatgaccctcgaccggtcggaatacacctcactgatcccgaatctccgcaatgtggtggcgctggatactgaggtggccagcaataggatttactggtccgacctctcccagcggatgatctgcagcactcaacttgatcgggcccatggagtctcatcatacgataccgtcatctcgcgggatatccaggcccctgatggactggcggtcgactggatccatagcaacatctattggaccgactcagtgctgggaaccgtgtccgtcgcggacacgaagggtgtgaaaagaaagaccctcttcagagagaacggttcgaagccgcgggcgatcgtggtggaccctgtccacggattcatgtactggactgattggggcactccagccaaaatcaagaaggggggactgaacggagtggacatctacagccttgtgaccgaaaacatccaatggcccaacggaatcaccctcgacttgctctcgggtcggctgtactgggtggactctaagctccactcaatttcctccatcgatgtcaatggggggaaccgcaagaccatcctcgaggacgagaagcggttggcccatcctttctcactggctgtctttgaagataaggtgttttggactgatatcatcaatgaggcgatcttctcggccaaccggcttactggatcggatgtgaacctcctggcagaaaacctcttgtcccccgaagatatggtgctgttccataacctgacccagccgcgcggagtcaattggtgtgagcgcaccactctttccaacggagggtgccaatacctgtgcctgccagccccgcagattaatccacactctccaaagttcacttgcgcatgcccggatggaatgttgctcgcccgggacatgcgctcatgcctcactgaagcagaggccgcagtcgcgacccaggagacttccacggtgcggctgaaggtaagctcgactgcagtacgcacccagcacaccaccacgcggccagtcccggacacgtcaagactcccgggcgctactccgggactgaccaccgtcgaaatcgtgaccatgagccaccaggctttgggagacgtcgcggggcgtggcaacgagaagaaaccttcgtccgtcagggcactgtcgatcgtgctgccgattgtgttgctcgtgttcctgtgcctcggcgtgttcctgctgtggaagaactggcgcctgaagaacattaactcaattaactttgataatccggtgtaccaaaagaccacggaggatgaagtgcatatctgccacaaccaagacgggtactcgtatccgtcgaggcagatggtgtctctggaggacgacgtagcc

SEQ ID NO: 11350 - DNA, 2580 bp, Artificial Sequence
  derived and/or modified sequence
atgggaccatggggatggaagttgaggtggactgtcgcgcttttgttggctgctgctgggacggctgtgggggacaggtgcgaaagaaacgaattccaatgccaagatgggaagtgcatatcttacaagtgggtttgtgatggaagcgccgagtgtcaagacgggagcgatgaaagccaagaaacctgcctttcggttacctgtaaatccggagattttagttgcggcggaagagtaaacagatgtataccgcaattctggcgttgtgacggacaagttgactgtgataacggctcagacgagcaaggctgtcctccaaagacctgttcgcaagacgagtttcggtgccatgacggtaaatgcatttcgaggcaatttgtatgcgacagcgatagagattgtcttgacggtagtgacgaagcttcttgcccagtactgacatgtgggcccgcgtccttccaatgtaattcatcaacgtgcatcccccaactttgggcttgcgataacgatcctgactgtgaagacggttctgacgaatggccacaacggtgtcggggattatatgtgttccaaggtgattcatcaccgtgctctgcttttgagtttcattgcctttcgggcgaatgtatacatagtagttggagatgtgacggaggaccagactgcaaagataaatctgatgaggagaattgcgcggttgccacttgccggcctgatgagttccaatgttctgatggaaactgtattcacggttcacgtcaatgcgaccgtgagtatgactgtaaggatatgagcgatgaggtgggctgtgttaacgtcactctctgtgagggaccaaataaattcaaatgtcactcaggagaatgcattaccctggataaggtgtgtaatatggcacgtgactgtagggattggtcagatgagcccatcaaagagtgtggtaccaatgcgtgcttggataataatggtggttgctcgcatgtttgcaacgatttaaagatcggttatgagtgtttatgtccggatggtttccagttggtcgcccaacgaagatgtgaggacatagatgaatgccaagatcccgatacgtgctcacaattatgcgttaacctggagggaggttacaagtgccaatgtgaagaggggtttcagctcgaccctcacactaaagcatgcaaagctgtgggtagcattgcctacctgttcttcacaaatagacacgaggttaggaaaatgactttagatcgttcagaatatactagcttgattccaaacctcaggaacgtggttgcgctggatacagaagtggcttctaatcgcatttattggagcgatttgagccaaagaatgatctgttcgacacaacttgatcgtgcccatggagtatcgtcttacgacactgttatttcacgtgacatacaagcccctgatggcctggcagttgactggattcatagtaacatatactggacggatagcgtcctgggcactgtttcggttgctgacaccaagggtgtaaagcgcaagaccctttttagggaaaacgggagtaagccgagggctatagttgttgatccagttcatggtttcatgtattggaccgattggggcactcccgcaaagatcaagaaaggtgggttgaatggtgttgatatatacagcttggttaccgagaacatacagtggcctaacggtatcacccttgatctgctttccggcaggttgtactgggtagattcgaagctgcatagtatctcgagtattgatgtaaatggaggtaaccgtaagaccattctggaagatgagaagcgtttggctcatcctttttccctcgctgtttttgaggataaagtgttttggacagatataataaatgaggctattttctccgccaatcgtttgacaggatcggatgtgaatctcctcgctgaaaatcttttatctccagaagatatggtgttgtttcacaatcttactcaacctaggggagttaactggtgcgaacgtactactctgagcaacggtggatgccagtatttgtgcttaccagccccacaaattaatcctcactctcccaagttcacgtgcgcctgtcctgacggtatgttactagctagggacatgcgctcttgcctgacagaagccgaggcggcagtggctactcaagagacatctaccgttaggttaaaggtaagtagtaccgcagtacgcactcaacatactacaaccagaccagtgcccgatacttcccggttgcctggagctacaccaggtcttaccactgtcgaaatcgttacaatgtctcaccaggcccttggggacgttgcaggaaggggaaacgaaaagaagccgtctagtgttcgtgcgctctctattgtgttgcctattgtgttgctcgtttttctctgcttgggagtttttcttctctggaagaactggaggctaaagaacattaattctattaattttgacaacccagtctatcaaaagaccacggaagatgaggtgcatatttgtcataatcaagatggatactcttatccctcccgacagatggtttcccttgaggacgacgtcgca

SEQ ID NO: 11351 - DNA, 2580 bp, Artificial Sequence
  derived and/or modified sequence
atgggaccttggggttggaaattgaggtggactgtggcccttctgctggcagcagcaggaacggccgtgggagataggtgcgaacgcaatgaatttcaatgtcaagatggtaaatgtattagctacaagtgggtctgtgacggttcagccgagtgtcaagacggatccgatgagtcgcaagaaacctgtctcagcgtgacctgtaaatcaggggacttttcgtgcggaggacgtgtgaatagatgcatccctcagttttggagatgtgacgggcaggtggattgcgacaatggaagcgacgaacaaggctgcccaccaaaaacttgttcgcaagatgaattcagatgtcacgacggaaagtgtatatcccggcaatttgtctgtgattcagatcgggattgtctggacgggtccgatgaagcctcgtgtcctgtgctgacttgtggacctgcatctttccagtgtaattctagcacctgcattcctcaactttgggcgtgtgataatgaccccgattgtgaggatggttcggacgaatggccacagcgatgccgcggactctacgtgtttcagggtgactccagcccttgttccgcgtttgagttccactgcctgtccggagagtgtatacatagctcctggaggtgtgatgggggccctgattgcaaggataagtccgatgaggaaaactgtgccgtggcaacctgtagacctgatgaattccaatgtagcgatgggaactgtatccacggaagccggcagtgcgatcgcgagtacgactgcaaagatatgagcgatgaggtgggatgtgttaacgtgaccctctgcgaaggaccaaacaagttcaagtgtcattcgggcgagtgtatcacgttggataaggtgtgcaacatggccagagattgtcgtgattggagcgatgaacctattaaggaatgcgggaccaacgcgtgtctggacaacaacggtggatgctcgcatgtgtgcaacgaccttaagattggttacgaatgtttgtgccctgatgggttccagcttgttgcacagagaagatgtgaggacattgatgaatgtcaggatccagacacctgttcgcaactgtgcgtgaatctggagggaggttacaagtgtcagtgtgaagagggctttcaattggacccccacaccaaagcatgcaaagccgtgggtagcattgcatatctgttctttaccaacagacacgaggtgagaaaaatgacgctggatcgatcagaatacacctccctgattcctaaccttcggaacgtggtagccctggatactgaagtggcgtcgaacagaatttactggtcggatctgagccaaaggatgatttgttcgacgcaactggacagagctcatggagtgagcagctacgacaccgtgatctcaagagatatacaggcccctgatggactggcggtcgactggattcattcaaacatttactggaccgactcagtgctgggcaccgtgagcgtggccgacaccaaaggagtcaagcgtaagaccctcttccgcgaaaacggatcgaagccccgcgcaatcgtggtcgatcctgtgcatggtttcatgtactggactgattggggaactccagccaagattaagaaaggcggactcaacggtgtagacatatactcgctcgtcaccgagaacattcagtggccaaacggaatcacccttgacctgctttccggaagattgtactgggtggatagcaaactgcattccatctcctcgattgacgtcaacggtggaaaccggaaaacgattctggaagatgaaaagcgtctggcacatccctttagcttggctgtctttgaagataaagttttctggaccgatatcattaacgaagcgatctttagcgccaaccgacttactggatcggatgtgaaccttctggccgaaaacctcctctcccctgaagatatggtcctgtttcataatctcacccaacctagaggtgttaattggtgtgaacgtactactctgagcaatggaggctgtcagtacctttgcctgccagcacctcagataaatccacattcgccaaagtttacctgtgcgtgcccggacggaatgcttctggcaagagatatgcggtcgtgcctgactgaagcagaagcagcggtcgcaactcaggaaacctcaaccgtgaggcttaaagtgtccagcaccgcagtgagaactcaacataccactactagacctgtgcctgacacttccagattgccaggcgcaactcccggcttgactaccgtggaaattgtcactatgtctcatcaagcccttggagacgtggcagggcgcgggaatgagaagaaaccatcctcggtgcgggcactgtcaatcgtgttgcctattgtgctgctggtgttcctttgtctgggtgtctttcttctgtggaagaattggcggcttaagaacataaactccattaacttcgataaccctgtgtaccagaaaacgaccgaggacgaagtgcacatctgtcacaaccaagatggttacagctacccatcgagacagatggtgtcacttgaggatgacgtggcc

SEQ ID NO: 11352 - DNA, 2580 bp, Artificial Sequence
  derived and/or modified sequence
atgggtccctggggatggaagctgagatggaccgtggccttgctcctagcagcagccgggaccgcggtgggcgataggtgcgagagaaatgaattccagtgccaggatggaaaatgcatcagctacaagtgggtctgcgacgggtcagctgaatgccaggacggcagtgacgagagccaagagacctgcctttccgtgacatgcaaatccggagactttagttgtgggggaagagttaacagatgcattcctcagttctggcgctgtgatgggcaggttgactgtgacaacggaagcgacgaacaagggtgccctcctaagacctgtagccaggacgagttccgctgccacgatggcaagtgcattagtagacagttcgtgtgtgactcagatcgggattgtttggacggcagtgatgaggcctcgtgtccagtgctcacctgcggtccagcttctttccagtgcaatagctccacctgtatcccccagctttgggcttgcgacaacgacccagactgtgaagatggatcagatgagtggcctcaaaggtgccgtggactctacgtgttccaaggggatagctcaccctgctcagctttcgagttccattgcctaagcggtgagtgtatacactcatcttggcgttgcgatggtggtcctgattgtaaggacaaatccgacgaagagaattgtgccgtggcgacttgtcgcccagatgagttccagtgcagcgatggtaattgcattcacggctcaaggcagtgcgaccgcgagtatgactgtaaagacatgagcgatgaggtgggatgcgtgaatgtgactctctgtgaaggccccaataagtttaaatgtcatagcggggaatgcatcacccttgataaggtgtgtaacatggctcgggattgtcgggattggtctgacgaacctatcaaggagtgtggaacaaatgcttgtctcgataataacggcgggtgttcacacgtgtgcaatgatctgaagataggttacgagtgcttgtgcccagacggattccagctggtggcgcagagacggtgtgaggacattgatgaatgccaggacccagatacatgttcccagctctgtgtgaatctcgaggggggttataaatgccagtgtgaagaggggtttcagctagatcctcacaccaaagcatgtaaggccgttgggtccatcgcttatcttttcttcactaatcgccacgaagtgagaaagatgacattagaccggtcagagtatacatccctgattcccaatctccgtaacgtggtggcactggataccgaggtagccagtaatagaatttattggtctgacctgtcccagagaatgatctgctcgacgcagctggacagggcccacggagtgtctagttatgacacggtgatcagccgcgatatccaggctccagatggtctcgccgtggactggatccattcaaatatatactggaccgattccgtgctgggaactgtgtctgtggccgacaccaaaggggtgaaacgcaagaccttatttcgagagaatgggagcaagcccagggctatagtagtggatccagtgcacggattcatgtattggacagactggggtacgcccgccaagatcaagaagggcggcttaaatggagtcgacatctatagcctcgttactgaaaatatacagtggcctaatgggattacactggatttgctctccgggcggctctattgggtggacagtaagttgcattctatttcatcaatcgacgtcaatggcggcaatcggaaaaccattttggaggatgagaagagactggctcatccattctctctcgcagtgtttgaggataaggtattttggaccgacataatcaatgaggccatcttcagcgcaaaccggcttactgggtccgacgtcaaccttttagccgagaacttgctgtcccccgaagacatggtgttgttccacaatcttacacaacctcgcggggtcaactggtgtgagcggacaacactgagcaatgggggctgtcagtacctgtgcctcccagcgccgcagatcaacccacacagtcccaagttcacatgtgcctgcccagatggcatgttacttgcccgcgatatgcggtcctgcctcactgaggccgaggctgctgtcgcgacacaagaaactagtactgtgaggctaaaagtgtcttctacagccgttaggacgcagcacactactacccgaccggtgccggataccagcaggctacccggtgcaactccagggctgaccacagtggagattgtgacaatgagccaccaagctctcggggatgttgcaggcagggggaacgagaagaaaccgtcttctgtacgggctttgtcaattgtcttgcccatcgtgcttctggtgttcttgtgtctgggcgtcttcctcttgtggaaaaactggaggctgaaaaacatcaactcaatcaacttcgataacccagtgtatcaaaaaactaccgaggacgaggtgcacatttgtcacaatcaggatggctacagttacccatccagacagatggtctctcttgaagacgacgtggct

SEQ ID NO: 11353 - DNA, 2580 bp, Artificial Sequence
  derived and/or modified sequence
atgggtccgtggggctggaagctgcgctggaccgtcgcacttctgctcgcagccgcgggaactgctgttggagatagatgtgaaagaaacgagttccagtgtcaagacggtaaatgtatctcgtacaagtgggtgtgtgatggatccgccgagtgccaagatggtagcgatgaatcccaagaaacctgtttgtcagtgacttgtaagagcggcgacttttcatgcgggggccgagtgaaccgctgtatccctcaattctggcggtgtgatggacaagtcgattgcgacaatggttcggatgagcaggggtgtcctcctaaaacctgctcccaggatgaatttcggtgccacgacggaaagtgtatctctcgacaattcgtgtgtgattcggaccgggattgcctggatggaagtgatgaggcatcctgtccagtgcttacgtgcgggcctgcatcatttcaatgcaattccagcacctgtattccccagctttgggcatgtgataacgaccctgactgtgaggacggatcagacgaatggccgcagcggtgcagaggtctttacgtgtttcaaggtgatagctcaccctgcagcgcctttgaatttcactgtctttcgggagagtgcattcattcctcctggagatgtgacggtggtccggattgtaaagataagtcggacgaggaaaattgtgcagtggcaacctgcagacctgatgaatttcaatgttctgatggaaactgtatccacggatccagacagtgcgatagagaatacgactgtaaggatatgagcgatgaagtgggatgtgtgaacgtcactctttgcgagggaccaaacaaattcaagtgccattcaggagaatgtatcaccctcgacaaggtgtgtaacatggcgcgagattgtcgcgattggtccgatgagcctatcaaagagtgtggtaccaacgcctgtctggacaataacggtgggtgttcccatgtgtgcaacgatctgaaaattggatatgagtgcctttgtcctgacggatttcagctcgtggcccaacgtaggtgcgaggatatagatgagtgccaggatcctgatacctgttcacaactgtgtgtcaaccttgaaggcggatacaagtgccagtgtgaagagggatttcagttggacccgcatactaaggcctgtaaggcggtgggttcaatcgcctaccttttctttaccaacagacatgaagtgaggaagatgactcttgatagatctgaatacacgtcccttattcctaacctgcgcaatgtggtggcactggacaccgaggtggcttcaaaccgcatatactggagcgatttgtcacaacggatgatttgctccacccagctggatcgggcgcatggcgtgagctcctacgacaccgtgatctcacgcgacattcaggcaccggacggactggcggtcgactggatccactccaacatttactggaccgattccgttcttggtaccgtgtcggtcgcagataccaaaggagttaagcgcaagactctgtttagagaaaacggatcgaagccgcgagctattgtggtcgatcctgtgcatggatttatgtactggactgactgggggacccctgcaaagatcaaaaagggtggtctgaacggtgtggacatctactctctggtcactgaaaacattcagtggcctaacgggattacccttgatttgttgtcggggcgcctctactgggttgacagcaagctgcactccatctcatcaatagatgtgaacggaggaaacagaaagaccatcctggaggacgaaaagcggttggcacatcctttttcgctcgcggtgtttgaggacaaagtgttttggaccgacattatcaatgaagcgatattcagtgcaaacaggcttactgggtccgacgtgaaccttctggcagaaaacctcctgtcgcctgaggatatggtgctgttccataacctcacccaaccccggggagtgaattggtgcgaacggactaccctgagcaacgggggatgtcagtacctctgcctgccagcaccccagattaatccgcattcacctaagtttacgtgtgcatgtcctgacgggatgctgctggcaagagatatgcggtcgtgtctgaccgaagcagaagccgcagtggccacccaagaaactagcaccgtgcgtcttaaagtgtcatccaccgccgtgcgaacccagcacactactacccggcctgtgcctgatacgtcgcgtctgcctggagccaccccaggtcttaccacggtggaaattgtcactatgtcgcatcaagccctgggagatgtggcaggtcggggaaacgaaaagaagccctcgtccgtgcgcgcccttagcatcgtgctccctattgtcctccttgtctttctgtgtttgggagtgtttcttctgtggaaaaactggcgactcaagaacattaacagcattaacttcgacaacccagtctaccagaaaactactgaagatgaggtgcatatctgtcataaccaagatggctactcgtatccaagccggcagatggtgtcactcgaagatgatgtggca

SEQ ID NO: 11354 - DNA, 2580 bp, Artificial Sequence
  derived and/or modified sequence
atgggtccgtggggttggaagctgaggtggactgtggccctgctcctcgcagccgcagggacagcagtaggtgatcggtgtgagcggaacgagtttcagtgccaggatggaaagtgtatcagttataagtgggtatgcgatggcagcgcagagtgtcaggacgggtccgacgaaagccaggaaacttgcctctcagtaacttgtaagtctggagacttcagttgcggcggacgggtgaataggtgcatccctcagttctggcgatgcgatggacaagtggattgtgacaacggatccgatgagcagggatgtcctccaaagacatgctctcaggacgagttccgatgtcacgatggaaaatgtatcagtcgacagttcgtctgcgatagcgacagggattgtctcgacggctccgatgaggcatcttgcccagtcctgacctgtggtcccgccagctttcagtgcaatagtagcacctgcataccacagctgtgggcttgtgataacgaccccgattgcgaggacggctccgatgagtggccccagcggtgccgcgggctctacgtgttccaaggggattctagcccctgcagcgcgtttgagttccattgcctgtccggggagtgcatccacagttcatggaggtgcgatggcggtcctgactgcaaggataagagcgatgaggaaaactgcgccgtcgcgacctgtaggcctgatgagttccagtgcagcgacggtaactgtatccacggatccaggcagtgcgacagggagtacgactgtaaagatatgtccgatgaggtagggtgcgtaaacgtcaccttgtgcgagggcccaaacaagttcaaatgccacagtggagaatgcatcaccttggataaagtgtgtaacatggcgcgcgactgtcgcgattggtcagatgagccaattaaagaatgcgggaccaacgcttgtctggataataacggcggctgtagccacgtctgcaatgatctgaagatcggctacgagtgtctctgtcccgacgggttccagctcgtggcccaaagaaggtgtgaagatatagacgagtgtcaggacccagatacctgtagtcaactctgcgtgaacctggagggcggatataaatgtcagtgcgaagaaggctttcagctggatcctcacaccaaagcctgcaaggccgttggtagtattgcctacctttttttcaccaatcggcacgaagtgcggaagatgaccttggacaggagcgaatacacatcactgatccctaaccttcggaatgtagtggcactcgacacggaagtagcgagtaaccgaatttattggtctgacctgagccagcgcatgatttgtagtacccagttggaccgagcccacggggtcagcagctatgacacagtgatatcccgcgacatacaggcccctgacgggcttgcggtagattggatacactccaacatctactggaccgatagcgtattgggcaccgtaagtgtggccgatacgaagggagtgaaacggaaaaccctcttccgggagaacggctccaagccaagagcgattgtggtggatcctgttcatggattcatgtactggaccgactgggggactcctgctaagattaaaaagggaggattgaacggtgtggacatctactctctggttacggagaatattcagtggcccaatggcattacgctggacttgctgtctgggaggctttattgggtggactctaagctgcatagcattagttctatcgacgtgaacggggggaataggaaaaccatactcgaggacgaaaagcgcctggcccatccattcagtctcgctgtgttcgaggacaaggtcttctggactgatattataaatgaagcaatcttttccgccaacagactgacaggtagcgatgtcaacctcctggccgagaatctcttgagccctgaagacatggtgctttttcacaacctgactcagcctcgcggggtgaattggtgcgagcggactacgctttccaatggcggatgtcagtacctctgcctcccagcgccccagatcaacccgcactcccctaagtttacttgcgcctgcccagacggcatgctgctggctcgcgatatgagaagctgtctgaccgaggcggaggcagccgtcgccacccaagaaacgagcaccgtaaggctgaaggtctcatccacagcagttcgcacgcaacataccacaaccagacctgttcctgacacctctcgcctgccaggcgcgacccccggccttaccacagttgaaatcgtcaccatgtcacaccaggctctgggagacgttgccggcagggggaatgaaaagaagccgtctagtgtgagagctctgagcatagtgctgccaatcgtgctcctcgtgttcctgtgcctcggagtctttttgctttggaagaactggcggcttaagaacattaatagcatcaattttgataacccagtctaccaaaaaacaaccgaagatgaggttcacatatgtcataaccaagacggttacagctacccttcacgccagatggtgtcactggaagacgacgtcgct

SEQ ID NO: 11355 - DNA, 2580 bp, Artificial Sequence
  derived and/or modified sequence
atgggaccctggggatggaaacttcgctggaccgtggccctcttgctggctgcggctggaaccgctgtgggtgatcgatgtgaacgtaacgagtttcagtgtcaggacgggaagtgcatctcttacaaatgggtctgcgacggctcggcagagtgccaagatggctccgatgaatcccaagagacttgtctgtcggtcacttgcaaatcaggtgatttctcctgcggagggcgggtgaatcgctgcatcccgcagttctggcggtgcgatggccaagtggactgcgacaacggcagtgatgagcagggctgcccgccaaaaacgtgcagccaagacgaattccggtgtcatgacggaaagtgcatttcgcgccagttcgtctgcgattccgacagagattgcttggacggctcagatgaagccagctgccccgttcttacctgcggtcctgcgagcttccaatgtaatagctcaacttgcatccctcaactgtgggcgtgcgacaatgacccggactgtgaagatgggtcagatgagtggccccagcgctgtcggggcctgtacgtgtttcagggagacagctcgccatgctccgcttttgagttccactgtctcagcggcgagtgtatccactcgtcatggcgctgtgacggaggccctgactgcaaggacaagagcgacgaagaaaattgcgccgtagcaacttgccggcctgatgagtttcaatgttcagacgggaactgcatccatgggtcgcgacaatgtgatcgggaatacgattgcaaggacatgtctgacgaagtgggatgtgtcaacgtgacgttgtgtgaaggacctaacaaattcaaatgccattcaggcgaatgtatcacgctggacaaagtgtgcaacatggcgagggactgccgggactggtccgacgagccgatcaaagaatgcggaactaatgcgtgcctggacaataatggcggttgttcacatgtctgcaacgacctgaagatcggatatgaatgcctgtgcccggacgggttccagctggttgcccagagacgctgtgaggacattgacgagtgtcaagacccagacacctgttcccagctttgcgtgaacctcgagggtggatacaagtgccagtgtgaagagggattccagctggacccccataccaaggcctgcaaggcggtgggatcaatcgcatatcttttcttcactaaccggcacgaggtgcggaagatgacgttggaccgctccgaatacacgagcctgatcccgaacctgcgtaacgtggtcgctctggataccgaagtggcctcgaaccgcatctactggagcgacctgtcccagagaatgatctgctcgactcaactggatagagcccatggggtgagcagctatgataccgtgatctcgcgggacattcaggccccggacggactggcggtcgattggatacacagcaacatctactggactgactccgtcctggggaccgtgagcgtggccgacactaagggagtgaaacgcaagaccctgtttagagagaatggcagcaagccgagagcgatcgtagtcgaccctgtccacggatttatgtactggacggactggggaactccggcaaagatcaaaaagggaggcctcaatggggtggacatttactcgttggttactgaaaacattcagtggccaaacggcatcaccctggatctgctcagcgggcgcctttactgggtggactccaagctgcactccatctctagcatcgatgtgaatggcgggaacagaaagactatcctcgaggacgagaagcggcttgcccatccgttctcactggccgtgttcgaagataaggtgttctggacggacataatcaatgaagctatcttttctgccaaccggctgaccggctccgacgtgaatctgctggccgaaaacctgctctcaccggaagatatggtgttgttccacaacctgacccaaccgagaggggtgaattggtgcgaacgcactaccctcagtaatgggggctgccagtacctgtgtctgccagcccctcagatcaacccccactcgccaaagttcacctgcgcctgcccggatggaatgcttcttgccagagatatgcggtcatgtctcaccgaggcagaagccgcggtcgcaactcaggaaacttcgaccgtcaggcttaaggtgagctcgaccgctgtcagaactcagcacactacgactcggccagtgccagacacctcgcgactgccaggagcaacccccgggctcactaccgtcgaaatcgtgaccatgtcccaccaggccctgggtgatgttgccggaagaggaaatgagaagaaaccttcgtccgttcgggcgctctccatcgtcctgccgattgtcctcctggttttcctctgtctcggagtgttcctcctgtggaagaactggcgcttgaagaacataaactcgatcaatttcgataacccggtgtatcagaaaactaccgaagatgaggtgcacatctgccataaccaggacgggtactcatacccttcaagacaaatggtgtcgcttgaagatgatgtggct

SEQ ID NO: 11356 - DNA, 2580 bp, Artificial Sequence
  derived and/or modified sequence
atggggccttggggctggaagctgagatggactgtcgctctgctgctggctgcggcggggactgccgtcggtgacagatgcgaaagaaacgaattccagtgccaggacggtaaatgtatctcgtacaagtgggtctgcgatgggtcagcggagtgccaggatggcagcgacgagagccaggagacttgtctgtcggtcacttgtaagagtggcgacttctcctgtggaggccgagtcaaccggtgcatcccccaattttggagatgcgacggtcaggtggactgtgacaacggatccgacgaacagggttgtcccccaaagacctgttcccaggacgaattccggtgtcacgacgggaagtgtatttcacggcaattcgtctgcgatagcgatagagattgcctggacggatcggacgaggcttcctgccctgtgctgacctgcggaccagcgtcctttcagtgcaattcctccacttgcatcccccagctgtgggcctgtgacaacgatccagactgcgaagatgggtcggacgagtggccacaaaggtgccggggcctctacgtgtttcagggagattcgtcgccgtgttcggccttcgaattccattgcttgtccggtgaatgcatccattcctcatggaggtgcgacggaggaccggattgtaaagataagtccgacgaggagaattgcgcggtggcgacttgccggcccgatgaattccagtgttcggacgggaattgtattcacggctcccgccagtgcgatcgcgagtacgattgcaaggatatgtcggatgaggtgggatgtgtgaacgtgaccctctgcgaaggcccaaacaagttcaaatgtcactcgggggagtgcattacccttgacaaggtgtgcaacatggcccgcgattgcagggactggtcggatgaaccgatcaaggagtgcggaacgaatgcctgcctggacaataatggaggctgctctcacgtgtgtaacgatctcaagatcggttacgaatgcctttgtccagacggtttccagttggtcgcccaacgacgatgcgaggacatcgatgaatgtcaagacccggacacctgcagccagctgtgcgttaacctcgaaggaggctacaagtgtcagtgcgaggagggctttcagctcgatccgcacaccaaagcctgtaaggcagtgggatcaattgcataccttttcttcactaatcggcatgaagtgcggaagatgaccctcgaccggagcgaatacacctccctgatcccgaacttgcggaacgtggtggccctcgacactgaggtcgcctcaaatcgaatctactggtctgatctgtcccaacgcatgatctgctccacccagctggatagggcgcacggtgtgtcctcttacgacacggtgatctcgcgcgatatccaggcgccagacggactggcagtggattggatccactcgaacatctactggaccgattcagtgctcggcacggtgtccgtggcggatactaaaggagtgaagcgtaagaccctgttccgggaaaatggatcgaagccacgcgccatcgtcgtggacccggtccacggcttcatgtactggaccgactggggaaccccggcgaaaatcaagaagggcggactcaacggagtggacatttactcacttgtgactgagaacatccagtggccgaacggtatcactctcgacttgctttccggacgcctgtactgggtggatagcaaactccattcaatctcgagcatcgatgtcaacggaggaaacagaaagactattctggaggacgaaaagcggctggcccacccgttctcattggccgtctttgaggacaaagtgttctggaccgacatcataaacgaagcgatcttctccgccaatcggctcactgggtccgatgtgaacctccttgcagagaacctgttgtcaccggaagatatggtactcttccacaatctgacccaaccgcggggagtcaattggtgcgagaggaccactctgtccaacggaggctgccagtacctctgcctgccggctccgcagatcaacccacacagcccgaaattcacttgcgcttgccctgacggaatgctcctggcgagagatatgaggagctgccttactgaagcagaggcagccgtcgcgacccaggaaacctcaactgtccgccttaaagtctcctcgaccgcagtgagaactcaacacactaccaccagaccggtcccagacacttcacgcctgccgggagcgactcctggactcactaccgtggagatcgtgaccatgtcgcatcaggcactcggcgacgtcgcaggcagaggcaacgaaaagaaaccctcttcagtgcgggccttgagcatcgtgctgccaatcgtcctgctcgtgtttttgtgcctgggagtgttcctcctgtggaagaactggcgcctcaagaatatcaacagcattaactttgataacccggtgtaccaaaagactaccgaagatgaggtgcacatctgccacaaccaggacggatactcatacccttcccgccagatggtttccctggaagatgatgtcgcc

SEQ ID NO: 11357 - DNA, 2580 bp, Artificial Sequence
  derived and/or modified sequence
atgggcccttggggctggaaactgcggtggacagtggcattgctgctagccgcagctggaactgccgtgggagatagatgcgaacgaaatgaattccagtgccaggatgggaagtgtatctcctataagtgggtgtgtgatggtagcgcggaatgtcaggacggatccgacgagtctcaggagacttgcctgagtgtgacttgcaagagcggagacttctcatgtggaggcagggtgaacagatgcattccccagttttggcggtgtgatgggcaggtagactgcgacaacgggtccgacgagcaaggctgcccacccaagacttgtagtcaggatgagtttcggtgccacgatggcaaatgtataagccggcagttcgtgtgtgactccgacagggattgcctggacggctctgatgaggctagctgccctgtcctaacttgtgggcccgcaagcttccagtgtaattccagcacgtgtatcccccagctgtgggcttgtgataacgaccccgattgcgaggatggaagtgacgaatggccccagcggtgcaggggcctctatgtgtttcaaggagacagttccccctgcagtgctttcgagtttcactgtctctctggggagtgcattcactccagctggcgctgtgatggtggacccgattgcaaagacaaaagtgacgaagagaactgcgcggtcgcgacctgccgcccagacgaattccagtgttcagatggaaattgcattcacggctcgaggcagtgcgacagagaatacgattgcaaggacatgagcgacgaagtcggctgcgtgaacgtcactctgtgcgaaggacccaataagttcaaatgtcatagcggggagtgtatcacccttgacaaggtttgcaacatggctcgggattgccgcgattggagcgacgaacccattaaagagtgtggtactaatgcctgtcttgacaataatggaggttgcagtcacgtgtgcaatgatttgaaaatcggttacgagtgtttatgtcccgacggatttcagctggtggctcagaggagatgcgaggacatcgatgaatgccaggaccctgacacttgcagtcagttgtgcgtgaatctggagggaggttacaagtgccagtgcgaggaaggtttccagctggatccacacacgaaagcttgcaaggcggtagggagtattgcgtacctctttttcactaaccggcacgaggtgagaaaaatgacactcgatcggagtgaatacacgtctctgataccaaatttgaggaacgttgtggccttagacactgaggttgctagcaaccgcatttattggtccgatctttcacagcgcatgatctgcagtacccaacttgaccgggcccatggcgtctcctcttacgacacagtaatctcaagggatatacaggcccccgacggcctcgctgtggactggattcactccaatatctactggacggactccgttctcggcactgtgtctgtcgcggatacgaagggggtaaaacgcaagacgctattcagagagaacggatcgaagccgcgggccatagtggtcgaccctgtgcacgggttcatgtactggactgactggggaacccctgccaaaatcaagaagggtggtcttaatggtgtggacatttatagcttggttacggagaatatccagtggccaaacggcatcactcttgatctgttgtctgggcgcctatattgggtcgattccaagctccattcgatctcctccatagacgtgaatggaggaaatcggaaaactatcctcgaagatgaaaagcgcctggctcaccctttttccttggccgtgtttgaggataaggtattctggaccgatatcattaatgaggctatttttagcgcaaacaggcttactgggtcagatgtgaatttgctggcagagaatcttttgtctccagaggacatggtactcttccacaatctgacccagcctcggggagtgaattggtgcgagcgcacgaccttgtccaacggcggctgccaatacctctgcttacccgctcctcagatcaatccacacagcccaaaattcacctgtgcttgtccggatggtatgctcctcgcacgggacatgcgtagctgtctaactgaagcagaggctgccgtcgccacccaagagacctccacagttaggctgaaagttagcagtaccgccgtcagaacacagcataccacaacacgaccagtgcccgatacttcaagacttccaggggccacccccggactaacaacagttgagatagttacaatgtcacaccaagccctgggtgacgtggccggccgcggtaatgagaaaaagcctagttccgttcgggcactgtccatagtcctcccaattgtgctactggtgttcctgtgtcttggcgtgtttcttctgtggaagaattggaggcttaaaaacattaatagcattaactttgacaacccagtctatcagaaaactacggaagatgaggtgcacatttgccacaaccaggacggatactcttaccctagccgccagatggtctctcttgaagacgacgtggcc

SEQ ID NO: 11358 - DNA, 2580 bp, Artificial Sequence
  derived and/or modified sequence
atgggcccatggggttggaagttacgatggaccgtggcgctgctgctcgcagccgccggcactgcagtaggagataggtgcgaaaggaacgaattccaatgtcaggacggcaagtgcatttcatataaatgggtgtgtgacgggagtgctgagtgccaggacggctccgatgagagccaggagacatgtctgtcagtgacctgcaaatcgggagattttagctgcggtggcagagttaaccgatgtatcccacagttctggcgatgtgacggccaggtggattgtgacaacggttcagatgagcagggatgccctccgaaaacctgttcccaggatgagttcaggtgccacgatgggaagtgcataagtcgccaattcgtgtgtgactccgaccgcgattgcttagacggcagcgatgaggcatcctgccctgtgctgacttgtggacccgccagttttcaatgcaattcttcgacttgtattccacagctgtgggcctgcgacaatgatccagattgtgaggatgggtcggatgagtggccacagcgatgtcgaggactatacgtctttcaaggcgacagctcaccctgttccgctttcgaatttcattgcctctcgggtgaatgtattcatagctcctggcgctgcgacggcgggcccgactgtaaggacaagtcagacgaggaaaattgtgcagtcgcaacttgcaggcccgacgagttccagtgctccgacggcaactgcattcacgggtcacggcagtgtgatcgagagtacgactgcaaggacatgtccgatgaagtcggctgcgtgaatgtgactttgtgcgagggccccaacaaatttaagtgtcacagtggcgaatgcattaccctggacaaagtctgcaacatggcaagggactgtcgagactggtcagatgaaccaataaaagaatgcggaaccaatgcatgcttggataacaatggggggtgcagccacgtgtgtaatgacctcaaaatcggatatgaatgcctctgtccagatggtttccagctggtggcacagaggaggtgcgaagatattgacgagtgccaggacccagacacttgctcccaactgtgcgttaacctggaaggcggatacaaatgtcagtgtgaagagggcttccagctagatccgcacaccaaggcttgcaaggcagtgggctcaatcgcttacctctttttcacaaaccgtcatgaggtccggaagatgacactggacaggagcgaatatacctcattgattcctaatctgagaaacgtcgtggctctcgacacagaagtcgcaagcaatcggatctactggtccgatctttctcagcgaatgatatgtagtacgcagctggatagagcacacggtgtgtcctcctatgatacggtgatatcccgagacatccaagcgcccgatggccttgccgtggattggattcactctaacatctactggacagactccgtcctggggacggtttctgtcgcagacactaagggtgttaaaagaaagaccctcttcagagagaacgggagtaaacccagagcgattgttgtcgatcccgtccatggcttcatgtattggaccgactggggcacgccagccaagattaaaaaaggcggattgaatggtgtagatatttattccctggttaccgagaacattcagtggcccaacggcataactctggacctacttagtgggagactttattgggtcgactctaagctgcacagcattagtagcatagacgtcaacggaggtaacagaaaaacaatcttagaagatgaaaagaggctggcccacccattcagcctcgcggtgttcgaagacaaggtcttttggaccgacatcattaatgaagcgattttttctgccaatagactcacgggctcagacgtgaacctcctggctgagaatcttctatcccctgaggacatggtgctcttccacaacctaactcagccgaggggtgtgaattggtgcgaacgtacaacgctcagcaatggcggatgccagtatctttgtttgcccgcgccacagatcaatccacattcacccaagtttacctgtgcttgtcctgatggaatgctcctagcaagggacatgcggtcttgcctgacagaagccgaagccgctgtggctactcaggaaacctctactgtgagattgaaggtctcatccaccgctgttaggacacaacacacaacaacgcggccggtgccagacacaagcagactccccggagctacgcccgggcttacgactgtagagatcgtgaccatgtctcaccaagctctgggagatgtggcgggcagagggaacgaaaagaagcccagcagtgtaagagcgttgagtattgtcctgcccatcgtgctgttagtttttctctgcctgggagtcttcctgctgtggaaaaattggaggcttaaaaatattaatagtataaacttcgataaccccgtgtaccagaaaactacggaagacgaagtccacatctgtcacaaccaggacggatacagctacccctcaagacagatggtatccctcgaagatgatgtcgcc

SEQ ID NO: 11359 - DNA, 2580 bp, Artificial Sequence
  derived and/or modified sequence
atgggaccatgggggtggaagctgaggtggaccgtcgccctcctgcttgccgcggcggggactgcggtgggtgaccggtgtgagcgcaacgaatttcaatgccaggacggaaagtgtatctcgtacaagtgggtctgcgacggatccgcggaatgccaagacggaagcgacgaatcccaagaaacgtgtttgagcgtgacctgtaagtcgggagacttttcatgcgggggtagagtgaaccgctgtatcccacagttttggaggtgcgacggacaggtcgattgtgacaacggttcggacgaacaaggttgcccacctaagacctgttcgcaggacgaattcagatgccacgacgggaagtgtatctcacggcaattcgtttgcgactcagatagagactgcctcgacggatccgatgaggcctcgtgtcccgtgctcacttgcggaccggcttcattccaatgtaactcgtccacctgcatcccgcaactgtgggcgtgcgataacgacccagactgtgaagatggttctgatgagtggcctcagcgctgcagaggcctttacgtctttcagggcgactccagcccctgctcggcctttgagttccactgtctgtcgggtgagtgcatccattcgtcatggcggtgcgatgggggtccggactgtaaggacaagtcggatgaggagaattgcgccgtggcgacctgccgcccagatgagttccaatgctcggacgggaactgcattcatgggtcgcgccagtgcgaccgcgaatacgattgtaaggatatgtccgacgaagtgggctgtgtcaacgtgaccttgtgtgaaggcccaaacaaattcaagtgccatagcggagagtgcatcactctcgacaaagtgtgcaatatggctcgggactgccgggactggagcgacgaaccgattaaagagtgcggaactaatgcgtgccttgataacaacggaggctgcagccacgtttgcaacgacctgaaaattgggtacgagtgtctgtgtccggatggattccagctggtcgctcaacggcggtgcgaggacattgacgagtgtcaggatcccgacacctgctcgcagctgtgcgtgaacttggaaggaggatacaaatgtcaatgtgaagaaggtttccagctggacccccatactaaggcatgcaaagcagtcgggagtatcgcgtacttgtttttcaccaacagacatgaggtccggaaaatgaccctggaccggtcggagtacacctccctcatccctaacctgaggaacgttgtggcccttgatactgaggtcgcatccaatcgtatctactggagcgaccttagccaacggatgatttgctctacccagctggacagagcgcacggcgtgtcatcgtacgataccgtgatctccagagatatccaggccccggacggattggccgtggactggattcatagcaatatctactggaccgactcggtcctggggaccgtgtctgtggcggatactaagggagtgaagcgcaagactctcttcagagaaaacggatcgaaaccgcgcgctatcgtcgtggaccctgtgcacggcttcatgtactggactgattgggggactccggcgaagatcaagaaaggggggctcaacggagtcgatatctactccctggtgaccgagaacattcaatggccgaacggtatcactctggatctgcttagcggccgcctctactgggtcgactcgaagctccatagcatctcctccatcgatgtgaacgggggaaatagaaagactatcctggaggacgaaaagcggctcgcccatccgttctcgctggccgttttcgaagataaagtgttctggactgacatcatcaacgaagccatcttcagcgcaaaccgccttactggttcggacgtgaacctgctggcggaaaacctgctctcgcctgaagatatggtcctctttcataatctgacgcaaccaaggggagtgaactggtgcgagagaaccactctgtctaacggcggatgccagtacctgtgcctgccagctccgcaaatcaacccgcattccccgaagttcacttgcgcttgcccggacggaatgctgctggcccgggacatgcgctcgtgcctgactgaggccgaggcggctgtggccacgcaggaaacctccaccgtgcgcctgaaggtgtcgtcgaccgcagtgagaacccagcacaccaccacgcgccccgttcccgacaccagccggctgccgggtgcaaccccgggtctgactactgtggagatcgtcactatgtcccatcaggctctgggagacgtggccggaaggggaaacgagaagaaaccttcgtccgtgagggcactgtcaattgtgctccctatcgtgctcctggtgttcctctgcctgggagtgtttttgctttggaagaattggcgccttaagaatatcaattccatcaattttgataaccccgtgtatcaaaaaactactgaggacgaggtgcacatctgccacaaccaagatggctactcctacccatcccgccagatggtgtcgcttgaagatgatgttgcc

SEQ ID NO: 11360 - DNA, 2580 bp, Artificial Sequence
  derived and/or modified sequence
atgggtccatggggctggaagctccggtggaccgtggccctgctcctggcagccgccgggaccgccgtcggagatagatgcgaaaggaacgagttccagtgtcaagatggcaagtgtattagttacaagtgggtgtgcgacggatccgcagagtgtcaagacggctcagacgaaagccaggagacttgccttagcgtgacctgcaagtctggagactttagctgcggaggaagagtcaaccgctgcatcccacagttctggcggtgcgatggccaagttgactgtgataacggaagtgacgagcagggatgccccccaaagacttgctctcaggacgaattcaggtgtcatgacggaaagtgcatctcaagacagttcgtctgcgatagtgaccgcgattgtctggatggcagtgacgaggcaagctgcccagtgcttacatgcggcccagcttctttccagtgcaattccagcacctgcattcctcagctctgggcttgtgacaacgatcccgactgcgaagatggaagtgatgagtggccccagcggtgtaggggcctgtacgttttccagggcgactcgagcccatgtagcgcctttgagtttcactgtctgtccggtgagtgcattcactcttcctggcgatgcgacggcggccccgattgcaaagataagtctgatgaggagaattgcgctgtggctacatgtcgccctgatgagtttcagtgctctgacgggaattgtatccacggaagtagacagtgtgaccgggaatacgactgtaaggacatgagcgacgaagtcgggtgtgtgaatgtgacgctgtgcgaaggtcctaataagttcaagtgtcacagcggagagtgcatcacactcgataaggtctgcaacatggcacgtgattgcagagattggtccgacgagccgatcaaagagtgcggtactaacgaatgcctggataataacggaggatgtagtcacgtgtgcaatgatctgaagattggcgccgagtgcctgtgtccggacgggttccagctcgtggcgcagaggaggtgtgaggacattgacgaatgccaggaccctgatacctgttcacaactatgcgtgaacttggaaggcggttataaatgtcaatgtgaggaggggtttcagctggatcctcacaccaaggcctgcaaagccgtcggatctatcgcatatctctttttcaccaaccgccatgaagtaaggaagatgacactcgataggagtgaatatacaagtctgatcccgaatctgagaaacgtagtcgccctggacaccgaagtggcatccaatcggatatactggtctgatctgtctcagcgcatgatctgcagcactcagttggacagggctcacggcgtatctagctacgacacagtaatctcacgcgatattcaagcgcccgatggcttggcagttgactggatccacagtaacatctactggaccgattccgtgttgggaacagtgtcagtggccgacaccaaaggagtgaaaaggaagacattattccgcgagaatggcagcaagccaagagcgattgtggtggacccggtgcatggattcatgtactggaccgactggggaactcctgcaaaaattaagaagggtggcctgaatggcgtggatatctacagtctggtgacggagaacatccagtggcccaatggtattacgctggatctgctaagtggaaggctgtactgggttgatagcaagctgcactctatctccagcatcgacgtcaacggaggaaatcggaaaacaattttggaggatgagaagcgcttggcccatcccttcagcctggcagtgttcgaagataaggtgttctggacggatatcattaacgaagcgatcttcagcgccaacagactcactggcagcgatgtgaatttgctcgccgagaatctcttgtccccagaagatatggtcctgttccataacctgacacagccacgcggggtaaactggtgtgagagaaccacactctccaacggcggttgccagtatctgtgcttgcctgcccctcaaattaacccacacagtccaaagtttacctgtgcctgcccagatgggatgctgcttgcccgggatatgagaagctgcctgaccgaggcagaagccgcagtagcgacccaggagacaagtaccgtgagactgaaagtgtcatcaacagccgtccgcacacagcataccaccactagacctgtccccgatacaagtaggctgcctggagccacccccgggctgaccacagtcgagatcgtgactatgtctcaccaggcactgggagacgttgctggacgcggtaatgagaagaagccctcttctgtgagggctcttagcatagtcttgccgatcgttctgttggtgtttctctgtctgggtgtgttcctcttatggaaaaactggaggctgaagaatataaacagcattaatttcgacaacccagtctatcagaagacaactgaggacgaagtgcacatttgccataaccaagacgggtacagttacccaagcaggcaaatggtatctctcgaagacgacgttgcc

SEQ ID NO: 11361 - DNA, 2580 bp, Artificial Sequence
  derived and/or modified sequence
atgggcccatgggggtggaagctcaggtggaccgtggcactgctgctggctgcagccggcacggctgtgggcgatagatgtgaacggaatgaatttcagtgccaggatgggaagtgtatcagctacaagtgggtgtgcgacggatcagcggaatgccaagacggcagcgacgaatcgcaggagacttgcttgtccgtcacctgcaagtccggtgacttttcgtgcggaggtcgagtcaatcggtgtatcccacaattctggcgctgcgatggtcaggttgattgcgacaacggatccgatgaacaaggatgcccgccaaaaacttgctcacaggatgaatttcggtgtcatgacgggaaatgcatctcacggcagttcgtgtgtgacagcgatcgggattgtctcgatggctctgacgaggcatcgtgtccggtcctcacctgcgggcccgcgtcattccagtgcaactcctccacctgtattcctcagctttgggcctgcgataacgatcccgattgtgaggacggttctgacgaatggccacaacggtgcaggggcctgtacgtgttccagggagactcctcaccgtgttccgcattcgaattccattgcctgtcaggcgagtgcatccactcctcctggagatgtgacggaggccctgactgcaaagacaaatccgacgaggagaattgcgctgttgcgacttgtaggccagatgaattccagtgctcggatggcaactgcatccacggttcgaggcagtgcgaccgcgagtacgattgcaaggacatgtcggatgaggtgggatgcgtgaatgtgaccctctgcgaaggcccgaataagttcaagtgccattccggagaatgcataacgctggacaaagtgtgcaacatggcgcgggattgccgggactggtccgacgaaccaatcaaggagtgcggaaccaatgagtgcctggataacaacggggggtgttcacacgtgtgcaacgacttgaaaatcggagcagaatgcttgtgtccagacgggttccaactggtcgcgcaacgccggtgtgaagatatcgatgaatgccaggatccggatacctgttcccagctgtgcgtgaacctcgaggggggctacaagtgtcaatgcgaggaaggattccaactcgacccacataccaaggcgtgtaaggcggtgggctccatcgcctacctgttctttactaatagacacgaggtgcggaagatgaccctggaccgatcagagtacacctcactgatccctaatctgcggaacgtggtcgcactggataccgaggtcgcttccaaccgcatatactggagcgacctctctcagcgcatgatctgctcgactcagctggaccgggcgcacggagtctccagctacgacactgtgatttccagagacattcaggcaccggacggtcttgccgtggattggatccacagcaatatctactggacggactcggttctgggcactgtgtcagtggcggacaccaaaggagtgaagcggaaaaccttgtttagagaaaatggatctaagcctcgggcgatcgtggtggatccagtccatggattcatgtactggactgactggggaactccagcgaagatcaaaaagggcggcctgaatggagtggacatttactcgctggttactgagaacattcagtggccgaacggtatcactttggatctgctgtcggggagactgtattgggtggactccaagctccatagcatctcgtcgattgacgtgaatggaggcaatagaaagactatcctggaggatgaaaagcgcctggcccacccgttctccctggcagtctttgaagataaggttttctggaccgacatcatcaacgaagcgatcttctcggccaatcggctgactggaagcgacgtgaacctccttgcagaaaacttgctgagccctgaggatatggtgctgttccacaatctgacccagccgcgtggtgtcaactggtgcgaaagaaccaccctgtcgaatggaggctgccaatacctctgcttgcctgccccccaaatcaatcctcacagtcccaagttcacttgcgcctgtcctgacggcatgctgctcgctcgagacatgcgctcgtgcctgaccgaagcagaagccgccgtggccacccaggaaacctcgactgtccggctcaaagtctcgtccaccgcagtgagaacccagcacactactacgcggccggttcctgacactagccggctcccgggggcgactcctgggctcaccactgtggaaatcgtgacgatgtcgcatcaagccctgggagacgtggctggtcgcggtaatgagaaaaagccgtcctcggtgcgcgcgctgtcaatcgtgttgccgatcgtcttgttggtgttcctttgtctgggggtctttcttctgtggaaaaactggcggctgaagaatatcaattcgatcaactttgacaatccagtctaccaaaagactaccgaggacgaggtgcatatctgccataatcaggacggctactcctacccgtcccgacagatggtgtcgctcgaagatgatgtggca

SEQ ID NO: 11362 - DNA, 2580 bp, Artificial Sequence
  derived and/or modified sequence
atggggccctggggctggaagctgagatggaccgtggcgctgctgttggctgcagcaggcactgccgtgggtgatcgctgcgaacggaacgagtttcagtgccaagacgggaaatgtatctcctataaatgggtgtgtgacggttccgccgagtgccaggatggttcggacgagtcgcaggagacatgcctgagcgtcacctgcaaaagtggtgatttctcctgtggaggtcgggttaaccgttgtatcccacagttctggcgatgcgacgggcaggtcgactgcgacaatggttcagacgaacaaggatgcccacccaagacttgttctcaagatgaatttcggtgtcatgacggcaagtgtatttcccgacaattcgtgtgcgattctgacagggactgtttagacggctccgatgaggcttcctgccctgtactgacgtgcgggcccgcgagctttcaatgtaactccagcacttgtattccccagctctgggcatgcgacaatgaccccgattgtgaggacggcagcgacgaatggccccagagatgcagaggactgtatgtcttccagggagattcgagtccgtgttctgcctttgagtttcattgcctttctggcgaatgtatccattcatcgtggaggtgtgacggcgggcccgactgtaaagataaatccgacgaggaaaattgcgccgtggccacatgtcgcccggatgagtttcaatgtagcgacggtaattgtatacacgggagccggcagtgcgatcgggagtacgactgcaaagacatgagcgacgaggtgggatgcgtgaatgtgactctctgtgagggcccaaataagtttaagtgccacagtggagaatgtattactctggataaggtgtgtaacatggctagagactgcagggattggagcgacgagccaatcaaggaatgtggcaccaatgaatgtctggacaacaacggtggctgcagccatgtatgcaacgacctcaaaattggggccgagtgcctgtgccctgacgggtttcagctcgtggcccagagacgttgtgaggatatcgacgaatgtcaggacccagacacctgttctcaactttgcgtgaatctcgagggcggatataagtgccagtgcgaagagggatttcagctcgacccacacactaaggcctgtaaggctgtgggaagcatcgcatatttgtttttcactaataggcatgaggtacgcaagatgaccctcgataggtctgaatatacaagcttgatccccaacttaagaaacgtagtggccctggacaccgaggttgcaagtaaccggatatactggtctgacttaagccagcggatgatatgtagcactcagctggatagagcgcatggggtgagctcctatgataccgtcatcagccgtgacatacaggctccggacgggctggccgtggactggattcattctaacatttactggaccgattcggtcctgggtactgtgtccgtagccgacaccaagggcgtgaaaaggaaaacgcttttcagagaaaatggttccaagcctagggccatcgtagtcgaccctgtgcatgggttcatgtactggaccgactgggggacgccggctaaaattaaaaaaggcgggctgaatggtgtagacatctacagtctggtgaccgaaaacatccagtggccgaatggaattaccctggatctgctgagcgggaggctgtactgggtggactccaagttgcactccatctccagtatagacgtcaatggcgggaatcgaaagactatcctggaggacgagaagaggctggcccatccttttagcctggcagtgtttgaagacaaagtcttttggactgatattatcaatgaagcaatattttctgccaaccgtctcacgggtagcgacgttaatctcctcgctgagaacttgctgagccccgaagatatggtgctgttccacaacctgactcagccccgcggggtcaactggtgcgaaaggacgacactgtcaaatgggggatgccagtatctgtgcctgccggcacctcaaataaatccccatagtcctaaattcacctgcgcctgcccggatggcatgctactggcaagagacatgcgctcatgtctgacagaagctgaagctgccgtcgccacccaggagacctctactgtgagactaaaggtgagttcaactgcggtccggacccagcacactactacacggcccgtgccagacacaagcagacttcccggagcgactccggggctaacaaccgtggagatcgtgaccatgagccaccaagccctgggcgacgtggcaggccgcgggaacgagaaaaagccaagttccgttagggctctgtctatcgtgcttcctattgttttgttggtcttcttatgcctgggcgttttcctcctctggaagaactggagactgaaaaacataaattcaatcaatttcgacaatcctgtatatcaaaaaactactgaggatgaagtgcatatctgccacaatcaggatggatattcgtaccctagtcggcaaatggtgtctctcgaagacgatgtcgcc

SEQ ID NO: 11363 - DNA, 2580 bp, Artificial Sequence
  derived and/or modified sequence
atggggccgtggggttggaaacttagatggactgttgcccttctcctggcggcagcaggcaccgccgtcggagatcggtgtgaacgcaacgagttccagtgccaggacgggaagtgcatctcgtacaagtgggtctgcgacggttccgcggaatgtcaagatgggagcgacgagtcccaagaaacctgtctttcagtcacgtgcaagtccggtgatttttcctgcggcgggagggtcaatcggtgtattcctcaattttggcgctgtgatggacaagtcgattgtgacaatggatcggatgaacagggctgtccacctaagacttgttcccaagatgagtttaggtgccatgatggaaagtgtattagcagacaattcgtctgtgattcggacagagattgtctggacgggtcagatgaagcctcgtgtcccgtcctcacttgtgggccagcgtcgtttcagtgcaatagctccacctgcattccgcaactctgggcatgtgataatgatcccgattgcgaagatggttccgacgagtggccgcaacggtgtcgcggactgtacgtgtttcaaggagatagcagcccatgctcagcctttgaattccattgtctgtcaggagagtgtatacattccagctggcgatgtgatggggggccagactgtaaggataagagcgatgaagaaaactgcgcagtggcaacttgtcggccggatgaatttcaatgttctgatggtaactgtatccacggctcgcggcaatgcgatcgcgaatatgattgtaaggacatgtccgatgaggtgggatgtgtcaatgtgacgctttgcgagggtcctaacaagtttaagtgtcattcgggcgaatgtattaccttggacaaggtctgcaatatggctcgcgattgtagagattggtcggacgaaccaattaaggaatgcggcaccaatgagtgtctcgataacaatggtggttgttcccatgtctgcaatgatttgaaaataggggcagagtgtctctgccccgacggattccagctcgtggcccaacgacggtgtgaagatatagacgagtgccaggaccccgatacttgctcccaactgtgcgtgaaccttgaagggggatacaagtgccagtgtgaggaaggctttcaactggatccccacaccaaagcatgcaaggccgtgggctccatcgcttacctgttcttcactaatagacacgaagtcagaaaaatgaccctggatcggtccgaatacacctcccttattcccaatctgcgaaatgtggtggcgctcgataccgaggtcgcatccaaccgtatatactggtccgatctttcacagagaatgatctgctccactcaacttgacagagcgcatggagtgtcctcatacgataccgtcatttcacgcgatattcaggcacctgacggactggctgtggattggatccactcgaacatatactggacggacagcgtgcttggaacggtgtcggtcgcagacaccaaaggagtgaagcggaaaacgctgttccgggaaaacggtagcaagccaagagccatcgtcgtggacccagtgcacgggttcatgtattggactgattggggcaccccagcaaagattaagaagggaggcctgaatggggtggatatctactccctcgtgactgaaaacatccaatggcctaatggaattaccctggaccttttgtccggccggctttactgggtggatagcaaactccactcgattagctcaattgatgttaatgggggtaaccgtaagacgattctggaagatgagaagcgactggcccatccgttttcactcgctgtgtttgaagataaggtgttttggactgacatcatcaacgaagcaatattcagcgccaaccgactgaccggaagcgatgtgaatctcctggccgagaacctgttgtcgccagaagatatggtgctgttccataacctgactcaacctaggggagtgaactggtgtgagcgcaccactcttagcaacggaggctgccagtatctgtgcctgcctgcaccacagatcaaccctcatagcccaaaattcacttgtgcctgcccggatggaatgcttttggcacgcgacatgaggtcttgcctgaccgaagcagaagcagcggtggcaactcaggagacttccaccgttcgactgaaagtgtcgtcaaccgcagtgaggacccagcatactactaccagacccgtgcctgatacctcgcgacttccgggagccaccccagggctcacgacggtcgagattgtgaccatgagccatcaagcgctcggtgatgtcgcaggcaggggaaacgagaagaagccaagctccgtgcgcgcactcagcattgtcctgcctatagtgctgcttgtgtttctgtgtttgggagtgtttctgctgtggaaaaactggagactgaaaaacatcaattcaatcaacttcgacaaccccgtgtaccaaaagactaccgaggatgaagttcacatttgccataaccaagatggatactcgtacccctccagacagatggtgtcccttgaagatgatgtcgca

SEQ ID NO: 11364 - DNA, 2580 bp, Artificial Sequence
  derived and/or modified sequence
atgggcccttggggatggaagctccggtggaccgttgcactgctgcttgctgcggccggaaccgcggtgggagaccggtgtgaacgcaatgagtttcagtgccaggatggcaagtgtatttcttacaaatgggtgtgcgacgggtctgctgaatgccaggatggctccgacgagagccaggagacctgcttgagcgtgacatgtaagagtggtgatttttcctgtggagggagggtaaaccggtgtattcctcagttttggcggtgcgacggtcaagtggattgcgacaacggtagcgacgagcagggttgcccgcctaagacctgttctcaggacgagtttaggtgccacgacggcaaatgcattagtcggcagtttgtatgcgactccgaccgcgattgcctggatggctctgacgaggcttcctgccccgttctcacctgcggaccggccagctttcagtgcaatagtagcacctgtatcccacagctgtgggcctgcgataacgaccctgattgtgaagacgggtccgacgagtggcctcagcgttgtcgcggtttgtatgtgtttcagggcgacagtagcccttgttcggcctttgagtttcactgtttaagtggagagtgtatccacagtagctggcggtgcgatggcggtcctgactgtaaggacaagtctgatgaggagaattgcgccgtcgccacctgtcggcccgacgaattccagtgttcagacggaaactgcatccatgggagccgacagtgcgatagagagtacgattgtaaagacatgtcggacgaagttggttgtgtaaacgtgacattatgcgaaggacccaacaagtttaagtgtcatagcggggagtgtatcaccctggacaaagtgtgcaacatggctcgcgattgtcgtgactggagcgacgagccaatcaaggagtgtggaacaaacgagtgtctagataacaacggcggttgctcacatgtgtgcaatgatctcaaaatcggagcggagtgtctgtgccccgatggcttccaattggtggcacaaaggcggtgcgaggatattgacgagtgtcaggaccccgacacctgcagtcaactgtgcgtgaatctggaaggcggctacaagtgccagtgcgaagaggggtttcaattagaccctcacactaaggcctgcaaggccgtgggttcaattgcttacctattttttacaaatagacatgaggtgagaaaaatgacgctcgatcgctcggagtatacctctctgattcccaatttgcggaacgtggtcgccttggacaccgaggtcgccagtaatagaatctattggtccgacctcagccagcgcatgatctgcagcacacagttggaccgagcgcacggcgtgtcttcttatgatacagtgatctctcgcgatatccaggccccggatggactcgccgtggactggatccacagcaacatctactggacagactccgtgctgggaacagtttccgtagccgatactaaaggagtcaagagaaagacactgttccgcgagaatggcagcaagccccgcgccatagtggtagacccggtgcatggattcatgtactggaccgactgggggacgccggctaaaatcaaaaaagggggactcaatggtgtggatatctatagccttgtcacagagaacatccagtggccaaatggaattaccttagacctgctttccggaaggctttattgggtggactccaagctgcactcaataagcagtattgacgtcaacggaggtaacaggaagactattctggaggatgagaagaggctcgcgcaccccttctctcttgccgttttcgaggacaaggtgttttggactgacatcattaatgaggcaatattctccgctaacagactgaccgggtccgatgtgaaccttctcgctgagaacctcttaagtcctgaagacatggttttatttcacaacctcacacagcctcgcggggtgaactggtgtgaaagaaccacgttaagcaatggaggttgccagtatttgtgtttgccagccccacaaatcaatccacattcacccaaatttacttgcgcatgtccagacggaatgctccttgcgagggacatgcgctcctgcttaacggaagctgaggccgccgtcgccacccaagagacatccaccgtcaggctgaaggtgagcagtacggcagtgaggacccagcataccaccacccgtcctgtgcccgatactagtcggctccccggggccaccccaggactgaccacggtggaaatagttactatgagccaccaggccctcggagatgtggctggacggggaaatgaaaagaagccctctagcgtccgcgcactctcaattgtgctgcccatcgtgctcttggtgtttctgtgcctcggcgttttcctgctttggaaaaattggaggctgaagaatatcaattccatcaatttcgacaatcccgtgtaccagaaaaccactgaagatgaagttcatatttgtcacaaccaagatggctactcctacccttccaggcaaatggtctctttggaggacgatgttgct

SEQ ID NO: 11365 - DNA, 2580 bp, Artificial Sequence
  derived and/or modified sequence
atgggcccttggggatggaagctgagatggaccgtcgcccttctgcttgccgccgctggaactgccgttggagaccgctgcgagcgcaacgaatttcagtgccaggacggcaaatgcattagctacaagtgggtttgcgacggtagtgctgagtgccaggacggctctgatgagtcccaggagacttgcctctctgtgacttgcaagtccggtgactttagttgcggcggtagagtaaacagatgtatcccacagttttggcgctgcgacggccaagtggactgcgataacggtagcgacgaacagggctgcccccctaagacatgctcccaggatgagttccgttgccacgacggaaaatgcatttccagacaattcgtctgtgatagcgaccgcgactgcttggacggttctgatgaagcatcttgtcctgtgttgacatgcggacctgcttccttccaatgtaactcttctacctgtattccacaactgtgggcatgtgataacgatcctgactgcgaggatggctcagacgaatggccccaaaggtgcaggggtctctatgtgtttcagggagattcttccccatgctctgctttcgaatttcattgtctctccggcgagtgcattcatagctcctggcgttgcgatggcggtcccgattgtaaggacaagtccgacgaggagaactgcgctgtggctacttgccgtccagatgagttccagtgcagcgatggaaactgcatccacggatcccgtcagtgtgacagagaatacgactgtaaagatatgtcagatgaagtcggatgcgtgaatgtgaccctgtgtgagggacctaacaagtttaaatgccacagtggagaatgcatcacactcgacaaggtttgcaacatggcccgtgattgcagagactggtccgacgaacctattaaggagtgcggaaccaatgagtgcctcgacaacaacggcggatgctcacatgtctgtaatgatttgaagatcggtgccgaatgcctgtgtcctgacggctttcaactggtggcacagcgtaggtgcgaggacatcgacgagtgtcaagatccagacacttgctcccagctttgtgtgaatctcgagggaggatataagtgtcagtgtgaggaaggatttcagctcgaccctcatacaaaggcctgcaaggccgtgggatccatcgcctatctcttcttcaccaaccgccacgaagtcaggaagatgacacttgacagatcagagtacacatctctcatccccaacctcagaaacgtggttgcactcgacaccgaggtggccagcaataggatttactggtccgatctgtctcaacgtatgatatgttctactcagctggacagggcacacggcgtgtcctcttacgatacagtgatcagcagggatatccaagctcccgacggccttgcagtcgactggatccacagtaacatctactggactgactctgtgctcggcactgtctctgtcgcagatactaagggagttaagagaaaaaccctctttagggagaatggttctaagccaagagccattgtggtggatcccgtgcacggtttcatgtactggactgactggggaaccccagctaaaattaagaaaggaggcctgaatggtgtggacatctattcactggtaactgagaatatccagtggcctaatggaattacactcgacctcttgagtggcagactgtactgggtcgacagtaaattgcactctatatccagtatcgacgtcaacggcggaaacagaaagaccattttggaggacgaaaagcgcctcgcacaccccttttccctcgccgttttcgaagacaaagtcttttggaccgatatcataaacgaggctattttcagcgctaacaggcttaccggttccgatgtcaatctgctggctgaaaatttgctgagtcctgaggatatggtgctcttccataacttgacccagccacgtggtgttaactggtgcgagcgtaccaccctgtcaaacggtggctgtcagtacctttgcctgcccgcaccacaaattaatcctcacagtcccaaattcacatgtgcatgtcctgacggcatgctgctggcaagggacatgagaagttgtctgaccgaggctgaggctgcagttgccacacaggaaaccagcactgtccgcctcaaagtaagttcaaccgccgtgcgtacccagcacactactaccagaccagtgcccgatacttctcgcctccccggtgctacacccggcctcaccactgtggagattgtcacaatgtcccatcaggccttgggagacgtagctggtaggggaaatgagaagaagcccagctctgtcagagcactcagcatcgttcttcccatcgtcttgctggtctttctgtgcctgggagtctttctgctttggaagaactggcgtcttaaaaacattaactctatcaactttgacaacccagtttaccagaagacaacagaagacgaggtgcatatctgccataaccaggacggctactcctacccatccaggcaaatggtgagcctggaagatgacgtcgct

SEQ ID NO: 11366 - DNA, 2580 bp, Artificial Sequence
  derived and/or modified sequence
atgggcccgtgggggtggaagctccggtggactgtggccctgctccttgccgccgcaggaaccgcggtgggggaccggtgtgagcgcaacgaatttcaatgtcaggacggaaagtgcatcagctacaagtgggtgtgcgatggctcggcggaatgccaagacggctctgatgaaagccaggagacttgccttagcgtgacctgcaagtcaggagatttctcgtgtggagggcgcgtgaacagatgtatcccgcagttctggagatgcgatggtcaggtggactgcgataacggatccgacgaacaaggatgccctcctaagacctgctcacaggatgaattccgctgtcatgacgggaagtgcatctcaagacagttcgtctgtgactccgatcgcgattgccttgacggttcggatgaagcgtcctgccccgtgctcacgtgcggaccggcgagctttcagtgcaattcgtccacctgcattccgcaactgtgggcatgtgataatgatccagattgcgaggacggctcggacgagtggcctcagcggtgccggggcctgtacgtgttccagggcgattcctctccgtgctccgccttcgaattccattgcctgtctggggaatgtatccattcgtcatggcgctgtgacggtggaccagactgtaaggataaatcggacgaggaaaactgtgcggtggcgacttgccggccggatgagttccagtgcagcgacggcaactgcatccacggctccaggcaatgtgaccgggagtacgactgcaaggatatgtcggacgaagtggggtgcgtgaatgtcaccctgtgcgaaggccctaacaagtttaaatgccactcaggagagtgcatcactctggacaaggtttgcaatatggctcgagattgcagagattggtcagacgaaccgatcaaagagtgcggaaccaacgaatgcctcgataataacggcggttgttcacatgtgtgtaacgacctgaagataggcgcagagtgcttgtgccctgatggatttcaactcgtcgctcagcgcaggtgcgaggacatcgatgagtgccaggaccctgacacttgtagtcagttgtgcgtgaacttggagggaggatacaagtgccagtgcgaagaaggatttcagctggacccacacaccaaagcatgcaaagcggtgggatccatcgcttacctgttcttcacgaaccgccatgaggtgcgcaagatgacccttgatcgctccgagtatacgtcactcattccgaacctgcggaatgtggtggcactggataccgaagtcgccagcaataggatctattggagcgacctgagccagcgtatgatttgctccactcaattggacagggcccacggagtatccagctacgacactgtgatcagccgcgacatccaggcccctgacgggctggcagtggactggatccacagcaatatctactggacggattcggtgctcgggactgtctcggtggcggacaccaagggagttaaacggaaaaccctcttccgggaaaatggctcaaagccacgggccattgtcgtggacccggtccacggattcatgtactggaccgattggggaaccccagccaagatcaagaaaggaggactgaatggcgtggacatctacagcctggttaccgaaaacatccaatggccgaacggaatcactctcgacctcctctcgggacgactgtactgggtcgactcaaagttgcattctatctcaagcattgacgtgaacggaggaaacagaaagactatccttgaggatgaaaagaggctcgcccatccgttcagcctggccgtgttcgaggacaaagtcttttggaccgacatcatcaacgaagccatcttctccgctaatcgcctcacgggttcggacgtcaacctgctggccgagaacctgctgtcgccagaggacatggtgctgttccacaacctgactcaaccgcggggagtcaactggtgtgagaggactaccctgtcgaatggtggatgtcagtacctgtgcctgccagctccgcaaatcaacccccattccccaaaatttacttgcgcatgccccgatggaatgctgctggcgcgcgacatgcgctcctgcctcactgaagcagaggccgccgtcgcgacccaagaaacctccactgtcagactgaaggtgtcatcgactgctgtccggacccaacacaccaccacccggccggttccggataccagtagattgcccggcgcaaccccggggctgactactgtggaaattgtgactatgtcgcaccaggccttgggcgacgtggcgggtcgcggtaacgaaaagaagccatcgtcggtcagagccctttccatcgtgctcccgatcgtcctgctcgtgttcctttgtctgggagtgttcctgctctggaaaaactggagactgaagaatatcaacagcattaatttcgataaccccgtgtaccaaaagacgactgaagatgaagtgcacatctgccacaatcaggacggctactcctacccatcgcgccagatggtgtccctcgaggacgacgtcgct

SEQ ID NO: 11367 - DNA, 2580 bp, Artificial Sequence
  derived and/or modified sequence
atgggcccttgggggtggaaactccgctggacagtcgcactgctcttggcagccgctggtactgctgtgggcgatagatgcgagcggaacgaatttcaatgtcaggatggcaagtgtatttcttacaagtgggtgtgtgacggaagcgctgaatgtcaggatggctccgacgaatcgcaggagacgtgcttgtcggtgacttgcaaaagtggggatttttcctgtggaggtcgtgtcaatcgctgcattccacagttctggcgatgcgacgggcaggttgattgcgataacgggtcggacgaacagggatgcccgcctaaaacatgctctcaggacgagttccggtgccacgacggtaagtgtatcagccgccagtttgtctgcgattcggatagagactgcctcgacgggtcagacgaggcctcctgtcctgtgctgacctgtggaccagccagtttccaatgtaattcctcaacttgcattccccaactgtgggcttgcgataacgatcctgactgcgaggacggctctgatgagtggccccagcgctgccgtggcctctacgtctttcagggggattccagtccatgcagtgcctttgaattccactgtttgagcggggagtgcatccatagttcctggagatgtgacggcgggccagactgtaaggacaagtctgatgaggagaattgtgctgttgccacgtgccgccctgacgaattccagtgttctgacggtaattgcatccacggcagtagacaatgcgatcgggaatatgattgcaaggatatgagtgatgaggtcgggtgtgtgaacgtcacgctgtgcgagggtccaaataaatttaaatgtcattccggcgagtgtattactctggacaaagtgtgcaatatggccagggactgcagggattggtccgacgagccaataaaagaatgcggcactaatgaatgcctggataataacggcggctgttctcatgtgtgtaatgacctgaagatcggcgccgagtgcctgtgtccagacggattccagcttgtggctcaaagacggtgtgaagatatcgatgagtgtcaggacccagatacatgctcacaactttgtgtgaatttggagggcggttataaatgtcaatgcgaagaaggcttccagctcgatccccacaccaaagcctgcaaggccgtgggctccatcgcctacttgttcttcaccaatagacacgaggtgagaaaaatgactctcgatagatctgagtataccagcctcattccgaatctgcggaacgtcgtcgcgttggacacagaggtagccagtaatagaatatattggtcagacttgagtcagaggatgatttgcagtacccagcttgatagagcgcatggagtgagctcctatgacaccgtaatctcacgggacatccaggcgcccgacggtttagccgtggattggatacactctaatatctattggactgatagcgtgttggggacagtgagtgtcgccgatacaaagggggttaagcgaaaaaccctatttcgcgagaacgggagtaagcctagggccatagtagtagatcctgttcacggttttatgtactggaccgactggggaacccctgccaagatcaagaagggagggcttaacggtgtcgacatttactcacttgtcacagaaaacatccaatggccaaatggcatcacgctggacctgctaagcggcaggctgtactgggtggattccaaactccactccatttccagcatagacgtgaatggagggaacagaaaaaccatcctggaagatgagaaacgccttgcacacccgttctcattagcagtctttgaagacaaggttttttggactgacattattaatgaagccatcttttccgccaaccgacttaccggaagcgatgttaacctgcttgcggagaatcttctgagccccgaagacatggtactcttccacaacctgactcagccccgaggggtcaattggtgtgaaaggaccacccttagtaatggaggctgtcagtatctctgcctgccagccccccaaatcaatccacattccccaaagttcacctgcgcatgtcccgatgggatgctcttggctcgggatatgcggagttgcctgaccgaggccgaagcagctgtggctacccaggagacgtcgaccgttaggctgaaggtgtctagtacagccgtgaggacacaacacacaacaacaagaccagtgccagatacatctagattacctggggctacaccaggcttaaccacggtcgaaatcgtgaccatgtcacaccaggctctcggcgacgttgcaggacgcggcaacgaaaaaaagccaagttccgtcagggccctgagcatagtgctgcccattgtgctgcttgtgtttctgtgcctgggcgttttcctgctgtggaaaaactggaggctcaagaatatcaactctattaactttgacaacccagtataccagaagactacagaggatgaagtgcacatctgtcataatcaggacggttactcttatcctagccgccagatggtgagcctggaagatgatgtggct

SEQ ID NO: 11368 - DNA, 2580 bp, Artificial Sequence
  derived and/or modified sequence
atgggcccttggggatggaagctccgctggaccgtggccctcctgctcgccgcggctggcaccgccgtgggtgacagatgtgaacggaatgagttccaatgtcaagacggtaagtgcatttcatacaagtgggtgtgcgacgggtcagccgaatgtcaagatggcagcgacgaatcacaggagacgtgtctgtcggtgacctgcaaatcaggcgatttttcctgcggaggacgcgttaaccgctgcattccgcagttctggagatgtgatggccaagtcgactgcgacaacggatcggacgagcaggggtgcccgccgaaaacgtgctcgcaagacgaattccgctgccacgacggaaaatgcatcagcagacagtttgtctgtgattcggaccgggattgcttggatggttccgacgaggcaagttgccctgtgctcacctgtgggccggcatccttccagtgcaactccagcacctgcatcccgcagctgtgggcgtgtgacaacgacccggattgtgaggatggatcggatgagtggccgcaacgttgtcggggattgtacgtgttccaaggcgacagctccccttgctcagctttcgagtttcactgcctctcgggcgagtgcatccattcgtcgtggcgctgcgatggcggcccggactgtaaagataagtccgatgaggagaattgcgcggtggcaacttgtcggccggatgagttccagtgttccgacggaaactgcatccatgggtcccgccagtgcgaccgggaatacgactgcaaggatatgtcagacgaagtcggttgcgtcaatgtgaccctgtgcgagggacccaataagttcaagtgtcactctggagagtgtatcactcttgataaggtgtgcaacatggccagagattgccgcgattggagcgacgaacctattaaggagtgcggaaccaacgagtgcctcgacaataatggaggatgctctcatgtgtgcaacgatctcaagatcggtgccgaatgtctttgtccagacggatttcaactcgttgcgcagagacgctgtgaggacatcgatgaatgccaagatccggacacttgttctcaactgtgtgtgaacttggagggagggtacaaatgccagtgtgaggagggctttcaactggacccacacaccaaagcgtgcaaggcagtggggtccatcgcttatctgttcttcacgaataggcacgaggtgagaaagatgactctggatcgcagtgagtatacgtccctgatcccaaatctgcgcaacgtcgtggctctggacaccgaggtcgcttcaaaccgaatctactggtcggatctctcccagcgtatgatctgctctacccaactcgatagggcccatggagtctcaagctacgacaccgtgatttcccgcgacatccaggcgcccgacggactggccgtcgactggatccactccaacatctattggacggactccgtccttggaactgtcagcgtggcggacactaaaggagtcaagcggaaaaccctgtttcgggaaaacggatccaagcctagagccatcgtggtggaccctgtgcatgggtttatgtactggaccgattggggaaccccagcgaagatcaagaaaggcgggctcaacggagtggacatctactcactggttaccgagaacatccagtggcctaacgggattactctggatctcctgtcaggccgcctgtactgggtggactcgaagctccattcaatctcgtcaatcgatgtgaacggcggcaaccgcaagactatcctggaggacgaaaaacggctggcacaccctttctccctggccgtgtttgaggacaaagtgttctggactgatatcatcaatgaagcgatcttcagcgctaaccggctgaccggatccgatgtgaatctgctcgctgaaaaccttctgtccccagaagatatggtcctgttccacaacctgacccaacctaggggagttaattggtgtgagcgcaccaccctctcaaacggcggttgccagtacctctgtctcccggccccgcagatcaacccgcactccccgaaattcacctgcgcatgcccggacggaatgctgctggccagagacatgcgctcatgcctgaccgaggctgaagctgcagtggccactcaggaaacttcaacggtccggctgaaggtttcgagcactgctgtccggacccaacacactactactcgcccagtgccggacacgtcaagacttccgggagcaactccgggcctgactactgtcgagatcgtgaccatgtcacaccaagccctgggcgacgtggcaggtaggggcaatgaaaagaaaccgtcctccgtgcgggcgctgagcatcgtcctccctatcgtgcttctggtgttcctctgtctgggagtgttcctcttgtggaaaaactggcgcctgaagaacatcaattctatcaacttcgataacccggtgtaccagaaaaccaccgaggacgaagttcatatctgtcacaatcaggacggatacagctacccgtcgcggcagatggtgtcactggaagatgacgtcgca

SEQ ID NO: 11369 - DNA, 2580 bp, Artificial Sequence
  derived and/or modified sequence
atggggccgtggggttggaagctgcggtggaccgttgcactgctgctcgcggcggctgggactgcagtgggagatcgttgtgagcggaacgagttccagtgtcaggacggcaaatgtatttcttataagtgggtatgtgacggtagcgccgaatgtcaggatggctccgatgaaagtcaggaaacatgcctgtcagttacatgtaagagtggggatttctcttgtggggggcgtgttaatcggtgcatacctcaattttggcggtgcgacggacaggtcgattgcgacaacgggagcgacgagcagggatgtccccccaagacttgttctcaggatgagttcaggtgtcacgacggcaagtgcatttcccgccagttcgtttgcgattccgatcgagactgcttggacggctcagatgaagcgagctgtcctgtgctcacctgcgggccggcttcattccagtgtaactcgagcacctgtattccccagctctgggcgtgcgacaacgatcccgactgtgaagacgggagtgacgagtggccccagcgttgcaggggcctttacgtatttcaaggcgattcatctccttgttctgccttcgaatttcattgtcttagtggtgagtgcatccattcatcttggcggtgtgacgggggccccgactgtaaggacaagagtgatgaggagaattgtgcggtggccacctgtcggcccgacgagttccaatgtagcgatggaaattgtatccacgggagcaggcagtgtgacagagaatatgactgcaaggacatgagtgatgaggttggatgtgttaacgtcacgctttgcgaaggtcccaacaaatttaaatgccattccggcgaatgcattacactcgataaggtgtgtaatatggctcgggactgccgggactggtctgacgaacccattaaagagtgcggtactaatgagtgtttggacaacaacggaggttgctcgcacgtgtgtaatgacctcaaaatcggcgctgaatgtctttgtcccgacggcttccagctggttgcacagaggcgatgtgaggatattgatgagtgccaggatccggacacctgttcccaactttgcgtcaacctggagggaggctacaagtgccaatgcgaagaaggttttcagctcgatcctcataccaaggcttgcaaggcggtaggtagtattgcatacctgttctttactaatcgccacgaggtgagaaaaatgacacttgacagatcagagtacacctctctcattcctaatctgcgcaacgtggtggctctggatacagaagtcgccagcaacaggatctactggtctgacctgtcgcagagaatgatctgctcgactcagcttgaccgtgctcacggggttagctcctacgacacagtcatctcacgagatatccaggcccccgacggtttagctgtggattggattcacagcaacatctactggaccgacagcgtattaggaacggttagcgttgctgacactaagggtgtgaagagaaagacccttttccgcgagaacgggagtaagcccagggccatcgtggtcgatcctgttcatggattcatgtactggacagattggggaacccccgccaagatcaaaaagggcggactgaatggggtggatatctattccctggtgacggagaatatccaatggcctaatgggatcactctggacctcctctcaggccgcctctactgggtagacagtaagctacactcaatctcatctatcgatgtgaacgggggtaatcgaaagaccatactcgaagatgaaaagagactagcccacccattttctctggctgtgtttgaagacaaggtgttctggacagatatcattaacgaagctatctttagcgcgaatcggttgactggatcagacgtcaatctcctggcggagaatttgctgtcgccggaggatatggtactcttccacaaccttacacagcctagaggtgtcaattggtgcgaacggaccaccctttccaatggcggctgccagtacctttgcctgcctgccccccagatcaatccacattccccaaaatttacctgcgcctgtcctgatgggatgctgctcgcaagagacatgaggagctgtttaaccgaagcagaggctgccgtggcgacacaggagacgagcacggtaagactcaaggtttcgagtactgccgtgaggacgcaacatacgacaacacggcccgtccctgatactagccggcttcctggggcaacaccaggactgaccaccgtcgagattgtgacgatgtcacatcaggccctaggggacgtcgccggcagggggaacgagaagaagcccagttccgtgcgggcactttcaatagtgctccctatcgtgctactagtgtttctctgtttgggtgtgtttctgctgtggaaaaactggcgactgaagaacataaactcaatcaattttgataaccccgtctaccagaaaacaaccgaagacgaggttcacatttgccacaatcaggacgggtattcgtacccgagcagacagatggtctccctagaagacgacgtggca

SEQ ID NO: 11370 - DNA, 2580 bp, Artificial Sequence
  derived and/or modified sequence
atgggtccgtggggctggaagctccggtggaccgtggctcttcttcttgccgcagccggaactgcggtgggagacaggtgtgaaaggaacgaattccaatgtcaagatggtaaatgtatttcctacaaatgggtctgcgatggcagcgctgaatgtcaagacggatcagatgagtcacaggaaacctgcttgtcagtcacctgtaaatcaggtgatttttcttgcgggggtagggttaatcgctgtatccctcagttttggagatgcgatgggcaagtggattgtgataatggcagcgatgaacaaggttgtcccccgaaaacttgctcgcaagacgagttccgctgtcatgacggaaaatgtatctcgcgtcagttcgtctgtgattccgatagagactgcctggacggatcggatgaggcgtcatgtcctgttctcacttgtgggcctgcttcatttcagtgtaactcgtcgacttgtattccacaactttgggcatgtgacaatgatccggattgcgaagatgggagcgatgagtggccacaaagatgtagaggactttatgtgtttcagggggactcatctccttgcagcgcattcgaatttcactgtctttcaggagagtgcatccactcgagctggcgctgcgacggtggcccagactgtaaagataaaagcgatgaggaaaactgtgcagtggctacttgtcgccctgacgagttccaatgctccgatggaaattgcatccatggatcgagacagtgcgaccgggaatacgactgcaaggatatgagcgatgaagtcggatgtgtcaacgtgactctgtgtgagggccctaacaagtttaagtgccattccggagagtgtattactctcgataaggtttgtaatatggcccgggactgtagggactggtccgacgagcccattaaggaatgtggtactaacgaatgcctcgacaataatggaggttgttcgcatgtgtgtaacgaccttaagattggggcggagtgcctttgtccagacggttttcagctggtggcacaacggaggtgcgaagatattgatgaatgccaggatcctgatacctgctcgcagctttgcgtgaacctcgagggcgggtacaagtgtcaatgtgaagagggatttcagctggatccacataccaaggcatgcaaggccgtggggtcgattgcttacctgtttttcacgaacaggcatgaagtgcgcaagatgacgcttgatcgctcagaatacacgtcgctcattcctaatttgaggaacgtagtcgcacttgatactgaagtggcttccaaccgaatctattggtccgatctctcccaacgaatgatctgctcaactcaacttgatcgggcacatggagtgtcatcgtacgataccgtgatctcacgcgatatccaagcacccgatgggctggcagtggattggattcacagcaatatctactggactgactccgtccttggtaccgtgtccgtcgccgacaccaagggtgtcaagagaaagactctgtttcgcgaaaatggaagcaagccccgagcgattgtggtggatcctgtgcacggatttatgtactggacggattggggtacccctgccaaaatcaagaagggtggactgaatggcgtcgacatatacagcctggtaaccgaaaacatacaatggccgaacggaattaccctggatttgctctcgggcaggctctactgggtggattcgaagctgcatagcattagttcgattgacgtgaacggtgggaaccgtaagaccatactggaggatgagaagcgacttgctcatcctttctccttggcggtttttgaagataaggtgttctggacggacatcattaatgaagcaatcttctccgcaaacagactcacgggatcggacgtcaaccttttggccgaaaatctcctttccccagaagatatggtcttgttccataatctcactcagccgcggggtgtgaattggtgtgaacgaacgaccctgtcaaacggcggatgtcaatacctttgccttccagctccacagattaatccacacagccctaagttcacttgtgcgtgccctgatggaatgcttcttgcaagggatatgcggtcgtgtctgactgaagcagaagccgccgtggcaacccaggagacttccactgtccgcctcaaagtgtcatcaaccgcggtccgaacccagcacaccaccactagacctgtcccagatacctcacggctgccaggagcaacccctgggctgaccaccgtggagattgtgacgatgtcgcaccaggcactgggagatgtggccgggaggggaaacgagaaaaagccttcctccgtacgcgccctgtctatagtgctgcctatcgtccttctcgtgtttctttgtcttggagtgtttctgttgtggaagaattggcgactgaaaaacatcaactcaattaactttgacaacccggtgtaccagaaaacgaccgaggacgaggtccatatctgtcataaccaggacggatactcctaccccagccgtcaaatggtgtcgctcgaggacgatgtggca

SEQ ID NO: 11371 - DNA, 2580 bp, Artificial Sequence
  derived and/or modified sequence
atggggccgtgggggtggaaactgcgctggaccgtggctctgctcctcgctgctgcaggcactgcagttggggacaggtgtgagagaaacgaatttcagtgtcaggatgggaagtgcattagttataaatgggtctgcgacggatcggccgaatgtcaggacgggagtgacgagtctcaggagacttgcctgtctgtgacctgcaaatccggcgatttctcatgtgggggacgcgtaaataggtgcatcccacagttctggagatgtgatgggcaggtggactgtgacaacggttccgacgaacagggctgccctcccaaaacgtgctctcaggacgaattcaggtgccacgacgggaaatgtatttctcgccagttcgtgtgtgactcagatcgggattgcctggacgggagcgacgaggcatcttgcccagtcctcacctgcggtcctgcctccttccagtgcaatagttcaacctgcatcccgcagttatgggcctgtgataacgaccccgactgtgaggacggctcggacgagtggccccagaggtgccgggggctgtacgtgttccagggggatagctcgccatgctctgctttcgaattccactgtctctccggagagtgtatccacagctcctggaggtgtgatggtggtcccgactgcaaggataagagcgacgaggagaactgtgctgtggcaacatgccgtcctgacgagttccagtgttctgatggcaattgcatacacggcagtaggcagtgtgacagggagtacgactgcaaagatatgagcgatgaggtcggctgcgtcaatgtgacactgtgtgagggcccgaacaagttcaaatgccattctggggaatgcatcacactggacaaagtgtgcaatatggccagagactgcagggattggtccgatgagcccattaaagagtgcggaaccaatgagtgtctcgataataatgggggttgctcacacgtgtgcaatgacctgaaaattggcgctgagtgcctgtgcccggacgggttccagttagttgcccagcgcagatgcgaagacattgacgaatgtcaggatccagatacatgttcccaactgtgtgtgaacctggagggagggtataaatgccagtgcgaggagggcttccagttggatccacacacaaaggcatgtaaggctgttggaagtatcgcctaccttttttttaccaaccgccacgaagtgagaaagatgactcttgaccgatccgagtatacctcactgattcctaatctgcgaaacgtagtggctctcgacaccgaagtggcatcaaaccgtatctactggagtgatctgtctcagcggatgatttgttcaacacagttggaccgcgcccacggagtttccagctacgacaccgtgattagtcgcgacatccaggcacccgatggtctcgcagttgactggattcactcgaatatctattggacggacagtgtgttggggacagtgtcagtggcggacaccaagggcgtgaagcggaagactttgttccgagagaacgggagcaagccgcgggcaatcgtcgtagatcccgtccatgggtttatgtattggaccgattggggtacaccagccaagattaaaaagggcggcctgaacggcgtggacatctactcccttgttacagaaaatattcagtggcccaacggaatcaccctcgacctactgagcgggcgcctgtattgggtggactccaagctccactcgatctcttccatcgacgtgaacgggggaaacaggaagaccattctcgaagatgagaagagactcgcccatcccttttcccttgcagtttttgaagacaaggtgttttggaccgatatcattaacgaggccatctttagtgctaatagactgaccggctccgatgttaacctgctggcggagaatctgctgtctccagaggacatggtactgttccataatttgacacagcccagaggcgtcaattggtgtgaacgtacgacgctgtctaacggcggctgccagtacctgtgtctacccgctccgcagatcaatcctcatagcccaaaatttacctgtgcatgccctgacggcatgttgctagctagggacatgagatcctgtctgactgaggctgaggcagccgtggctacccaggagacttctacggttcgattaaaggttagctctaccgccgttagaacccagcataccactactcgtccagtgcctgacacatcccggttgcctggagcaactccggggctgactactgtcgagattgtgacaatgagccaccaggccttgggagacgtggccggtaggggaaatgagaaaaagccatcctctgtgagagctctcagcattgtgcttccaatcgtgctgctcgttttcctatgtctcggcgtgttcttactctggaaaaattggaggctgaagaacataaacagtattaacttcgataatcctgtctatcagaaaaccacagaggacgaggtacacatctgccacaatcaagatgggtattcctacccatccagacagatggtgtccttggaagacgatgtggct

SEQ ID NO: 11372 - DNA, 2580 bp, Artificial Sequence
  derived and/or modified sequence
atgggtccctggggatggaagcttcgctggactgtcgccttgctgttggctgccgcaggaaccgctgtgggcgataggtgcgagcgcaatgaattccaatgtcaagacggaaaatgtattagctataagtgggtctgtgatggaagtgcggagtgtcaggatggaagcgacgagtcccaggaaacctgcctttctgtaacctgcaaaagcggagatttcagctgcggaggtagagtgaacaggtgcataccacagttttggagatgcgatggccaagtagattgcgacaatggctccgacgagcaaggttgccctccaaaaacctgctcccaggatgaattccgctgtcacgacggtaagtgcatatcacgccaattcgtttgcgatagcgacagagactgtcttgatggatccgacgaagcgtcatgtcccgtgctgacttgtggcccggcgtcttttcagtgcaatagttcaacatgcatcccacaactttgggcatgtgacaacgatccagactgcgaggatggttcagacgaatggccccaacgctgcaggggtctgtacgtattccaaggtgatagttctccttgctcagccttcgaatttcactgtctctctggtgaatgtatacactcctcttggagatgtgacggcggtccagattgcaaggacaaaagcgatgaggagaactgcgcggttgcaacctgccgcccagacgagtttcagtgctccgacggcaactgcattcacggctcaagacagtgtgacagagaatatgattgtaaggacatgagtgatgaggtaggctgcgttaacgttaccctgtgcgaaggtcctaacaaattcaagtgtcactctggcgagtgcattaccctcgataaagtttgcaacatggccagggattgcagggactggagtgacgagcccattaaagagtgcggcactaacgagtgcctggacaacaatggcggatgttcccatgtgtgtaacgacctgaagattggagctgagtgtctctgtcccgatggttttcaactggtcgctcagcgccgctgcgaagacatcgatgagtgtcaggaccccgatacatgctcccagctgtgtgtaaacctcgaaggtggatacaagtgtcaatgcgaggaaggcttccaactcgacccgcacactaaagcctgcaaagctgtgggatcaatcgcttacttgtttttcaccaaccgccacgaggtcaggaagatgaccctggacaggtctgaatacaccagcctgatccccaacctgcgcaacgtcgttgctctggatacggaagttgcatccaataggatttattggagcgatctctcccagagaatgatctgttctactcagctggaccgcgcccacggagtcagtagctacgatactgtcattagtagggatattcaggcgccagatggccttgcagtagattggatccacagcaacatttactggacggactcagttctcggtacagtgtccgtcgccgatactaaaggagttaaacgcaaaactttgtttagagagaacggttctaagcccagggccattgttgtcgaccctgttcacggattcatgtactggacggattggggcactcccgccaagatcaagaagggaggattgaacggagtggatatctacagcctggtcacggagaatatccaatggcccaacggaatcacgctcgacctcctttccggcaggctgtattgggtagatagcaagctgcactccatttctagcatcgatgtcaacggcggtaaccgcaagacgattctcgaagatgagaagcgccttgcccaccctttctccttggccgttttcgaggacaaggtgttttggactgatattatcaacgaagcaatattctccgccaatagactgactggctccgatgtgaatctgctggccgagaacctgctgtctccagaggatatggttctctttcacaacttgacccaacctagaggtgtgaattggtgcgagagaacaaccctgtcaaacggcggttgtcagtatctgtgtctccccgctccacaaattaacccacactccccgaagttcacatgtgcttgtccggatggaatgctgctggcaagagacatgcgcagttgcttgacagaggcggaggcagccgttgccactcaggaaactagcaccgtcagactcaaagtctcatccactgcagtaagaacgcagcacacgaccacccgcccggtcccagacaccagccgcttgcctggcgcgacccctggcctgaccactgtcgaaatcgtgactatgtcccaccaagctctgggagacgtggccggtagaggcaacgaaaagaagccctcttcagtgagagcgctgtctatcgtcctgcccatcgtcctcttggtcttcctttgccttggcgtattcctgctctggaagaactggaggctcaagaacatcaattcaatcaactttgacaaccccgtgtaccagaagactactgaagacgaggttcacatttgtcacaaccaggatggatactcctacccatcaaggcagatggtgagcttggaagacgatgtcgct

SEQ ID NO: 11373 - DNA, 2580 bp, Artificial Sequence
  derived and/or modified sequence
atgggtccttggggctggaaactgaggtggacagtcgctcttctgctggccgcagccggtaccgctgtgggcgacagatgcgagaggaatgaatttcagtgtcaggacggaaaatgcatctcctacaaatgggtgtgcgacggctccgccgaatgtcaggatgggtctgacgagtcacaagaaacttgtctgagcgtgacatgcaagtccggagatttctcctgcggtgggcgggtcaaccggtgcatccctcagttttggagatgtgacgggcaagtcgactgtgacaatggaagcgacgaacaggggtgccctcccaagacctgctcccaggatgagttcagatgccacgatggaaagtgcatctcacgccagtttgtttgtgatagcgatcgggattgtcttgacggctcggacgaggcctcttgccccgttcttacatgcggacctgcctctttccaatgtaactcgtctacttgcattcctcagctctgggcctgcgacaatgatccggattgcgaagacggcagcgacgaatggccccagcggtgccgcggtctatacgtctttcagggcgattcatccccatgctccgccttcgaattccactgcctgagcggagagtgcattcattcttcatggcgatgcgacggcggccccgactgcaaagacaagtcagacgaggagaattgcgctgtcgctacttgtaggcctgacgaatttcagtgttccgatgggaactgtatccatgggtctagacagtgcgatagagagtacgactgcaaggatatgagcgacgaggtggggtgtgtaaacgtcactctgtgcgaagggccaaacaagtttaaatgccattcgggagagtgtattactttagacaaagtctgcaacatggcgcgagattgtagggactggtctgacgagcctataaaagagtgtgggactaatgaatgtctcgacaacaacggagggtgtagccacgtgtgtaacgatcttaagatcggggctgaatgtctctgtcccgacgggttccagctcgtggcgcagcgaaggtgcgaggacatcgacgagtgccaagatccagacacctgttcccagctgtgtgttaatctggaggggggatataaatgccagtgtgaagaagggtttcagctcgacccgcataccaaagcctgcaaggctgtcggctcgatcgcttatctgttctttactaacaggcatgaggtgcgcaagatgaccctggacaggtctgaatataccagcctgatcccgaacctgcgcaacgtagtcgctctggacaccgaagtggcaagcaatagaatttattggagtgatctgtctcagcgaatgatctgttcaacccagctcgaccgcgcccatggggtctcttcatatgacaccgtcatctctcgagacattcaggcacccgacggcctcgcagtggactggattcattccaacatatactggactgacagtgtccttggcactgtgagcgtggctgataccaagggtgtgaagcggaagactctctttagggaaaatgggtccaaacctcgggcaatcgtggtggacccagtgcatggctttatgtactggactgattgggggaccccggcaaagatcaagaaaggaggtctgaacggcgtggatatatattccctggtcacagagaatattcagtggcccaacggaattactctggatctcttatcaggccgattgtattgggtggactctaagctgcactcaatttcttcaatcgacgtgaacggcggaaacagaaagaccatcttagaagatgagaaacgtttggcccatccctttagcctggccgtgttcgaggacaaggtgttttggaccgatatcattaatgaggccattttctccgcgaatcgcctgactggaagcgatgtcaaccttctggctgaaaacctcttatcgcctgaggatatggtcctgttccacaatctgacccagccccggggagtgaactggtgtgaacggacaactctatccaacggtggctgtcagtatctctgtctccccgctccccagattaaccctcactccccaaagttcacgtgtgcttgcccagatggcatgctcctggccagggacatgcgctcttgcctcacagaggccgaggcagctgtcgcaacccaggagacgtctactgtccgccttaaagtgtcttctacagcggtacgcacccagcacactaccacacgccccgtgcccgatacatcaaggcttcctggcgccacccccggtctcaccaccgtcgaaatcgtgaccatgtcccaccaggccttgggagatgttgctgggcgtgggaatgaaaagaaaccctcttccgtgcgggcgttgagcatagtacttcccatcgtgttgctcgtgttcctatgcctcggcgtgttcctgctctggaagaactggagactgaaaaacattaactcaatcaatttcgacaatccagtgtaccaaaagaccacagaggatgaggtgcacatctgccataatcaggatggttacagctacccttcaaggcagatggttagcctagaggatgacgtggct

SEQ ID NO: 11374 - DNA, 2580 bp, Artificial Sequence
  derived and/or modified sequence
atgggtccttggggctggaagctgaggtggactgtggccctccttctagctgctgccgggaccgccgtgggggaccgatgcgagagaaatgagtttcagtgtcaggatggcaaatgcataagttataagtgggtgtgtgacggcagtgcagaatgccaggatgggtctgatgagagtcaggagacttgcctgtctgtcacctgtaaatctggcgacttttcctgcggcggacgggttaatcgctgcattccacagttctggaggtgtgacggccaggtggattgcgacaacggcagtgacgaacaaggctgtcctcctaagacctgttcacaggatgaatttcggtgccatgacggcaagtgtatctcccgacagttcgtctgcgactcagatcgagattgtctagatggttctgacgaggccagctgccctgtgctgacatgcggcccagcttcattccagtgcaactctagcacatgcattccacagctgtgggcttgcgacaatgacccagactgtgaggacggcagcgacgagtggccacagcgctgccgcggcttgtacgtcttccagggggactcttctccatgctccgcctttgagtttcattgcctctctggggagtgcattcattccagctggcgatgcgatggcggcccagattgcaaggacaagtcagatgaggaaaactgcgccgtcgccacctgcaggcccgacgaatttcagtgcagtgacggcaactgcattcacggctctcgccagtgcgatagggagtacgattgcaaagatatgagtgacgaggtcgggtgtgtgaacgtcactttgtgcgagggccccaataagtttaagtgtcacagtggcgagtgtatcaccctggataaggtgtgtaatatggctagagattgtcgcgactggtctgacgagcccatcaaagaatgcggcacaaacgagtgcctggacaacaacgggggatgctcacacgtctgtaatgacctcaaaatcggcgccgaatgcctgtgcccagacggttttcagctggtcgcccagagacgatgcgaagacattgatgaatgccaagacccagatacctgcagtcaactctgtgttaatctggaaggagggtataaatgtcagtgtgaagaagggtttcagttggacccccataccaaggcctgtaaggcagtcggatctattgcctacctattcttcacaaatcgtcatgaagtgcgcaagatgaccctggacaggagtgagtatacaagtctgattccaaacctacgcaatgtggtggccttagataccgaagtggccagcaatcgcatctactggtccgacctatctcagcgcatgatttgtagtactcagctggacagggctcacggcgtgagtagttacgataccgtcatttccagagatatccaggcccctgacgggctcgctgtggattggattcactctaatatttactggacagactccgtgctaggcaccgtttctgtggcagacacaaaaggcgtcaagaggaaaaccctgtttagagagaatggttccaaaccccgcgctattgtcgtggatccagttcacgggttcatgtactggactgattggggcacccctgctaagattaaaaaaggtggcctgaatggcgtggatatttatagcttagtgaccgagaacatccagtggcctaatggaattacactggacctgctgtctgggcggctgtactgggtcgatagcaagctgcattcaataagctcaatagacgtcaatgggggcaatagaaaaacaatattagaagatgagaagcgccttgcccaccctttttccctcgctgtgtttgaggataaggtgttctggaccgatataataaacgaagctatcttctccgccaacagactgacagggtccgacgtgaacctgctggccgaaaatctgctgtctcctgaggacatggtgctgtttcacaatctgacccaaccccgaggcgtgaactggtgcgaaaggaccacactctccaacgggggctgccagtatctatgtttacccgccccccaaatcaatcctcacagccccaaattcacttgcgcttgccccgacggcatgctgctggctagagatatgcggtcctgtctgactgaagctgaagctgccgtcgctacccaggagactagtaccgtgagactgaaggtgagctctactgcagtgcggactcagcacactacaaccaggcccgtccctgatacctctcgcctgcctggggcaacccccggactaaccacagtggagatcgtgacaatgagccatcaagctctgggggatgttgccgggcgggggaacgaaaagaaaccatcatccgtgcgggccctgtcaatcgttttaccaatcgttttattggtattcctatgcctgggagtgtttctcctgtggaagaattggagactgaaaaatattaatagcatcaactttgacaaccctgtgtatcagaagacaactgaagatgaagtgcatatttgccataaccaagacggctactcatatccttccaggcaaatggtttctctcgaggatgatgtcgcc

SEQ ID NO: 11375 - DNA, 2580 bp, Artificial Sequence
  derived and/or modified sequence
atgggtccatgggggtggaagttgagatggaccgtcgcacttcttcttgccgcagccggcactgctgtcggtgatagatgcgaacggaatgaattccagtgtcaggatgggaaatgcattagctacaaatgggtgtgcgatggctcagcggaatgtcaggatggttccgatgagtcgcaagaaacctgcctgtccgtcacctgtaagtccggggatttctcgtgtggagggagagtgaacagatgcatacctcagttttggcgttgtgatggacaggtcgattgtgacaacggaagcgacgaacaagggtgcccccctaagacctgttcacaggatgaatttagatgtcacgatggtaagtgtattagccggcaattcgtgtgtgactcggatcgcgactgtctcgatggttcggacgaagcatcctgtcctgtgcttacttgtggacctgcgtcgtttcagtgtaactcctccacttgtataccccagctctgggcatgcgacaatgatccagattgcgaggatggctccgatgagtggcctcaacgctgccgagggctttacgtgttccagggcgattcgtccccctgctccgcctttgaatttcactgcctttccggcgagtgcatccattcgtcctggagatgcgatggtgggccggattgtaaggataagtccgacgaagaaaactgcgcagtggcaacgtgtcgcccagacgagttccagtgcagcgatggaaactgtattcatggctcgagacaatgtgaccgcgaatacgactgtaaagatatgtcggacgaagtgggatgcgtgaatgtcaccctgtgtgagggccccaacaagttcaaatgtcatagcggtgaatgtataactctggacaaggtgtgcaacatggccagagattgcagagattggtccgatgaaccgatcaaagaatgcggcaccaacgaatgtcttgacaacaatggtggttgttcacacgtttgcaatgatcttaagattggtgcagaatgtctgtgcccagacggatttcaacttgtggcccaaaggagatgcgaggacatcgacgagtgtcaagatcctgatacgtgtagccagctttgtgtcaatctcgaaggcggatacaagtgccaatgtgaggaaggattccaacttgacccccataccaaagcatgcaaggcagtgggatcgattgcctacttgtttttcaccaaccgccacgaagtgcgaaaaatgacgcttgataggtcagaatacacgtcgttgatcccaaacctgcggaatgtggtagcgctggacactgaagtggcctcgaataggatctactggtccgacctgtcccaaaggatgatttgctccactcaactggatagagcccacggagtctcgtcctatgataccgtgatatccagggatatacaggcgccggatggcctggccgtcgattggattcactccaacatatactggacggactctgtgcttggaaccgtgtcggtggcagacactaagggagtcaagagaaaaacgctgtttagagaaaacggctccaaaccacgcgcgattgtggtggatccagtgcacggatttatgtactggacggattgggggactccagctaagatcaaaaagggcggactcaatggtgtggacatttactctctggtcaccgaaaacatacaatggcctaacgggataacgctggatctgctctccggaaggctgtattgggtggacagcaagctgcactcgatttcctctatcgatgtgaacggtggtaacagaaagactatcttggaggatgaaaaacgactggctcatcctttcagcctggcagtgtttgaggataaggttttctggaccgacattatcaacgaagcaatcttttcggcaaatcggctcaccggatcggatgtgaaccttctggcagaaaacttgctttctcccgaggacatggtgctgttccataacctgacccagcctcgtggtgtgaattggtgtgagcgtactactctttcgaacggcggctgtcagtacttgtgccttcctgcccctcaaatcaacccacactcgcctaaattcacttgtgcatgtcctgacggcatgctgcttgccagagatatgagatcgtgtctgactgaagcagaggccgccgtcgccacccaggagactagcaccgtcagactgaaagtgtcgtcaacggcggtgcggacccagcatactactaccagaccagtcccagataccagccgactgccaggggccacccccgggctcaccactgtcgagatcgtcactatgtcccatcaagcacttggtgacgtggccggccgagggaacgagaaaaaaccctcatcggtccgcgcgctgagcattgtcctccctatcgtgctccttgtgtttctttgtcttggagtctttcttctttggaagaattggcggctgaagaacatcaatagcataaactttgacaatccagtctaccaaaagaccactgaggacgaagtccacatttgtcataatcaggatggatactcgtacccaagccggcagatggtcagtctcgaggacgacgtggcg

SEQ ID NO: 11376 - DNA, 2580 bp, Artificial Sequence
  derived and/or modified sequence
atgggtccctggggctggaagcttcgctggaccgtcgccttgctacttgccgcagcaggcacggcagtgggagaccggtgtgagcgaaatgaattccagtgtcaggatgggaaatgtatctcctacaagtgggtgtgcgatggaagcgcggagtgccaggacggaagcgacgagagtcaggagacatgcctgtcagtaacctgcaaatcgggagactttagctgcggtggccgtgtaaaccgatgcataccccaattctggcgctgcgatggacaggtggattgcgataatggcagcgatgagcagggatgtcccccaaagacttgctcgcaggatgaattcaggtgtcatgatggcaagtgcatatcacgccagttcgtgtgcgactcagatcgtgactgcttggacgggagtgatgaagcttcctgccctgtgctaacatgcggcccggctagttttcagtgcaacagttcaacttgtatcccgcagctgtgggcttgtgataacgatccggactgcgaggatgggtcagatgagtggccacagcgctgcaggggtttgtatgtgtttcagggcgattcgagtccgtgctcggccttcgagttccactgtctgtccggcgagtgcatccattcatcctggcgttgcgacggaggacccgactgcaaagacaagagcgacgaggagaactgcgctgtggcaacgtgccgccccgacgagtttcagtgcagtgacggaaactgtatccacgggagccgtcagtgcgacagagaatatgattgcaaagacatgtcggacgaggtgggatgcgtgaacgtgacgctgtgcgaggggcctaacaaatttaaatgtcacagtggtgagtgcataacgctggacaaagtctgtaatatggcccgcgattgtcgcgactggagcgatgagccaatcaaggagtgcggcaccaacgagtgccttgacaataacggtggatgctcccacgtctgcaacgacctgaagatcggcgccgagtgcctgtgccccgacggctttcagctggtggcccaaaggaggtgcgaggatattgacgagtgccaggaccccgacacatgtagccagctgtgtgtcaacctcgaaggcggctacaaatgccagtgtgaggagggattccagttggatccgcataccaaggcgtgcaaggcagtgggctcaatagcctatctcttctttaccaatcgacatgaggtccgcaagatgacacttgaccgtagtgaatacacatcgctaatcccgaatctgcgcaatgtggtggctctagacacagaggtagccagtaataggatttattggtcggatttgagtcagaggatgatctgcagcacacagctggatagagcgcacggcgttagtagctatgacactgtcatcagccgagacatccaggcgcctgatggattggcagtggactggatccattctaacatttattggaccgacagtgtgctgggtaccgtgtccgtggctgacaccaagggcgtcaagcgcaaaaccctattcagggagaacggctcgaagccccgagcaatcgtggtggatcccgttcatggcttcatgtactggacagattggggtacgcccgcgaagattaagaagggcggcctaaacggggtagatatatattccttggttaccgaaaacatacagtggccgaatggaataacattggatttgctgtccggacgcctgtactgggtggatagtaaactgcactccatttcctctattgatgttaatgggggaaacagaaagaccatcttggaagatgaaaagcgcttggcgcaccccttcagcctcgccgtctttgaggacaaggtattctggaccgatataatcaatgaagctatcttcagtgccaaccggttgacaggttcagacgtgaacctgctggccgaaaaccttctatctccagaggacatggtcttgttccacaatcttactcagccacgtggcgtgaattggtgtgagcgaacgacactgagtaatggtggatgccagtatctgtgcttgccggccccacagattaacccgcacagcccgaagttcacctgcgcctgccccgatggtatgctgctggcccgagatatgcgctcgtgcctcacagaggcggaggccgcagttgccacccaagagacgtccactgttcgcctgaaggtcagttcaaccgctgtccgaactcagcacactaccacgcgacccgtccccgatacatcacggcttcctggtgccacccccggcctgacaacggtcgaaatagtgactatgagccatcaggccctgggagatgtcgcaggccggggcaatgagaagaagccctcatccgtcagggctctgagtatcgttctgccgatcgtgctgctggtgtttctatgccttggcgttttcctcctgtggaagaattggagattaaagaatataaacagcattaactttgataatcctgtgtaccagaaaacgaccgaagatgaagtgcatatctgccataaccaggatggctactcctacccatctcgccagatggtgtcattggaagatgacgtcgca

SEQ ID NO: 11377 - DNA, 2580 bp, Artificial Sequence
  derived and/or modified sequence
atgggtccctggggatggaaactccggtggaccgtggcactcctgttggcggccgcaggaaccgctgtgggtgatcggtgcgaacgcaacgagtttcaatgccaggatggaaaatgcatttcatacaagtgggtgtgtgacggttcagccgagtgtcaagacggatcggatgaatcacaagagacttgtctttccgtgacctgtaagtccggggactttagctgtgggggtcgggtcaacagatgcattccgcagttttggcgatgtgatggtcaggtcgattgtgacaatggctcagatgagcaggggtgtcccccaaagacctgttcacaagatgaatttagatgtcacgatggtaagtgcatctcacgccaattcgtgtgcgattctgatcgtgattgtctggacggatcggacgaagcatcgtgtccagtgcttacctgtggccctgcatcgttccagtgcaactcgagcacctgtatcccacaactctgggcctgcgataacgatcccgactgtgaggatgggtctgatgaatggccgcagcgatgtcgcggactgtacgtgttccaaggagatagcagcccctgctcggcctttgagtttcattgtctgtcgggagaatgtatccattcctcgtggcgatgcgatggcggcccggattgcaaagataaatcggatgaggagaactgtgcagttgcaacctgtaggccagacgaatttcagtgttccgatggaaactgcatacacggcagccgccagtgcgacagagagtacgactgtaaagacatgtcggatgaagtggggtgtgtgaacgtgaccttgtgtgaagggccgaacaagtttaagtgtcacagcggggaatgtatcaccctggacaaggtctgtaatatggcacgcgactgtagagactggtccgacgaaccaattaaggagtgtgggactaatgagtgcctcgacaacaatggcggttgttcccatgtgtgcaacgatttgaagataggcgcagaatgcttgtgtcccgatggctttcagctggtcgcgcaacgaagatgcgaggatattgatgaatgccaggatccagatacttgtagccaactttgcgtgaatttggaaggcgggtacaagtgtcagtgcgaagaaggattccaactggatcctcataccaaggcctgcaaagcagtgggatccattgcatatctgttctttactaaccggcatgaagtgagaaagatgacgctggatcgctcggagtatacgtcactgattcccaacctgcgcaacgttgtggcactggacactgaggtggcgtcgaacagaatctactggtccgacctttcgcagcggatgatttgtagcactcaactggatagagcgcatggagtgtcgagctacgatactgtcatctccagagacatccaagcaccggatggactcgctgtggattggattcattccaacatttactggactgattccgtgcttggaactgtgtcggtggccgataccaagggtgtcaaacgaaagacccttttcagggaaaatggctcgaagcctcgagcaatcgtggtggacccggtgcacggttttatgtactggactgactggggcacccctgccaagattaagaagggaggtcttaacggagttgacatatactcgctcgtgacggaaaacatccaatggcctaacggaattaccctcgatttgctttcgggacgtctttactgggtggactccaaactgcactccatctcgagcatcgatgtcaacggtgggaaccgaaaaactatccttgaagatgaaaagaggcttgcacatcctttcagcctcgcggtgtttgaagataaagtgttctggaccgacatcataaacgaagctatattctccgcgaataggttgactggctcggacgtcaatcttctcgccgaaaacttgttgagccccgaggacatggttctcttccataacctcactcagcctcgtggagttaattggtgtgaaagaaccaccttgtcaaatggaggttgtcaatacctgtgtctgcctgccccacagattaaccctcattccccaaagttcacgtgtgcgtgtcccgacgggatgcttcttgcacgtgacatgcgctcctgtctgaccgaagcggaggcagccgtggcaactcaagagacgtcaactgtccgcctcaaggtttcatcgacggcagtgcgcacccaacacactaccacccgaccggtgcctgatactagccgcctcccaggcgccaccccgggtctgaccaccgtcgagattgtgacgatgtcacatcaggctctgggagatgtggcagggcgaggaaatgaaaagaagccatcctctgtgcgcgctctttccattgtgcttcctattgtcttgcttgtgtttctttgtcttggggtgtttctgctgtggaagaactggcggctgaagaacattaactcgatcaattttgacaaccctgtctaccagaaaaccactgaggacgaagtgcacatttgtcataaccaggacggatactcatatccgtcgcgccaaatggtttcgctggaggatgacgtggca

SEQ ID NO: 11378 - DNA, 2580 bp, Artificial Sequence
  derived and/or modified sequence
atgggaccttggggatggaagcttcggtggacggtagctctgctactagcagcagccggtaccgccgtgggcgaccgctgcgagaggaatgagtttcagtgtcaagatggcaaatgtatctcatacaaatgggtgtgcgacggcagcgcagagtgtcaggatggatctgacgagtcacaggagacttgcttatcagtcacttgtaaaagtggcgactttagctgtggaggacgggtcaataggtgcatcccccagttttggagatgcgatggacaggttgactgtgacaacggatccgatgaacagggatgtccccccaagacgtgctctcaagacgagtttcggtgccatgatgggaagtgtatttcacgccagtttgtatgtgatagcgatcgcgattgtctcgacggatctgacgaggcctcttgccccgtgctaacctgtggccctgcttctttccagtgtaactcttccacatgtataccccaactctgggcgtgtgacaatgacccagattgcgaggacgggtctgacgaatggccacagaggtgtaggggcctctatgtgtttcagggagattcaagtccttgctccgcctttgaattccactgcctttctggagaatgtattcatagttcatggcgatgtgatggcggtccagattgcaaggataagtccgatgaagagaactgcgccgtcgcgacctgcaggcctgatgagtttcagtgctctgacggtaattgtattcacggatcccgccagtgcgatcgggagtacgactgcaaggatatgtctgatgaagtgggatgtgtgaatgtcaccctatgtgagggtcccaataaattcaagtgccacagcggagaatgtatcacacttgataaagtttgtaacatggccagggattgtcgtgactggagtgatgaacccataaaggaatgcggtacaaacgaatgcctggacaacaacggcgggtgttcacacgtgtgcaatgacctgaagataggagcagagtgcctgtgcccagatggatttcagctcgtggctcagagacgttgtgaggacatcgacgaatgccaagatccagacacatgttctcagctatgtgttaatctcgagggaggctataagtgtcaatgtgaggaaggcttccagctggatccacatacgaaggcctgcaaggctgtgggatccatcgcatatctcttttttaccaatcggcatgaagttcgtaagatgaccctcgaccgttctgagtatacatcgttgataccgaatctcagaaacgtcgtggcactcgacaccgaagtcgcttcaaatcgaatttactggagcgacttgagtcaacgcatgatatgttctacacaactggacagagcacacggtgtcagctcttacgacacggtgatctctcgtgacatccaggcgcccgatggcctcgccgtggactggattcactctaatatttactggactgactctgtgctgggcaccgtctctgtggccgacaccaagggggtaaaaaggaaaacgcttttcagggaaaatggcagtaaacccagggccatcgtggtggatccagtccacggcttcatgtattggacggactggggaacaccggcaaagatcaaaaaaggaggtctaaacggagtggacatttattctcttgtcacagaaaacattcaatggccaaatggcattacgctggatctgctgtctggcagactttattgggtcgacagcaaactacactccattagctccatcgacgtgaacggcggcaatagaaaaacgatcctcgaagatgagaaaaggttggcccatcctttctccctcgctgtatttgaggacaaggtgttctggacggatattataaatgaggccattttctctgctaacaggttaaccggttctgatgtgaacctgcttgcagagaacctcttgtcccctgaggatatggtgctattccacaacctgactcagcctcggggtgttaattggtgtgagcggaccacgttatccaacggggggtgccagtatttgtgtctgccagctcctcagattaacccacattcccctaaattcacttgtgcctgcccggatgggatgctgttagcacgggatatgagatcctgtcttaccgaagcggaagcggcagttgccactcaggaaacctccacggtgaggctgaaagtttcctcgactgccgtgcgtacccagcacaccaccacgcggcctgtgccagatacttcccgattaccaggggcgacacccgggctgaccacagtggagatcgtgaccatgagccatcaagccttaggcgacgtcgccgggaggggcaatgaaaagaagccctccagcgtgcgggcattgtccattgttttaccaatcgtcttgctagtgttcctgtgtttaggggtatttctgctgtggaaaaattggcgcttgaagaacataaatagcattaacttcgacaaccccgtgtatcagaaaactactgaagacgaagttcacatatgtcataatcaggacggctactcctacccatcccggcagatggtgagccttgaggacgacgttgca

SEQ ID NO: 11379 - DNA, 2580 bp, Artificial Sequence
  derived and/or modified sequence
atgggaccgtggggttggaaactgcggtggactgttgcactgttgctggccgcagccggaactgcagtgggggaccgctgcgaaaggaacgaatttcaatgccaggacggaaagtgcatttcgtacaaatgggtgtgcgacggaagtgccgaatgccaagatggatcggacgagtcacaggaaacctgtctgtcggtgacctgcaaatcgggtgacttttcatgcggcggtagggtcaatcgttgtatcccccaattctggcggtgtgacggacaagtggattgtgataacgggtccgacgagcagggatgcccgccaaagacctgctcccaggacgagttccgctgccacgacgggaagtgcatcagccgccagtttgtgtgcgacagcgaccgcgactgcctcgatgggagcgacgaagcaagctgtccagtgctgacttgcggtccggccagcttccagtgcaactcttcgacttgtattccacagctttgggcgtgcgacaacgatccagattgcgaagatggatcagacgaatggccgcagaggtgtcgcggactgtacgtctttcagggggactcgtccccgtgcagcgcctttgaattccattgcttgtccggcgaatgcatccattcatcgtggcggtgcgatggaggccctgattgcaaagacaagtccgacgaggagaactgtgccgtggccacctgtagaccagatgagttccagtgctcagacggaaactgcatccatggcagccggcagtgcgacagagagtacgactgtaaggacatgagcgatgaagtgggttgcgtcaacgtgactctctgcgaggggcccaataagttcaagtgccattcgggagaatgcattactctggacaaggtctgcaacatggccagagattgcagagactggtcagacgagccgattaaggagtgtggcactaacgagtgcctcgataacaatggaggatgctcccacgtgtgcaacgacctgaaaatcggggctgagtgcctgtgccctgacggattccaactcgtggcccagcgccggtgcgaggacatcgacgagtgtcaagaccctgacacctgctcccaactctgcgtgaacctcgagggagggtacaagtgccagtgcgaggaggggttccagctggacccccatacgaaagcctgcaaagccgtcggaagcatcgcgtaccttttcttcaccaaccggcacgaggtgaggaaaatgactctggaccggtcggaatacacgtcactcattccgaacctcaggaatgtcgtggctctcgataccgaggtcgcgtcaaatcggatctactggtcagatctttcccaacgcatgatctgttcaactcagcttgaccgcgctcatggcgtgtcatcctacgacaccgtgattagccgcgatatccaggctccggatggtctggctgtggattggatccactcgaacatctactggactgactcggtgctcgggactgtgtccgtggccgacactaagggagtcaagcgaaagactctgttcagagaaaacgggtcgaagccacgcgccatcgtggtcgatccagtccatggcttcatgtactggaccgactggggcactccggccaagatcaagaaaggaggacttaacggcgtggatatctattcgctcgtcactgagaacatccaatggccgaatggtatcaccctggatctgctctcgggacggctctactgggtggatagcaagctccacagcatctcctctattgacgtgaacggcggtaatcgaaagactatactcgaggatgaaaaaagactcgcccatccattctccctcgcagtgtttgaggacaaggtcttttggaccgatatcattaatgaagccatctttagcgcaaatcgcctgaccggctccgatgtgaacctgctggccgaaaatctcttgtcgccagaagatatggtgctctttcataaccttacccagccgcggggagtgaactggtgtgagcggactaccctttcaaatggtggatgtcagtacctctgccttcctgcgccgcagatcaacccccactccccaaagttcacttgcgcctgcccggatgggatgctgctcgcccgcgatatgcgctcgtgtctgaccgaggccgaagcagccgtggcgactcaggagacgtccacggtgagactcaaggtgtccagcaccgccgtcagaacccagcacactaccacccgcccagtgccggacacgtctcggcttccaggcgcgaccccgggccttaccactgtcgaaatcgtgactatgagccaccaagccctcggtgatgtcgcgggacgcggtaacgagaagaaaccgtcctcggtccgagccttgtccatcgtcctgccgatcgttctcctggtgttcctgtgcctcggtgtgttcttgctgtggaagaattggcggttgaaaaacatcaattccatcaacttcgacaatccggtgtaccagaaaactacggaggatgaagtgcatatctgccacaaccaagatggatactcgtacccttcgcgacagatggtcagcctcgaggacgatgtggca

SEQ ID NO: 11380 - DNA, 2580 bp, Artificial Sequence
  derived and/or modified sequence
atgggaccttgggggtggaagctgcgttggaccgtcgcacttcttcttgccgctgcaggcactgcagtgggcgatcgctgtgagagaaacgaattccaatgtcaggatggaaaatgtatttcgtacaagtgggtgtgtgatggaagcgccgaatgccaggacggttccgacgaatcacaagagacttgtctttccgtcacgtgtaagtcaggtgatttcagctgcggcgggagggtgaaccgttgtattccccaattttggcgatgtgacggccaagtggactgtgacaatggatcggatgaacaaggatgtcctccaaagacttgcagccaggatgagtttagatgtcatgatggaaaatgcatttccagacagtttgtctgtgactcagaccgggattgtcttgatggctcggacgaagcctcatgtccggtgctcacgtgtggacccgcgtcttttcaatgcaacagctcgacttgcattcctcagctctgggcgtgcgataacgatcctgattgtgaggatggatccgatgaatggccccagcgctgtcgcggactgtacgtgtttcagggagactcaagcccatgttcggcattcgaattccactgtctgagcggggaatgtattcatagcagctggcggtgcgatggaggacctgactgtaaggataagtccgacgaagaaaactgtgcagtggcaacctgtcgccctgatgaatttcagtgtagcgatggaaactgtattcatggttcacgtcaatgtgaccgggagtatgattgtaaggatatgtctgatgaagtcgggtgtgttaatgtgactctctgtgagggacctaacaagtttaagtgtcactcaggggagtgcattactttggataaggtttgcaatatggcacgcgactgtcgcgattggtccgatgaaccaattaaggaatgcggaactaacgagtgtctggataacaatgggggatgttcgcatgtgtgtaatgacctcaaaatcggggcggaatgcctttgcccagacggttttcaacttgtggcacaaaggcgctgcgaagatattgatgaatgccaagatcccgacacgtgctcgcaactctgtgtgaacctcgaaggcggatacaagtgccagtgcgaagaaggttttcaactggacccacataccaaggcatgcaaggcagtggggagcattgcataccttttctttactaatagacatgaagtccggaaaatgacgcttgacagatcagagtatacttcgttgattcccaacttgaggaatgtggtggcactggataccgaggtcgcttcaaacaggatttactggtctgatttgtcgcagcggatgatctgttccacccagcttgatagggcccacggagtctcttcctacgatactgtgatttcgcgcgacattcaagcacctgacggactcgcagtcgattggatacattcgaatatctactggactgattcagtgctgggaaccgtgtcggtggcagacaccaagggtgtcaaaagaaagactctgtttcgggaaaatggaagcaaacctcgagcaatagtggtggacccggtgcacggatttatgtactggaccgattggggaaccccggcaaagataaagaagggcggtctgaacggtgtggacatctactccctggtcaccgaaaacattcaatggcctaacggaatcaccctggatcttctgagcggtagactttactgggtggatagcaagctccactcgatctcgtcaattgatgtcaatgggggaaatcgtaagaccatattggaggacgagaagcgacttgctcatcctttctccctggcagtctttgaagataaggtcttttggactgatatcattaacgaagcaatcttttcagcaaataggctgactggatcagatgtcaatctgctggccgaaaatctgttgtccccagaagatatggtcctcttccataaccttacccagcctagaggagtgaactggtgtgagaggacgacgctgtcgaacggtggatgccagtacctgtgtctccctgcgccacagattaaccctcactcccctaaattcacttgtgcctgtcctgatggcatgctgctggcacgtgatatgcgatcttgccttaccgaagctgaggcggctgtcgcaactcaggaaacctctactgtgagactcaaggtgtcctcgactgcagtccggactcaacacaccacgacccgacctgtccctgacacctcgcgcctgcccggagcaactccagggcttactacggtggaaattgtgaccatgagccatcaggcgttgggggacgtcgcaggtcgtggtaacgagaagaaaccttcatcggtgcgagcgcttagcattgtgcttccgattgtgctgctggtgttcctttgtctgggcgtgtttctgctttggaagaattggcggcttaagaacattaactccatcaactttgataaccccgtgtaccagaaaaccactgaggacgaagttcatatctgtcataaccaggacggatactcgtacccatcgcggcagatggtgtcactggaagatgacgtcgcg

SEQ ID NO: 11381 - DNA, 2580 bp, Artificial Sequence
  derived and/or modified sequence
atggggccatggggatggaagctccgttggaccgtggctctgcttctggccgcagccggcactgctgtgggcgacaggtgcgagagaaacgagttccagtgtcaggacggtaagtgtatcagctacaaatgggtctgtgatggcagcgccgaatgccaagatggtagtgacgaatcccaagaaacgtgtctgtctgtgacctgcaagagcggagacttttcttgcggtggtcgtgttaaccgctgcataccgcaattctggcgctgtgacgggcaggtggactgtgacaacgggagcgatgagcaggggtgtcccccaaaaacctgcagccaggatgaatttaggtgccatgacggcaaatgcatcagccgccagttcgtctgcgacagcgaccgggattgcctggatggcagtgacgaggcatcgtgtcctgtactgacatgtggaccggctagcttccagtgcaacagctctacctgtataccccagctgtgggcctgcgacaatgatcccgattgcgaggacggttcagacgagtggcctcagcgatgtagaggcctctacgtttttcagggggactcaagtccctgcagtgcctttgaattccattgcctgtcaggagagtgcatccactcaagttggaggtgcgacgggggtcctgattgtaaggacaagagcgacgaagagaattgcgccgtagctacttgtcggccagatgagttccaatgcagtgatgggaactgtattcacggctcacggcagtgtgacagggaatatgattgtaaggatatgtccgacgaagttggttgcgtcaacgttaccctctgcgagggccctaacaaattcaagtgccacagcggagaatgtatcactctggacaaggtgtgcaatatggcgcgggactgccgcgattggtccgatgagccaataaaagaatgtggcaccaatgaatgtctggacaataacggtggctgcagtcatgtctgcaacgacctgaaaatcggagccgaatgtctgtgcccagatggttttcagctggtggcacagcgccggtgcgaggacatcgacgaatgtcaggatcccgatacctgcagtcaactgtgtgtcaatctggaggggggttataagtgtcagtgcgaggagggattccagttggacccccatactaaagcttgcaaggcagtcgggagcatcgcgtacctgtttttcacgaacagacacgaggtgcggaaaatgacacttgaccgctcagagtatacctccttaatccctaatctcaggaacgtggtggccctggataccgaagtggccagtaaccgcatctactggtcagacttaagccagagaatgatttgctctacgcaactggatcgcgcacatggtgtttcctcctacgacacggtcatatcccgtgacattcaagcacccgacggattagccgtagactggatccactctaacatttactggacggattcagtgctgggtacagtgtctgtcgcagatactaaaggcgtgaagagaaaaaccctgtttcgagagaacgggagtaagcctcgcgcaatcgtggtcgaccccgtccacggctttatgtattggacagactggggcacccccgccaagataaagaagggtggtctgaatggcgtggatatttattctcttgtgactgagaatattcagtggccgaacggaatcactctggatctgctgagtggacgtttgtattgggtagatagcaagctgcactcaatatcctccatagatgtaaatggaggaaatagaaagacaatcctcgaggacgaaaagaggcttgctcatcctttttccctggctgtgttcgaagacaaagtattctggacggatataattaacgaggccatcttcagcgcaaaccgcctgaccggtagcgacgtaaacctgctggccgagaatttgctctctcctgaggatatggtgttgttccataacctgactcagcctcggggcgttaattggtgtgagcgcaccacattgtccaacggcgggtgccagtacctttgcctccccgctcctcagataaacccacattcacctaaattcacgtgcgcgtgcccggatggcatgctgttggcacgagacatgaggagctgtttgaccgaagccgaagcagcggtagccacccaggagacatcaaccgtgcgcctgaaggtttcttccaccgctgtccgaacccagcacaccactacaaggccagtcccagacacttcaagactgccaggtgccacccctggcctgaccacagtggagatcgtcactatgtcgcaccaagcgctaggcgacgtagctggcagaggtaatgagaaaaaaccctcatctgttcgggcgctgtcaattgtcttacccatcgtgcttctggtctttttatgtctcggcgtgttcctattgtggaaaaactggaggctcaaaaatataaacagcataaattttgataacccagtctaccagaagacaacagaggatgaggtgcacatctgtcataatcaggacggctacagctacccatctcgccagatggtaagtctggaggacgatgtggcc

SEQ ID NO: 11382 - DNA, 2580 bp, Artificial Sequence
  derived and/or modified sequence
atgggcccatggggctggaagctcagatggaccgttgccctactcctggctgcggccgggactgctgtgggcgaccggtgcgaacgaaacgagtttcagtgtcaagacggaaaatgcattagctacaagtgggtctgcgacggatccgcagagtgccaggatggcagcgatgaatcccaggagacttgcttatccgttacctgcaagtctggagattttagttgcggcggaagggtgaacagatgcatcccacagttttggaggtgcgatgggcaagtggattgtgataacgggagcgacgaacagggatgtcctcccaaaacttgcagccaagacgaattccgctgtcacgacggaaagtgcatcagtcgtcaattcgtctgtgatagtgaccgcgactgtcttgatgggtccgatgaagcttcttgcccagtcttgacatgcggtccagctagctttcagtgcaactcgtctacttgtatcccacagctgtgggcttgtgataatgatccagactgtgaggatggaagcgatgaatggcctcaaaggtgccgcggactctacgtgttccagggagatagtagcccttgctccgccttcgagtttcattgccttagcggagagtgcatccactcgagctggcgctgtgatggcggacccgattgcaaggataaaagcgatgaagaaaactgcgcggtcgcgacctgccgaccagacgaattccaatgttctgacggcaactgtatccatggatcgaggcaatgcgatagggagtacgattgcaaggatatgagcgatgaggtgggatgtgtgaacgtgaccctctgtgagggaccaaataaattcaaatgtcatagtggagaatgcatcacacttgacaaggtgtgtaacatggccagggactgccgcgactggtctgacgagccgatcaaggaatgcggaaccaacgaatgcctcgacaacaacggaggatgctctcacgtctgtaacgacttgaaaattggagccgagtgcctctgccctgatgggttccagctggtggcccagagacggtgtgaagatatcgacgaatgccaagacccagacacctgcagtcaactgtgcgtcaatctggagggggggtacaagtgtcagtgcgaggaaggcttccagcttgatccccatacaaaggcttgtaaagccgtgggaagcattgcttacctgttcttcaccaatagacatgaggtgagaaaaatgaccttggataggtcagaatacacctcactgatacctaacctgcgcaacgtggtggctctggacaccgaagttgcatctaaccgcatttactggtcagacctctctcagcggatgatatgcagcacacagctggacagagcacacggtgtatccagctacgacaccgtgattagcagagatattcaggcacctgacggcctggccgtcgactggatccacagcaacatctattggacggactctgtcctgggtaccgtctctgtcgctgatacaaagggcgtcaaaaggaagacactgttcagggagaacggcagcaaaccacgagccatagtagtcgacccagtccatgggtttatgtactggaccgattggggtactcccgcaaagatcaaaaagggcggcctgaacggcgtcgacatctacagccttgtgaccgagaacattcaatggccaaatgggattacccttgatctgctgtctggaagactatactgggtggattctaagttgcattcaatctcaagcatcgacgtgaacggcggaaaccgcaagaccattcttgaagatgaaaagcgcctcgcacaccccttctccctcgcagttttcgaggataaagtattctggaccgatatcattaacgaggctatcttttccgcaaaccgattgacgggcagcgacgttaacctgttggcagaaaaccttctgtcccctgaggacatggttctgtttcacaaccttacacaacctagaggcgtcaattggtgtgaaaggactactttaagcaacggcggatgccaatatctgtgtctgccagctccccagatcaacccgcatagtcctaaattcacatgcgcttgtcccgacgggatgctgcttgctcgcgatatgcgatcttgcttaaccgaggccgaagccgctgtagccacccaagaaacctcgaccgttagacttaaagtttcctctacagctgtgagaacccaacacaccaccaccaggccagtgcctgatacaagccgcctccctggtgccacacccggccttaccactgtagaaatcgtcacaatgtcccaccaagcactgggagatgtggccggccgtggtaacgaaaagaagcccagtagtgtgcgcgcgctctctattgtgctgccaattgttcttttggtgtttttgtgcctgggagtgtttctgctctggaagaactggaggctcaaaaacatcaacagcataaactttgataaccctgtgtaccaaaagacaaccgaagacgaggtccacatttgtcacaaccaggacggctacagttaccccagtaggcagatggtctcactggaagatgacgtggcc

SEQ ID NO: 11383 - DNA, 2580 bp, Artificial Sequence
  derived and/or modified sequence
atgggcccctggggatggaaactgcgctggaccgtagccctgttgctggcagcagccggaacagccgttggcgaccgttgtgaaaggaacgagtttcaatgccaggacggaaagtgtatatcatacaagtgggtgtgtgacgggtccgccgagtgtcaggatggcagcgatgagtcccaggagacatgcctttccgtgacttgcaagtctggcgatttctcctgcgggggtcgtgtcaaccgatgtatcccccagttctggcggtgtgatgggcaggttgattgcgacaatggttcggatgagcagggttgtcctccaaagacctgctctcaagatgagttccggtgccacgatggaaagtgcatatcacgccagttcgtttgcgattcggatagggactgtcttgatggctcggatgaggcaagctgtccagtgctgacatgtggacctgcttcttttcagtgtaacagctcaacttgcatcccccagctctgggcgtgtgataatgatccggattgcgaggatggctccgacgagtggccacagagatgcagaggcctttatgtgttccaaggtgacagttccccttgcagcgcctttgagttccactgcttatccggcgagtgtattcacagcagctggcgttgcgacggagggccggattgtaaagataaatcggatgaagagaactgcgcggtggcgacctgccggcccgatgagtttcagtgttcagatggaaattgcatccacggaagtcggcagtgtgatagggagtatgactgtaaggatatgtctgatgaggtcggctgcgtcaacgttaccctctgtgagggacctaacaagtttaaatgccactctggggagtgtattaccttggacaaagtatgcaacatggcacgagactgtagggactggtcagacgaaccaatcaaggaatgcggaaccaatgagtgtcttgataacaacggcggctgttcccatgtttgcaatgacttaaagatcggcgccgaatgtctttgccccgatggttttcagctcgttgcccagcgccggtgcgaggacatcgacgaatgtcaagacccagacacctgttcacagttatgtgtcaatctggaggggggttacaaatgccagtgcgaggaaggctttcagctggatccacacacaaaagcttgcaaagcggttgggtcaattgcgtatctctttttcaccaatcggcacgaagtccgcaaaatgaccttggatagatccgaatatacaagcctgataccaaatctgaggaatgtggtcgcacttgatacagaggtggcgagtaatagaatttattggagcgatctgagccagcgtatgatctgttcaacccaactggatagagcccatggggtttcttcgtacgacacagtgatatctcgggacattcaggcacccgacggtctcgcagtcgattggatacacagcaacatatattggacagactcggttctggggacagtcagcgtcgcagatactaagggcgtaaagcgcaagactctgtttcgggagaatggtagcaagccgagagctatcgtggttgatccggtgcacggtttcatgtattggactgattggggaacgccagccaagattaagaaagggggcctgaatggtgtggatatttactccctggttacagagaatatccagtggccaaacggaatcaccctcgatctgctgtccggtcgactctattgggtggatagcaaactccactcgatctcatctattgacgtcaacggtggaaatcggaaaaccattctcgaagatgaaaagaggcttgcccaccctttcagccttgctgtgtttgaggacaaagtgttttggacagacatcatcaatgaggccattttctctgccaatcgcttgaccgggagcgatgtgaacttgctggctgaaaatttactgtcacctgaggatatggtgctctttcataatttgacccagcctcgtggcgtaaactggtgtgaaagaacaaccttatcaaatgggggctgtcagtacctatgccttccagcgccacaaattaatccacacagccctaagtttacctgtgcgtgccctgatgggatgctgctagctcgagatatgcggagctgtttgaccgaggcagaagccgccgtagcgacgcaggagacgtccactgttcggctgaaagtgagtagtaccgccgtgagaacccaacataccactacacgccctgttcctgacacttctaggctgcctggcgcgacgccgggtcttaccaccgtagagatagtcacgatgagtcaccaggcactgggcgatgtcgcgggacggggaaacgaaaagaagcccagtagtgttcgtgctctgagcatcgtcttacccatcgtactgctagtgtttctatgtctcggagtattcctgctgtggaaaaactggcggctcaagaacatcaatagtattaacttcgataatccagtgtaccagaaaactactgaggacgaggtgcatatttgtcacaaccaggatggatacagctatccttccagacagatggtgtccctggaagatgacgtggct

SEQ ID NO: 11384 - DNA, 2580 bp, Artificial Sequence
  derived and/or modified sequence
atggggccatggggctggaaacttcgatggaccgtcgcccttcttctggctgcagctggtaccgcagtgggagatcgatgtgaaagaaacgaatttcaatgtcaggatggtaagtgtatctcatacaagtgggtgtgcgatggctccgctgaatgtcaagatgggtccgacgagtcacaagaaacctgcctttccgtgacctgtaaatcaggagacttttcatgtgggggccgagtgaataggtgtattccgcaattttggcggtgtgatggacaagtggattgcgataacggttcggacgaacaaggatgtcctcctaagacttgcagccaggacgaatttcggtgtcatgatggaaaatgtatttcacgccagtttgtgtgtgacagcgatcgcgattgtcttgatggtagcgatgaagctagctgccccgtgctgacctgtggacctgcatcatttcaatgcaactcgtcaacctgtattccacagctttgggcatgcgacaacgatccagattgtgaagatggctccgatgagtggcctcagcggtgtaggggcctttacgtctttcaaggcgattcgtcgccatgcagcgcgttcgagtttcactgtctgtccggggaatgcatccattcctcatggaggtgcgatggagggccggattgtaaagataagtccgatgaggagaattgtgcagtcgcaacttgtcggcctgacgagtttcagtgttctgatggaaactgtatccatggttcacggcaatgtgacagggaatacgactgtaaggacatgagcgatgaggtgggatgtgtcaatgttactctgtgcgaaggacccaacaagttcaagtgtcattccggtgagtgcatcaccttggacaaggtgtgtaacatggcccgggattgtcgcgactggtcggacgagcctattaaggaatgcggcacgaatgagtgccttgataacaatgggggctgttcccacgtgtgcaatgatctgaagattggggccgaatgtttgtgccctgacggatttcaactggtggcacagagaagatgtgaggatattgacgagtgtcaagatcctgatacttgcagccaactgtgtgtgaacttggaaggtggatacaaatgccaatgcgaagaaggtttccaactcgatcctcataccaaggcctgcaaggcagtgggctccatcgcatacctcttctttactaaccgacatgaagtgagaaagatgacccttgatcgttcagagtacacctcgctgatccctaaccttcgcaacgtggtggcactggatacggaagtggcatcgaatcgcatttactggtccgatctttctcaaagaatgatttgctcgactcaacttgacagggcacacggcgtgtccagctacgacaccgtcatatctcgggacattcaagcccctgacggtctggcggtggattggattcacagcaatatctactggaccgactcggtcctgggtacggtttcagttgctgataccaagggagtgaagcgtaagaccctttttcgggagaacgggagcaaacccagggcaatcgtcgtggacccggtgcatgggttcatgtactggaccgattggggaaccccagccaagattaagaagggaggactgaacggggtcgacatatactcactcgtcaccgaaaacatccagtggccaaacggaataactctggatcttctttccggtaggctttactgggttgactccaaactgcattccatttcttcgattgatgtgaatggtgggaaccgcaagaccatccttgaggacgagaaacggctggcacatccattctcgctggccgtttttgaagataaagtcttttggaccgacatcataaatgaggcgattttctctgcaaaccgccttaccggatccgatgtgaatctgctggcagaaaacctgctttccccagaagatatggtgcttttccataatcttactcagccgagaggtgtgaattggtgcgaaaggaccactctgagcaatggaggatgtcagtacctgtgtttgcctgcacctcaaatcaaccctcattcgcctaagttcacctgtgcttgtccggatggtatgctgttggcgagagacatgaggtcgtgccttaccgaagccgaggcagctgtggcaacccaggaaacttcaactgtgcggctgaaggtatcgtccaccgctgtcaggactcagcatactaccacgcggccagtgcctgacacctcacgcctgcctggagcaaccccaggattgactaccgtggagattgtgaccatgagccaccaggcactgggggacgtcgcgggaaggggtaacgagaagaaaccatcctccgtgcgcgcactgtcaatagtcctgccaattgtgttgctggtctttctttgcctcggggtctttctgctctggaagaattggagacttaagaacattaacagcatcaacttcgataatcccgtgtaccaaaagacgaccgaagatgaagtccatatctgtcataatcaggatggatactcatatccttcccgccaaatggtttcgcttgaggacgatgtggcc

SEQ ID NO: 11385 - DNA, 2580 bp, Artificial Sequence
  derived and/or modified sequence
atgggaccatggggttggaaattaaggtggactgttgctcttttattagctgcagcaggaactgcagttggtgatcgatgtgaaaggaatgaattccaatgtcaagatggtaaatgtattagttataaatgggtgtgtgatggatctgcagaatgtcaagatggaagtgatgaatcacaagagacatgtctttctgttacatgtaaaagtggagatttttcatgtggaggacgagtaaacagatgtattcctcaattctggcgttgtgatggtcaagtagattgtgataacggatctgatgaacaaggatgcccacctaaaacttgttcacaagatgaatttcgttgtcatgatggtaagtgtatttcaagacaatttgtttgtgattctgatagagattgtcttgatggttcagatgaagctagttgtccagtattaacctgtggaccagcatcattccaatgtaattcatctacatgtattccacaattatgggcatgtgataacgatccagattgtgaagatggttctgatgaatggccacaacgatgtagaggtttatatgttttccaaggagactcaagtccttgttcggcttttgaatttcattgtctatccggtgaatgtattcattcatcttggagatgtgatggaggaccagattgtaaggataaatcagatgaagaaaattgtgcagtagctacttgtcgtccagatgaattccaatgtagtgacggaaattgtatccacggatcaagacaatgtgatagagaatacgactgtaaagatatgtcagatgaagttggatgtgtgaatgttacattgtgtgagggaccaaataaattcaaatgtcactctggagaatgtattactttagataaggtttgtaatatggcaagagattgtagagattggagtgatgaaccaataaaagaatgtggaacaaatgagtgtttagacaataatggaggatgttctcatgtttgtaatgatttaaagataggtgctgaatgtttatgccctgatggttttcaacttgttgcacaacgaagatgtgaagacattgatgaatgtcaagatcctgatacctgtagccaattatgtgttaatttagaaggtggatataagtgtcaatgtgaagaaggatttcaattggatcctcatactaaagcatgtaaggcagtcggaagtatagcttatctttttttcacaaatagacatgaagttagaaagatgacacttgatagatctgaatatacatctcttatacctaatcttagaaatgttgtagcattagatactgaagtagcttccaatagaatatattggtcggatttatcacagagaatgatttgttctacccaattagatcgtgctcatggagtttcctcatatgacacagtaattagtagagacattcaagcaccagatggattagctgtagattggatacactcaaatatttattggactgattctgtattaggaacagttagtgtggctgatactaaaggagttaaaagaaaaacactttttagagaaaatggatctaaaccacgagcaattgtagtggatcctgtacatggttttatgtattggacagactggggtacacctgctaaaattaaaaaaggaggacttaatggagttgatatttattcattagtaactgaaaatattcaatggccaaatggtattacgcttgatcttctttcaggacgtttatattgggttgattctaaacttcatagtatttctagtattgatgtaaatggtggaaatagaaaaactattttagaggatgaaaaaagattagcccatccatttagtttagctgttttcgaagataaggttttctggactgatattattaatgaagcaattttttcagctaatcgtcttacaggatcagatgttaatcttttagctgaaaatttattatcgcctgaagatatggttttgtttcataatcttactcaaccaagaggagtaaactggtgtgaaagaactactctttcaaatggtggatgtcaatatttgtgtttgccagcaccacaaattaatccacattcacctaaatttacttgtgcatgtccagatgggatgttgttagcaagagacatgagatcatgtctaactgaagcagaagctgctgttgctacacaagaaacttctacagttagacttaaagtttcttcaactgcagttagaactcaacatacaactacaagaccagttcctgatacatcaagattaccaggagctacaccaggacttacaactgttgaaattgttacaatgtcacaccaagctttaggtgatgttgcaggacgtggaaatgaaaaaaaaccatcttctgttagagcattatctattgttttaccaatagttttattagtattcttatgtttaggagttttcttactttggaagaattggagacttaaaaatattaatagtattaattttgacaacccagtttatcaaaaaacaacagaagatgaagttcatatctgtcataaccaagatggatactcatatccatctagacagatggtatctttagaagatgacgtagca

SEQ ID NO: 11386 - DNA, 2580 bp, Artificial Sequence
  derived and/or modified sequence
atggggccttgggggtggaaactgcgctggacagtggctctcctactggctgctgcaggtacggccgtaggcgatagatgcgaacgcaacgagtttcaatgccaggacgggaagtgtatttcttacaagtgggtctgcgacggatccgctgaatgccaagatggctcggatgaatcacaggaaacctgcctgtcggtgacatgcaagtcaggcgacttctcttgtggcggcagggtaaaccgatgcataccccaattctggcggtgtgatggtcaggtcgactgcgacaacggcagcgatgagcagggatgcccaccgaaaacctgtagccaggatgagtttcggtgtcatgatgggaagtgcatctcaaggcagttcgtgtgcgacagcgaccgtgactgcttagacgggtctgatgaggcgtcttgtccagttctgacctgcggccctgcatcatttcagtgcaacagcagtacgtgtatccctcagctgtgggcctgtgataacgatcccgattgtgaggacggaagtgacgagtggccacagcggtgtagaggcctgtatgtgtttcaaggagactcgtcaccttgctctgcctttgagtttcattgccttagcggggaatgcatacacagcagctggcggtgtgacggcggacctgactgtaaggacaaatcagatgaggagaactgcgcagtggcgacctgcagacccgatgaatttcagtgtagtgatggcaactgcatccacggctcacgacaatgcgaccgggaatatgactgcaaggatatgagcgatgaagttggatgcgttaacgttactttgtgcgagggccctaataagtttaagtgtcactcaggcgagtgtatcacactggacaaggtgtgtaacatggctagagattgccgagattggagtgacgagccgatcaaggagtgtggcaccaacgagtgtctagataacaacgggggttgcagtcacgtgtgtaacgacctgaagattggggccgaatgtctgtgccccgatggcttccagctggtcgcccaaaggcgctgcgaggacattgatgaatgccaggacccagatacctgttcccaattgtgcgttaacctcgagggaggctacaaatgtcagtgcgaggaaggttttcagctggatccccacacaaaggcttgtaaggcagtgggcagcattgcttacctcttctttactaaccgacacgaagttagaaaaatgacattagatagaagcgaatatacgtccctgatccctaacttgaggaatgtggtggccctggatactgaagtagcttcaaaccgtatctactggtctgatctgtcacagaggatgatttgcagcactcaactggacagggcccatggcgtatcctcatatgacactgtgatcagccgcgacatacaagcacccgacgggcttgcggtggattggatacatagcaatatctactggaccgattcagttctcggtaccgttagcgttgcagataccaagggagtgaagagaaagactctgttccgtgagaacgggtctaagcctcgggctattgtggtggaccctgtgcacggctttatgtattggacagactggggcacacccgcgaaaattaagaaaggtggtttgaacggtgtggacatctattcccttgtgacggaaaacatacagtggcccaacggcatcacccttgacctattatccggtaggctctactgggttgacagtaagcttcatagtataagcagcatcgatgtgaacggcggcaaccgtaagaccattctggaagacgaaaaacgccttgctcatcccttctctctggccgtgtttgaagataaagtcttctggactgatataatcaacgaagcaattttcagtgccaaccgcctgacagggtcagacgtaaacctgctggctgaaaacctgctgagcccagaggatatggtgctgttccacaatctcacacaacctcgcggagtaaattggtgcgaaagaacgaccctttctaacggcggctgccagtatttgtgcttgcctgctccccaaattaacccacactcacctaaattcacttgtgcatgcccggatgggatgttgctggcccgggacatgcggagctgtctcactgaggccgaggccgcagtggccacacaggaaaccagcaccgtcaggttgaaagtatcctcaactgccgttagaacccagcacacaacgacaaggccagttccggacacatcccgcctacctggggccactcccggcctgacaactgttgagattgtgacaatgtctcaccaagcgctcggtgacgtcgccgggaggggcaacgagaaaaaaccttcctcagtgcgggctttatcgatagttttgcccatcgtgcttctggtgtttctgtgtctcggggtgttcctcctttggaagaattggagactcaagaatatcaactcaataaatttcgataaccctgtctatcagaagacaacagaggacgaagttcacatctgtcacaatcaggacggctactcttaccccagtcgccagatggtttcattggaagacgacgtcgcc

SEQ ID NO: 11387 - DNA, 2580 bp, Artificial Sequence
  derived and/or modified sequence
atgggaccgtggggctggaagctccgctggactgtcgcgctgctgctggcagcggctggaaccgccgtgggggatcgttgtgagcgaaacgaattccaatgccaggacggcaagtgcatttcctataagtgggtgtgcgacggttccgccgagtgccaagacggatcggatgaatcgcaggagacttgcctttccgtgacttgtaagtcgggagacttcagctgcggaggccgggtcaatcggtgcattccacagttttggcggtgcgacggtcaagtggactgcgataacggatccgacgagcagggctgcccgccgaaaacttgctcgcaggacgaatttcgctgccacgatggtaaatgcatctcgcggcaatttgtgtgcgactcggacagggactgcctggacggatcggacgaagcctcgtgccctgtgcttacctgcggcccggcatcatttcaatgcaactcctcgacctgcatccctcaactgtgggcctgcgataatgatccggattgcgaggatggaagcgacgaatggccgcaacggtgtcgggggttgtacgtgttccagggagattcatcgccctgttcggccttcgagttccattgtctgtcaggtgaatgtattcactcatcgtggcgctgcgacggaggcccggattgtaaggataaatcagatgaggaaaattgtgcggtggccacttgtcgccccgatgagttccaatgctccgacggaaactgcattcacggaagccggcagtgtgaccgcgaatacgactgcaaagacatgtcggacgaagtgggatgcgtgaatgtgactctgtgcgaagggccgaacaagttcaagtgccattcaggggaatgcatcactctggacaaagtgtgcaacatggcccgggattgtcgggactggtcggatgaaccaatcaaggaatgcgggaccaatgaatgcctggataacaacggggggtgctcacacgtgtgtaacgacctcaagatcggtgcggaatgcctgtgccctgatggtttccagctggtggcccaacgccggtgcgaagatattgatgaatgtcaagatccagacacctgctcccagctgtgtgtgaacctggagggaggatacaagtgccagtgtgaggaaggttttcagctcgacccgcacaccaaggcctgtaaggccgtgggatccatcgcttacctcttcttcaccaatcggcacgaggtccggaagatgactttggacagatccgaatacaccagcttgatcccgaacctcaggaacgtcgtggcgctggatactgaggtcgcatcaaacagaatttactggtcggatctctcacagcggatgatctgctccactcagctcgaccgggcgcacggggtgtcgagctacgacaccgtgatctcccgcgacatccaggctccagacggactcgctgtcgactggatccattcgaacatctactggactgattccgtcctggggaccgtttcggtcgccgacaccaagggagtgaagcggaaaactctcttccgggaaaatgggagcaaaccgcgggccatcgtggtggatccagtgcacggattcatgtactggaccgactggggcactcctgcgaagatcaagaaggggggactgaacggagttgatatctactccctcgtcaccgaaaacattcagtggcccaatggaataactctggacttgctctcaggcagactctactgggtggactcgaagctgcactccatcagctccatcgacgtgaatggcggaaaccgcaagactattttggaggatgagaaacggctggcacacccgttttctctggcggtgttcgaagataaagtgttttggacggacattatcaacgaagccatcttcagcgccaatagactgaccgggagcgatgtgaacctcctcgccgaaaacctgctgagcccggaagatatggtgctcttccataacctgacccaacctcggggagtcaactggtgtgaacgaaccaccctgtcgaacggaggatgccagtacctctgtttgccagccccgcagatcaacccgcactcgccgaagttcacttgcgcatgtcctgacggaatgctgctggcccgcgacatgcgctcgtgcctgacggaagcggaggccgccgtggcaacccaagagactagcactgtgagactgaaagtctcaagcaccgcggtgaggactcagcacaccaccactagacctgtgcccgacacctccagactccccggagccacgccgggactgactactgtggaaatcgtcacgatgtcgcaccaagcactgggagacgtggcgggcagaggcaacgagaaaaaaccatcgtcagtccgcgccctctccatcgtcctcccgatcgtgctgctcgtgttcttgtgcttgggcgtgttcctgctgtggaaaaactggcgccttaagaacatcaattccatcaattttgacaacccggtgtatcaaaagaccactgaggatgaagtacatatctgccataaccaagacggatactcgtacccatccagacaaatggtgtcgctcgaggacgatgttgcc

SEQ ID NO: 11388 - DNA, 2580 bp, Artificial Sequence
  derived and/or modified sequence
atgggtccttgggggtggaaactgcgctggacagtcgccttgctgctcgccgctgcgggcacagccgtgggggatcgatgtgaaagaaatgaatttcagtgccaggacgggaaatgcattagttataaatgggtctgtgatggatccgctgagtgccaggacggatcagatgagtcccaagaaacatgtctcagtgtcacctgcaagtcgggggactttagctgcggcggaagagtgaatagatgcattccccagttctggagatgtgatggccaggttgactgtgacaatggcagcgacgagcagggctgtcccccaaagacctgttcacaggatgaattcagatgccacgatggcaagtgtatctctaggcaatttgtgtgcgactctgaccgtgactgtctggacggatccgatgaagcatcctgccccgtgcttacgtgtggcccggcgagcttccaatgcaattcctctacttgcatcccacagctgtgggcctgcgacaatgaccccgattgtgaggacggttcggatgagtggccacagagatgtcgcggactctatgtatttcaaggggatagtagcccctgttctgcattcgaattccactgtttgagcggcgaatgcatccatagctcctggcgatgcgacggggggcctgactgtaaagacaagtctgacgaagagaattgcgccgtggctacatgtcggccggacgagttccagtgctcagatggcaattgcatacatggaagccggcagtgtgatcgggagtacgactgcaaggatatgtcagacgaggtaggatgtgtgaatgtgacactctgcgaaggccccaacaagttcaaatgtcacagcggtgagtgtataaccctggataaggtgtgtaatatggcccgcgattgtcgcgattggagcgatgagcctatcaaggagtgtggtacaaacgaatgcttggacaataacggaggttgctcacatgtgtgtaatgacctgaaaataggcgccgagtgtctttgcccagacggtttccagttggttgctcaacgtcgatgcgaagacatcgacgagtgccaagacccggacacctgtagccagctgtgtgttaatctcgagggtggttacaaatgtcagtgcgaagagggctttcaacttgacccacacaccaaagcctgcaaggcagttggatcaatcgcatacctgttctttactaaccgacacgaggtgcgaaagatgacgctggaccgatccgagtataccagtctgattcctaacctcagaaatgtggtggcccttgacaccgaggtagcgtctaaccgtatctattggagcgatctgtcccagcgcatgatatgctccacacagttggatagagcccacggtgtctcaagttatgacacagtgatcagcagggacatacaagcaccggacggactggctgttgactggatccattccaacatctattggacagactctgtcctcggcactgtcagcgtggccgacacaaagggtgtaaaacggaagacgctcttccgggaaaacgggtccaaaccccgggcaatcgtggtcgacccggtgcacggctttatgtactggacagactggggaacaccggccaagattaagaaaggcggcttgaatggtgtggacatatactccctggtaacggagaacatccagtggccgaacggcataaccctcgacctgctctcaggcaggctctactgggtggactctaaactgcatagtatctcatcaattgatgtgaacggcgggaatagaaagaccatactggaagatgagaaacgactagcgcatcctttctcgcttgccgtgtttgaggacaaagtcttctggactgacattattaatgaggctatcttctccgctaaccggctcaccggatccgatgttaacctactggccgagaacttactgtcacccgaagacatggtactctttcacaacctgactcagcctcggggcgtgaattggtgcgaaaggactaccttgagtaacggaggttgccagtacttgtgtctccccgccccccagatcaatccccattcccctaaatttacatgtgcttgtcccgacgggatgttactcgcaagagatatgcgtagttgcttgacagaggccgaggctgcagtagcaacgcaggagactagcacggtcagattgaaggtctcgtctacggccgttaggacccagcacactaccacaagaccagtgccggatacaagcagattaccaggggctacccccggcctcactaccgtcgagatagtaacaatgtcacatcaggccttgggcgatgtagcaggcagaggcaatgaaaaaaagccatccagcgtgcgagcactctcaatcgtgctccctatcgttctcctcgtttttctgtgcttgggagtttttctgctttggaaaaattggcgactaaaaaacatcaactcgattaatttcgataaccctgtgtatcagaagacaactgaagacgaggtgcacatctgccacaaccaggacggctattcctacccctcgcggcagatggtaagtttagaggatgacgtcgct

SEQ ID NO: 11389 - DNA, 2580 bp, Artificial Sequence
  derived and/or modified sequence
atgggcccctggggatggaaattacgttggacagttgcgctgctgcttgccgccgcgggtaccgcggttggcgaccggtgtgaaaggaatgagttccagtgtcaagacggaaaatgtatcagctacaaatgggtctgcgatggatccgcggagtgccaggacggaagcgatgaatcccaggaaacctgtctaagcgtgacatgcaaaagtggagatttttcatgcggcggacgggtcaaccgctgcattccacagttttggcggtgcgatgggcaagtcgactgtgacaatggctctgatgagcagggttgccctccaaagacctgtagccaggacgaattccgctgccatgacggaaagtgtatctcaaggcagttcgtgtgcgatagtgacagggattgcctggatgggtcggacgaggcttcctgcccggtgcttacttgtggccccgctagctttcagtgcaatagtagcacgtgcattccacaactgtgggcatgtgataacgatccagactgcgaggatggatctgatgagtggccccagcggtgtcgcggactgtatgtgtttcagggtgactccagtccctgctccgccttcgaatttcactgtctgagtggagaatgtatccactcgagttggagatgtgatggggggcctgattgcaaagacaagagtgatgaggagaattgtgcagttgcaacttgccggcctgacgaatttcaatgcagtgacggaaactgcatccatggcagccggcagtgcgatcgggagtacgattgtaaagatatgtcagatgaagtggggtgcgttaacgtgaccctttgtgagggccctaacaagtttaagtgccatagtggggagtgcatcactctggataaagtctgtaatatggcaagagattgtcgtgattggtcagatgagccaatcaaagaatgtgggaccaacgaatgcctggacaataacggcggatgctcgcatgtctgtaatgacctgaagattggtgctgaatgtttgtgtccagatggcttccagctagtggcccaacggcggtgcgaggatatagacgagtgccaggacccagatacctgttctcagctgtgcgttaacctcgaggggggctacaagtgtcagtgcgaggagggatttcagcttgatccgcacactaaagcttgtaaagcggtcggatccatcgcatatttgtttttcacgaacaggcatgaagtccgcaagatgaccctggatagatccgagtatactagtcttatacctaatctgcgaaatgttgtagcgctcgacacggaagtggcctctaatcgcatctattggagcgatttgtctcaacgcatgatttgttccacccagttggatagggcacacggggtcagctcatatgacaccgtgatctcccgggacatccaggctccggacggattggctgttgactggattcacagtaacatttactggaccgactccgtcctagggacggtgagtgtggcggacactaaaggcgtgaaacggaaaaccctgttccgcgaaaatgggagcaaaccccgcgctatcgtggtagacccagtgcacggttttatgtactggactgactggggcacaccagccaagattaaaaaaggtggtctgaatggggtggatatttattccttagtgaccgaaaatattcagtggcccaatggaatcaccctggatcttctgagcggtaggctctactgggtggactcaaaactgcactcaatttcctccatagacgtgaatggtggtaaccgcaagactattcttgaggatgagaagagacttgcacaccctttttcccttgcagtttttgaggacaaggttttttggacagacataattaatgaggctatattttccgctaacagactcacagggagcgacgttaacctcttggcagagaatttgctgagtcctgaggatatggtgctctttcacaacttgacacaaccaagaggagtgaattggtgcgagaggactacgctcagcaacggaggctgtcagtacctttgcctaccagccccacaaattaatccccattcccctaagttcacctgcgcttgtccagatggaatgcttcttgcccgggacatgagatcttgcctcaccgaagccgaagcagccgtagctacccaggagacgtctactgtgagacttaaagtctctagtactgccgtgcgcacccagcacacgacgacacggcctgtcccagatacgtctaggttacctggtgctacacctggcctgacaacagtcgagattgttaccatgagccatcaagcccttggggatgtggcaggcaggggtaacgaaaagaagcctagtagcgtgagggcgctctccattgttcttccaatagttctgctggtgttcctgtgcctcggtgtattcctgctatggaaaaactggcgattgaagaatatcaactccatcaattttgataatcccgtgtaccagaagacaactgaagacgaagtccacatctgtcataatcaggacggctattcctatccctccagacagatggtgtctctggaagatgacgtggct

SEQ ID NO: 11390 - DNA, 2580 bp, Artificial Sequence
  derived and/or modified sequence
atggggccctggggatggaagttgcggtggaccgtggcattgctcctggcagccgcaggaaccgccgtgggagatagatgtgaacgcaacgaattccaatgtcaggacggcaagtgtatttcctacaagtgggtgtgtgatgggtcggcggagtgtcaggacggatccgatgagagccaagagacttgcctgtcggtcacctgtaaatccggagatttctcgtgtggtggtcgcgtgaataggtgtattcctcagttctggcggtgtgatggacaagtcgattgcgataatggatcggatgaacaaggatgccctccgaaaacctgcagccaggacgagtttagatgtcatgatggcaagtgtatctccagacagtttgtctgtgattcagatcgggattgtctggatgggtccgacgaagcgtcgtgccctgtgcttacttgtggccccgcttcctttcaatgcaactcctcgacctgcattccccaactgtgggcatgcgacaatgatcccgattgcgaggacggatcggatgagtggccgcaaagatgccgcggactttatgtgtttcaaggtgattcctcaccatgctcggcgtttgaatttcactgtctgtccggagaatgtattcatagcagctggcgctgtgatggaggaccagattgtaaagacaagtcggacgaggagaactgtgcggtcgctacgtgtagaccggatgaatttcaatgtagtgatggcaactgtatacatggttcccgtcaatgcgatcgagaatacgattgtaaggacatgtcagatgaggttggatgcgtgaacgtcactctctgcgagggtcctaacaagtttaagtgccattccggagagtgcattaccctcgataaggtgtgtaacatggccagggattgtcgggattggtccgatgagccaatcaaggagtgcggaacgaacgaatgtctggacaacaatggcggatgttcacacgtttgcaacgatctgaagattggcgcggaatgcctgtgcccagatggattccagctcgtggcacagagacgatgtgaagatatcgacgaatgtcaagatccagacacgtgttcccagctctgtgtgaaccttgagggtggttacaagtgccaatgcgaagaaggatttcagctcgacccacacactaaggcatgtaaagcggtcggttccatcgcatatctctttttcacgaaccgacatgaggtccgaaagatgacgctcgacaggtcggaatacaccagcttgataccaaaccttagaaatgttgtggctcttgacactgaagtggcctcgaaccgaatctactggagcgacctttcccagagaatgatttgctcaacccagctggatcgggctcatggtgtgtcctcctatgataccgtcatttcgcgggatattcaagcacctgatgggcttgcagtcgactggattcacagcaacatttactggactgactcagtgcttggaaccgtgagcgtggctgatactaaaggtgtcaagcggaaaaccctttttagagaaaacgggtcaaaacctagggcgatcgtggtggatcctgtgcatggttttatgtactggaccgattggggcacccctgccaagattaagaagggtggacttaatggcgtggacatatactcgcttgtgactgagaacattcagtggccaaacggcataactctggatttgctttcgggaagattgtactgggtggactcgaagttgcatagcatttcttcgattgacgtcaacggaggcaatcggaaaaccattctggaagatgagaagaggcttgcccatccgttttcactcgcagtctttgaagataaggtcttttggactgatatcattaacgaggccatcttctccgcaaacaggcttactgggtcagacgtgaatctcctggccgagaacctgttgtcgccagaagatatggtcctgtttcacaaccttactcagccaagaggtgtgaactggtgtgaacgcactaccctttccaacggcggctgccaatacctgtgccttcctgcaccgcagattaatccccattcaccaaagttcacctgcgcctgtccggatggaatgcttctggcacgagatatgcgctcgtgtttgaccgaagccgaagccgccgtggcgactcaggaaacttccactgtgcggttgaaggtgtcgagcactgcggtgcggacgcaacacactaccactcggcccgtgcctgacacttccagactcccgggggcaaccccaggtctgactaccgtcgagattgtcactatgtcgcaccaggcactgggcgacgtggccggacgcggcaacgaaaagaaaccttcatcggttcgtgccctgagcattgtgctgcctatcgtgcttcttgtctttctttgtctgggggtgttccttctgtggaagaattggcggctgaaaaacatcaactcgatcaattttgataacccggtctaccaaaagaccacggaagatgaggtgcatatatgtcacaatcaggatggttactcgtacccctcacggcaaatggtgtcgctggaagatgacgtggca

SEQ ID NO: 11391 - DNA, 2580 bp, Artificial Sequence
  derived and/or modified sequence
atgggaccgtggggctggaagttgcgctggacggtggcccttcttctcgccgccgcaggtactgccgtcggggaccgctgcgagcggaatgagttccaatgccaagacggaaagtgtatctcgtataagtgggtgtgcgacgggagcgctgaatgccaagatgggtcagacgagtcccaggaaacttgcctgagcgtgacttgcaagagcggagatttctcgtgtggtggtcgggtgaataggtgcatccctcagttctggagatgcgacgggcaggtggactgcgataatggaagcgacgagcaaggctgcccgcccaagacttgctcacaagacgagttcagatgccacgacggcaaatgcatatcacggcagttcgtgtgtgattcagacagagattgcctggacggatcagacgaagcatcctgcccggtgctgacttgcgggccggcttccttccagtgtaatagctcaacttgcatcccgcagctgtgggcgtgtgacaatgatcctgactgcgaagatggatccgacgaatggccgcaacggtgcagaggactctacgtgtttcagggagattcaagcccctgctcggcctttgagttccattgtctgtcaggtgaatgcatccactcttcgtggcgctgcgacggtggacccgactgcaaggacaaatccgatgaagaaaactgcgccgtggccacctgccgcccggacgagtttcagtgttcagacggcaactgcattcatggaagccgacagtgcgatcgcgaatacgattgcaaagatatgagcgatgaagtgggatgcgtcaacgtcaccctgtgtgaaggacccaataagttcaagtgccatagcggagagtgtatcactctggacaaggtctgcaacatggctagagactgtcgcgattggagcgatgaaccgattaaggaatgcggaactaacgaatgtctggataacaacggagggtgttcccatgtgtgcaacgatctgaaaatcggagctgaatgcctgtgtccagacggattccaactcgtggcgcagcgccggtgcgaggatatcgatgaatgccaggacccagacacctgttcacaactgtgcgtcaacctcgagggaggctacaaatgccagtgtgaagagggtttccagctggacccacataccaaggcgtgcaaagcggtcggctcgatcgcctacttgttctttacgaaccgacacgaagtcagaaagatgaccctggaccgctcagagtataccagccttatcccgaatctgagaaatgtggtcgcactggataccgaagtcgcctccaatcgcatatactggtcagaccttagccaacggatgatctgttcgacccagctggaccgggctcacggagtgagctcctacgacaccgttatctcgagggacatccaagcgccggatggattggcggtggactggatccactccaacatatactggaccgactcagtgctgggaaccgtgtccgtggccgatactaagggagttaagcgcaagaccctgttccgggaaaacgggagcaagccaagagcgatagtggtggacccggtccacggttttatgtactggactgattggggaactccagcaaagattaagaagggcggactcaacggcgtggacatttacagcctggtgactgagaatatccaatggccgaacggaatcactctggatctgctttcggggcggctctattgggtggattcaaagctgcactcgatctcttcaatcgatgtgaatgggggtaataggaaaactatcctcgaggacgaaaaacgcctcgcccatcctttctccttggcagtctttgaggacaaagtgttctggaccgacatcataaacgaagctatcttttcggcaaaccggctgaccggctccgacgtgaacttgctggcggagaacctcctttcgccagaggacatggtcctcttccacaatctgactcagccacgcggcgtcaattggtgcgagaggaccactctctccaacgggggctgccagtacctttgtctccccgctcctcagatcaacccacactcgcctaagttcacctgtgcgtgccctgatggaatgctgttggcgagagacatgcggtcctgcctgaccgaggcagaggctgccgtggcaacgcaagaaacctcaacggtgaggttgaaagtctcgtcgactgccgtgaggacccagcacaccactacccggcctgttcccgataccagccgactgccgggagccactcctggactgaccactgtcgaaattgtgaccatgtcccatcaggccttgggcgatgtcgccgggagaggaaatgagaagaagccgtcgtcggtgcgcgccctgtccatcgtcctgccgatcgtgcttctcgttttcctgtgcctgggcgtctttctcctctggaagaattggcgcctcaagaacattaactcgatcaacttcgacaaccctgtgtaccagaaaacgacggaggatgaagtgcacatctgccacaaccaggacgggtactcgtacccatcccgacagatggtgtccctcgaagatgacgtggct

SEQ ID NO: 11392 - DNA, 2580 bp, Artificial Sequence
  derived and/or modified sequence
atgggaccatgggggtggaaacttcgatggaccgtggcactcctgctggccgccgcggggaccgcggtgggagacaggtgcgagcgaaacgagtttcagtgccaggacggcaagtgtatctcctacaagtgggtctgcgacggctcggcagaatgtcaagacgggtcagatgagtcccaggaaacctgcctgtccgtgacttgcaagagcggagacttctcctgcggagggcgggtcaaccgctgcattccgcagttctggaggtgcgatggacaagtggactgtgacaacggatctgacgagcaggggtgcccgccgaaaacctgctcccaagatgaatttcgctgccatgacggtaagtgcatctccaggcaatttgtgtgtgactccgaccgggactgcctggacggatcggacgaagcctcctgcccagtgctgacttgtggcccggcgagcttccaatgcaattcgtcgacctgcatcccgcagttgtgggcttgcgacaacgacccagactgcgaggatggatccgacgaatggcctcagagatgcagaggactctacgtgtttcagggagacagctcgccgtgctcggcattcgagtttcactgcctgtcgggagagtgcatccactcgtcatggagatgcgacggcggacctgattgcaaggacaagtcggatgaggagaattgcgccgtggccacctgtcggccagatgaatttcagtgttcggacggaaattgcatccacggctcgcgccagtgcgaccgcgagtacgattgcaaagacatgagcgatgaagtgggatgtgttaacgtgaccctgtgcgagggtccgaacaagttcaagtgccattcaggggaatgtatcacgctggataaggtgtgtaacatggctagggactgtcgggattggagcgatgaacccatcaaggaatgcggaactaacgaatgccttgataacaacggcggctgtagccacgtctgcaacgatctgaagatcggagctgagtgcctctgcccggacggttttcagctggtggcacaacgccggtgcgaggacatcgatgaatgtcaggaccctgacacttgctcacagctgtgtgtgaacctggaaggcggttacaaatgccagtgtgaagaggggttccagctcgatccacacacgaaggcctgcaaggccgtgggctccattgcctacttgtttttcaccaatcgccacgaggttagaaagatgactctcgacagatccgagtacacttccttgatccctaatctccggaacgtggtggccctcgataccgaggtggcgagcaaccgtatctactggtccgacctctcacaacgcatgatctgctcaacccagctcgaccgggcgcatggagtgtcatcatacgacaccgtcatctcaagggacatccaagctccagatggactggcggtcgactggatccactcgaatatctactggaccgattcagtgcttggcacggtcagcgtggcggataccaagggggtgaagcggaaaactctcttcagagaaaacggaagtaaacctcgggccatcgtggtggacccggtgcatggatttatgtactggaccgactggggaacgccggccaaaatcaaaaaggggggcctgaacggagtcgatatctattcactggtgaccgagaatatccagtggcctaacggcataaccctcgatctgctgtcaggacgcctgtattgggttgattcaaagttgcactccatttcgtccatcgatgtgaacggaggtaataggaaaaccattctggaagatgaaaaaaggcttgctcacccgttttcattggccgtgtttgaggacaaggtgttctggactgacataatcaacgaagcaatcttttccgctaatcggctgaccggaagcgacgtcaatcttctggcggaaaacctgctgagcccggaggacatggtcctgttccacaaccttacccagccgcgcggagtcaactggtgcgaacggactactctgtccaatggaggatgccaatacctttgcttgccggcaccgcaaatcaacccccacagcccaaaattcacctgcgcgtgcccagacggaatgctgctggcaagagatatgcgctcctgtctgaccgaggctgaagccgcggtggcaactcaggagactagcaccgtgcggcttaaggtgtcctccaccgcagtgagaacccagcacaccaccactcgccctgtgccggatacctcgcggcttccaggagctactccaggcctcacgacggtggagatcgtgaccatgtcgcatcaagccctgggagacgtcgccggaagaggaaatgagaagaaaccgagctccgtgagagccctgagcatcgtgctgccgattgtcctcctggtctttctttgccttggcgtctttctcctctggaagaactggcggctgaagaacatcaactccatcaactttgataatccggtctaccaaaagactaccgaggacgaagtgcacatttgccacaaccaagacggttactcctacccgtcccggcaaatggtttcgctggaagatgatgttgca

SEQ ID NO: 11393 - DNA, 2580 bp, Artificial Sequence
  derived and/or modified sequence
atgggaccctgggggtggaagctgcgatggacggtggccttgctgcttgccgcagccggcactgccgttggcgacaggtgcgagagaaacgagttccagtgtcaggacggcaagtgcatttcctacaagtgggtgtgcgatggttccgctgagtgccaggatggctcggatgagagtcaggaaacttgtcttagtgtaacttgtaagtctggcgacttttcctgcggaggccgagtgaatcgctgcattccccagttttggcggtgcgatggccaggttgattgtgacaacggatccgacgagcagggctgtcccccaaagacctgctcacaggacgagttccgatgtcacgacggcaaatgtatatccaggcagtttgtgtgcgactcagaccgggattgtctggacggctccgacgaagcgtcctgccccgtgctgacctgcggccccgccagctttcagtgcaattcctccacctgtattccacagttatgggcctgcgataatgatccggactgcgaggatggttcggacgaatggcctcagaggtgcaggggactgtatgtgttccagggcgatagctctccctgtagtgcatttgagtttcactgcttaagcggggagtgtatccacagttcctggcgctgcgatgggggtcctgactgtaaagataaatctgatgaggagaattgcgccgtcgctacctgccgcccagacgagttccagtgcagtgatggaaattgtatccacgggtctaggcagtgcgaccgagagtacgactgcaaagatatgagcgatgaggtgggctgtgtgaacgtgacactgtgcgaaggacccaacaagtttaagtgccattccggagaatgcatcaccctggataaagtatgcaacatggctagggattgtcgcgactggtcggatgagcccattaaagaatgcggtacgaacgagtgtttagataacaacggaggctgtagtcacgtgtgtaacgacctgaagataggggccgaatgcctctgccctgacggtttccagctggtcgctcagaggaggtgtgaagatatcgacgaatgtcaggatcccgacacatgttcccagttatgcgtgaacctcgagggaggatataagtgtcagtgcgaagaggggtttcagttagatccccataccaaagcgtgcaaggctgtaggaagcattgcttatctgttctttaccaatagacatgaagtcaggaagatgacgcttgacagatctgaatatacctctctgatccccaacctcaggaacgtcgtggctctcgatacagaggttgcatctaacaggatctactggagcgacctgtcccagcgcatgatctgtagtacgcaactggaccgtgcgcatggagtgtccagctacgacactgtcatcagccgcgacatccaagcccccgatggattggcagttgactggatccattccaacatctactggactgattccgtgctgggcactgtgagcgttgcagataccaagggtgttaagcgtaagaccctgtttcgtgaaaacggtagcaagccgcgggccatcgtagtggaccctgtacacggctttatgtattggacagattggggaaccccagccaagataaaaaaaggtgggttgaacggtgttgacatttatagcctggttacggagaatatccagtggccaaacgggatcacccttgacctgctgtccggccgcctatactgggtggattccaagctccactcaatttcttccatcgacgttaacggaggcaaccgtaaaaccattctggaggacgagaaaagattagcccaccctttcagcctcgctgtgtttgaggataaggtgttctggaccgacattattaatgaagccatcttttcggccaatagactcacaggtagcgacgtgaaccttctggctgagaaccttctaagccctgaagatatggttcttttccataacctgacccagcctagaggtgtaaattggtgcgagaggactactctctctaatggtggctgtcagtatctatgcctacctgcaccacagatcaatccccattccccaaaatttacctgcgcatgcccggatggaatgctgcttgcacgcgacatgcggtcatgcctgacggaggctgaggccgccgtggccacacaggagacaagcaccgtgaggctgaaagtgagctcgactgcagtcaggacccaacacaccactacccgcccagtacctgatacctccagactgccaggtgctactccgggtcttacaaccgtcgagattgtgacaatgtcccatcaggccttgggtgacgttgcgggcaggggaaacgaaaagaagccttccagcgtgagagcgctgtccatcgtgctgcccatcgtactcctggtgtttctgtgtctaggagtgttcctcttatggaaaaactggcgattgaagaatataaatagtatcaattttgataacccggtgtaccaaaaaacaaccgaagacgaagtccatatttgccataaccaggacggctatagctatcctagtaggcagatggtcagcttggaggatgatgttgct

SEQ ID NO: 11394 - DNA, 2580 bp, Artificial Sequence
  derived and/or modified sequence
atggggccctggggttggaagctccgatggaccgtcgctctgctgctggcagccgctggcaccgccgtgggtgaccgctgtgaaaggaatgagttccagtgccaagatggaaagtgcatcagttacaagtgggtctgtgatggctcggccgagtgtcaagacggcagcgatgagagccaagagacttgcttatcagttacatgcaagtccggagacttcagttgcggcggcagagtcaatcggtgcattcctcagttctggaggtgtgacgggcaggtggactgcgataacggctctgatgagcaggggtgtccgccaaagacctgttcgcaggacgaattcaggtgtcacgatggtaaatgcatcagccgacagtttgtctgtgactctgacagggactgtctggatggcagcgacgaggccagttgtcccgtactgacctgtgggccagccagcttccagtgcaacagtagcacctgtatcccacagttgtgggcctgtgacaacgaccccgactgcgaagacgggagtgacgaatggcctcagcgctgtagaggcctttacgtatttcagggcgatagcagcccatgttcagcttttgagttccactgcttgtcaggcgagtgcatccactcctcatggagatgtgatggtggaccagactgcaaggataaatcggacgaggaaaattgtgctgtcgcaacctgcaggccggacgagttccagtgctccgacgggaactgtatacacggctctcggcagtgcgacagagagtatgattgcaaagatatgtccgatgaagtaggctgtgtaaatgtaaccttgtgcgaggggccaaacaagtttaagtgccactctggtgagtgcatcactctagacaaagtgtgtaatatggctagagactgcagggattggtctgatgaacccatcaaagagtgtgggacaaatgaatgcctggacaacaatggcggctgcagccatgtgtgcaatgacttgaagattggtgccgagtgtttatgcccggatgggtttcagctcgtggcccagcgtcgttgcgaagacatcgatgagtgtcaggatcccgacacatgtagccagctatgcgtaaacctggaagggggctacaagtgtcagtgcgaggaggggttccaacttgatccacacaccaaagcatgcaaggccgtgggatcaattgcctacttgtttttcaccaaccggcacgaggtgcggaagatgacactggatcggtctgaatatacctcactgatacctaatctaaggaacgtggtggcgctggacactgaagtggccagcaaccggatctactggtcagacctcagccagagaatgatatgtagcacccagctagacagggcacacggagtttcttcatatgacactgtaatttcccgggacattcaggccccagatggcctggcggtggactggatccacagtaacatatactggaccgatagtgtgctaggaaccgtttccgtggccgatactaaaggagtgaaaaggaagactttgttccgggaaaatggaagcaagccgcgagcgattgtggttgacccagttcacggcttcatgtattggaccgattggggcaccccggccaagatcaagaagggaggcttgaacggcgttgatatctacagtttggtgaccgagaatatacagtggcctaacggaatcacactggacctcctcagcggcagactgtattgggttgatagcaagctacattctatctcaagtatcgacgtcaacgggggcaaccggaaaacaatcttggaggacgagaagcggctcgcccaccctttttcactagccgtctttgaagacaaggtgttttggactgatatcattaacgaggccatattttccgcgaatcggctgactggcagtgatgtgaatctgctcgcggagaacctgctgagccctgaagacatggttctatttcataacctcacacaaccccgaggggtcaactggtgcgagaggacaacactgagcaacggcggatgtcagtacctgtgcctgccagctccccagatcaaccctcactcgccgaaattcacctgcgcttgcccagatgggatgctcctcgctagggatatgaggtcctgtctgactgaagcagaagccgctgttgccacacaagaaacctctactgtcagactgaaggtttccagcaccgccgtccggactcagcacactacaactcgtccagttccagacacgtcccgcttaccaggagcaaccccgggcctgaccacggttgaaattgtgactatgagccatcaggccttgggggatgtagctggacgcgggaatgaaaaaaaaccatcttccgtgcgggctttatctatcgtgctacctatcgtgctcctggtgtttctctgtctgggagtctttctcctctggaagaattggagattgaaaaatatcaattcaatcaattttgataaccctgtctaccagaagacaactgaggacgaagtccacatctgtcacaatcaggacggctactcctatcctagcagacagatggtcagcctagaggatgacgtcgcc

SEQ ID NO: 11395 - DNA, 2580 bp, Artificial Sequence
  derived and/or modified sequence
atgggaccatggggttggaaattgaggtggaccgttgccctactgcttgctgccgcgggaactgccgtgggagatcgctgtgaaaggaacgagttccagtgtcaggacgggaagtgcatctcctacaagtgggtgtgtgatgggagcgctgaatgtcaagacggctccgatgaaagccaggaaacgtgccttagtgtgacatgcaaatctggcgacttcagctgtggggggagagtgaatagatgtataccacagttttggaggtgcgacggccaggtggattgtgacaacgggtccgacgagcagggttgcccgcctaagacgtgttctcaggacgagtttcgttgtcatgacggaaaatgtattagccgtcaatttgtctgtgacagtgaccgggactgccttgatgggtccgatgaggcaagctgcccggttttgacttgtgggcccgcctctttccagtgcaactcgtccacatgtattcctcaactttgggcctgcgataatgacccggactgcgaagacggaagcgacgagtggcctcagcgatgtcgggggttatatgttttccagggcgatagctcaccttgtagcgccttcgagttccattgtctcagcggagaatgtattcactccagttggagatgtgacggagggcccgactgtaaggacaagagcgacgaggaaaactgcgctgtggcaacatgcagacccgatgagtttcagtgtagcgacggtaactgtatccacggttccagacagtgcgatcgcgaatatgactgcaaggacatgagtgatgaagtcgggtgcgtgaacgtgacgttgtgtgagggcccaaataagtttaaatgtcactccggagagtgtatcacacttgacaaagtatgcaatatggcacgggactgtagagattggtctgatgaacccatcaaggagtgtggaactaacgaatgcctggataataacgggggctgttctcacgtttgcaacgatctaaagattggcgcagaatgcctatgccctgacggattccaactggtggcacaacggcgctgtgaagatatagacgagtgccaggatccagacacctgcagccagctgtgcgtgaacctcgagggtgggtacaagtgtcaatgtgaagaggggttccagctggacccccatacaaaggcttgcaaagccgtcggctctatcgcctatctctttttcaccaacaggcacgaagtgagaaaaatgacgctggatcgctcagaatacacgtccctcattcctaacctgcgaaatgttgtggcactcgatacggaggttgcgtcaaataggatttattggtcagacctgtcccagaggatgatctgtagcactcagcttgatcgggcccacggagtaagttcttatgatacagtgatcagccgggacatccaagctccagatgggcttgccgttgactggatccattccaatatctactggacggattcagtgttgggaaccgtgtctgttgcagacacaaaaggtgtgaagaggaaaaccttgttcagggaaaacggctcgaagcctcgagccatcgttgtggaccccgtccatggttttatgtactggaccgattggggcacacctgccaagatcaagaaaggaggactcaacggagtagacatctattccctcgtgaccgaaaacattcagtggccgaatggcatcaccctggatctgctctccggccgcctgtactgggtggattccaaactgcattcaatttcttccattgacgtcaacggtgggaaccgaaaaactatcctcgaggacgagaaacggctggcccatcctttctccctagctgtgtttgaggacaaagtgttctggaccgacatcattaacgaagcaatattttctgccaatcgcctgaccggttccgacgtgaatcttttggcagaaaatctgctgagcccagaggacatggtgttgttccataacctcacacagcctaggggcgttaactggtgtgagcgcaccactctgtccaatggcggctgccaatatttatgtcttcctgccccacagatcaacccacactctccgaaattcacctgtgcttgtccagacggaatgctcctcgctagggatatgagatcctgtctgacagaggcagaggccgcggttgccacacaggagacatctaccgtacgtttgaaagtcagcagcacagcagtgcggacacagcacacaaccacccgacctgtgcccgacaccagtaggttacccggagctactccgggcctaaccactgttgagattgtaaccatgtctcatcaggccctcggcgatgtcgctgggagagggaatgagaaaaaaccaagcagtgttcgggccctatcaatcgtcctgccaatcgtgctgctggtttttctatgtcttggagtgttcctcttatggaagaactggcggcttaaaaatattaacagtatcaatttcgacaacccggtgtaccaaaagacaacagaagatgaggtgcacatttgtcataatcaagatggatactcgtacccaagcaggcagatggtatcgcttgaggatgatgtggcc

SEQ ID NO: 11396 - DNA, 2580 bp, Artificial Sequence
  derived and/or modified sequence
atggggccgtggggatggaaactcaggtggacggtcgcccttctgttggcggcagcgggaactgccgtgggtgacaggtgtgaacgcaatgagttccagtgccaagatggaaagtgcatctcttataagtgggtctgcgacggctcggcagagtgtcaagacggatcggacgagtcgcaagaaacgtgtctgtcagtcacctgtaagtccggagacttcagctgtggaggcagggtgaatcgctgtatcccccagttctggcgatgcgacggccaagtggactgcgacaacggaagcgacgaacagggctgcccacctaagacctgtagccaggatgagttccgctgtcacgatggaaaatgtatctcacggcagttcgtctgcgacagcgatcgggattgtctcgatggttcggacgaggcgtcctgccccgtcctgacctgcgggccggcatcgttccagtgcaactcaagcacctgcatccctcaactttgggcatgtgataatgacccggactgcgaagatggctcagatgagtggccgcaacgttgccggggcttgtacgtgttccagggagactcgagcccctgctcagcgttcgaatttcactgcctgtccggcgagtgcattcatagctcatggagatgcgacggcggacctgactgcaaggataaatcggacgaagaaaattgcgcagtggccacctgccgcccagatgaatttcagtgctccgacggcaattgcattcatggatcgcgccagtgcgatcgggagtacgactgtaaagacatgtcagacgaggtgggatgcgtgaacgtgaccctgtgcgaaggccctaataagttcaagtgccattcgggtgaatgcatcactctcgataaggtctgtaacatggcccgcgactgtcgcgattggagcgatgaaccgatcaaggaatgcggtactaacgaatgcctggacaataatgggggctgctcccacgtgtgcaacgacctgaagatcggagccgagtgcctttgcccggacggatttcaacttgtggcacagagaaggtgcgaggacatcgacgagtgccaagatccggacacttgttcccagctgtgtgtcaacctggagggcggttacaaatgtcaatgcgaggagggcttccaactggatccacataccaaggcgtgcaaagccgtcggaagcattgcgtaccttttctttacgaaccggcatgaagtgcgcaagatgactcttgatcggtccgagtacacctccctgatcccaaacctgcggaacgtcgtggccctggacactgaagtcgcaagcaatcgcatctactggtccgacctgtcgcaacggatgatatgctccacccaattggacagagcgcacggggtatccagctacgacaccgttatttcgcgcgatattcaggcaccggacggactggccgtggactggatccactcgaacatctactggactgactcagtcctcggtactgtgtcagtggccgatactaaaggagtcaagcgcaaaacgctctttcgtgagaatggaagcaagccgcgcgcgattgtggtggaccccgtccacggatttatgtactggaccgattggggaaccccggccaagataaagaaaggcgggctgaacggcgtggacatctacagcctggtgaccgagaatatccaatggcctaacggaattaccctggaccttctgtcgggaagattgtactgggtggactcaaagctgcactctatctcatcgatcgacgtgaacggaggtaaccgcaagaccatcctggaagatgaaaagcgactggcacacccgttcagcctcgcggtgttcgaagataaggtgttttggaccgacatcatcaacgaagcaattttcagtgcgaatcgcctgactggttctgacgtgaacctcttggcggaaaacctcctgtccccggaagatatggtgctgttccacaacctcactcagccgagaggagtgaactggtgtgagagaaccaccctgtcaaacggaggatgtcagtacctttgcctgccagcccctcagatcaacccccattccccaaagtttacgtgtgcttgtcctgatggaatgctgctcgcccgggatatgcggagctgcctgaccgaggccgaagcagccgtcgcgactcaggaaacgtcaactgtgcgcctgaaggtttcgtcgactgccgtgcggacccagcacactactacccgcccggtgccggatacctccaggctgccgggagctaccccaggcctgactaccgtggaaattgtcactatgtcccaccaagccctgggagacgtggcggggaggggcaatgagaaaaagccttcgtccgtgcgggccctgtcgatcgtgctgccaatcgtgctgctggtgttcctgtgcttgggagtctttctcctgtggaagaattggcggctgaagaacattaacagcatcaattttgacaacccggtgtaccagaaaactactgaggatgaggtgcatatctgccacaatcaagacggatactcgtacccctcccgccagatggtgtcgctggaggacgatgtggct

SEQ ID NO: 11397 - DNA, 2580 bp, Artificial Sequence
  derived and/or modified sequence
atgggaccgtggggatggaagttgcgttggactgtcgccctcctgttggctgccgccggtactgccgtcggtgaccgctgcgagcgaaacgagttccagtgccaggatggtaagtgcatcagctacaagtgggtttgtgatggaagcgcggagtgtcaggatggatctgatgagtctcaggagacctgcttgtccgtcacctgcaagtccggtgacttctcctgcggtggccgtgtgaaccggtgcatcccgcagttctggcgttgcgatggtcaggtggactgcgacaacggttccgacgagcagggatgcccgcccaagacgtgctcacaggacgagttccgctgccacgacggcaaatgtatcagccgtcagttcgtgtgcgactctgatcgcgattgtttggacggctctgacgaggcttcgtgcccggttctcacgtgcgggcctgcctccttccaatgcaacagctctacctgtattccccagttgtgggcctgcgacaatgaccccgattgcgaggacggtagtgacgagtggccccaacgctgtcgaggtctctatgtcttccagggcgattccagcccttgctccgccttcgagtttcattgtctcagcggtgagtgcattcacagctcctggcgttgtgacggtggtcccgactgcaaggataagtctgatgaggaaaactgcgccgtcgcgacatgcagaccagacgaatttcaatgctcggatggtaactgcatccacggttcccgccaatgtgaccgcgagtacgactgcaaggatatgagtgacgaggttggctgcgtgaacgttacactctgtgagggtcctaataaattcaagtgtcactccggcgaatgcatcaccttggacaaggtctgtaacatggcgagggattgcagggactggagcgatgagcccattaaggagtgcggcaccaacgagtgtctcgataacaacggtggctgctctcacgtctgcaacgacctcaagatcggtgcagagtgcctgtgcccggatggtttccagctcgtcgcccagcgccgatgcgaggatatcgatgagtgccaagatcccgatacttgctctcagctctgcgttaatctagaaggtggttacaagtgtcagtgcgaggaaggtttccagctggacccccacacgaaggcttgcaaagcggttggttcaatcgcttaccttttcttcaccaatcgccacgaggtaagaaagatgacattggatagatccgagtataccagcctcatcccgaatctgaggaacgtcgtggctcttgataccgaagttgctagtaaccggatttactggtctgacctcagtcagcggatgatctgcagcacccagctggacagagcccatggtgtcagcagctacgacactgtcatttctcgtgacatccaggcccctgatggacttgccgtcgattggatccactcgaatatctactggaccgattccgttctgggcaccgtcagtgtcgcggacacaaagggagttaagagaaagactcttttccgtgagaacgggtccaagccccgagccatcgtggtcgatccggtccacggctttatgtattggaccgattggggaacccctgctaagatcaagaagggcgggctgaacggcgtcgatatctattctctcgtcaccgagaacatccaatggcccaacggtatcactcttgacttactttcgggtcgtctctactgggttgattctaagctgcattctatctccagcattgacgttaacggtggtaatcggaagactatcctggaggatgagaaacgtctcgcccatcctttctccctggcagtgtttgaagacaaggtgttttggacggacatcatcaacgaagcaattttctcggctaatcgtctgaccggctctgacgtcaaccttctcgccgaaaatctcctgtcgcccgaggatatggtgttgttccacaacctcacccagcctcgaggagttaactggtgcgagagaacgacgttgtctaatggtgggtgccagtacctctgccttcctgcccctcagatcaacccgcactccccgaagttcacctgtgcttgtcctgatggtatgctgctcgcccgagatatgcgttcctgcttgacagaggccgaggctgcggtcgcgactcaggagacctccaccgtaagactgaaggtctccagtacagccgtccgcacccagcacaccactacccgtccggtccctgatacttcccgcctacctggggcaacgcctggactgacaaccgttgagatcgtcactatgtcccatcaggcccttggagacgtcgctggaagaggcaacgagaagaagccgtcctcagtgcgcgccctaagcatcgtgttgcctatcgtcttgctcgtgttcttgtgcctcggggtgtttcttctgtggaagaactggcgcctgaagaacattaactcaattaacttcgataatcccgtctatcaaaagaccaccgaggacgaggttcacatctgtcataaccaggatggttacagttatccgagtcgccagatggtctcgttggaagacgacgtcgcg

SEQ ID NO: 11398 - DNA, 2580 bp, Artificial Sequence
  derived and/or modified sequence
atgggtccctggggctggaagctgcggtggacggtagcactcctcctggccgcagcaggaaccgcagtgggcgaccggtgcgaacggaacgagtttcagtgtcaagatggaaaatgcatttcgtacaaatgggtctgcgacgggtcggcggagtgccaggacggatctgatgaatcacaggagacttgtctttccgtcacttgcaagtccggagatttctcgtgcggaggacgcgttaatagatgtatcccccaattttggcgttgcgatggacaggtggactgcgacaatggctcagatgaacaggggtgtcctccaaagacttgttcacaagatgaattccgctgccatgatggcaagtgcatctcaaggcagttcgtgtgcgattcggatagagactgcctggacggaagcgatgaggcttcgtgcccggtgctgacttgtggcccagcctcgttccagtgcaattcgtccacttgtatccctcaattgtgggcgtgcgataatgatccagactgcgaggacggctccgatgagtggccccaacgctgcagaggactctacgtgttccagggagactctagcccgtgctccgccttcgaatttcattgcctcagcggagaatgcattcattcgagctggcggtgcgacggaggccctgattgcaaggacaaatccgacgaggaaaactgcgctgtggccacttgccgcccggacgagtttcaatgctcagacgggaactgcatccatgggtcgcggcagtgcgatcgcgaatacgactgtaaggatatgtccgatgaagtgggatgcgtgaatgtcaccctgtgcgaaggaccgaacaaattcaagtgccactccggagagtgcataaccttggataaagtatgcaacatggctcgggactgcagggactggtccgacgaacccatcaaggaatgtggaactaacgaatgtctggacaataacggaggatgcagccacgtctgtaacgatctgaagatcggcgctgagtgcctgtgtccggatgggttccagcttgtagcccaaaggcggtgcgaggacatcgacgaatgccaagaccctgacacctgttcccagctttgcgtcaacctggaaggaggatacaagtgtcaatgcgaggaaggattccagctggacccacacaccaaggcatgtaaagccgtgggaagtatcgcgtacctgttcttcaccaaccggcacgaagttcggaagatgaccttggacaggagcgaatacacttccctgatcccaaacctgcgcaatgtggtggccctggatactgaggttgcctcgaataggatttactggtccgatctgtctcagcgcatgatctgtagcacccagttggaccgggctcatggcgtgtcatcctacgacactgtcatatctcgcgacatccaagcgccggacggactggcggtggattggatccactcgaatatctactggaccgactccgtgcttgggacggtttcagtggccgacaccaaaggtgtgaagcgcaagaccctctttagagaaaacggctcgaagccacgcgctatcgtcgtcgacccggttcatggcttcatgtactggacggactggggtactcccgcgaagatcaagaaggggggcctgaatggagtggatatctatagccttgtgactgaaaacatccaatggccgaacggaataacgctggacctgctgtcgggccgtctctactgggtcgactcaaagctgcacagcatctcgtcaattgatgtcaatggaggtaatcgcaaaaccatcctcgaggacgagaaacggctggcccacccattttccctggccgtgtttgaggataaggtgttttggaccgacattatcaacgaagcgatcttttccgccaatcgactcactgggtcggacgtgaaccttctggccgagaaccttctctcaccggaggacatggtgctgttccacaatctcacccagccgagaggtgtgaactggtgtgaacgtaccactctgtcgaacggcggatgccaatacctttgcctgccggctccacagatcaacccgcactctccgaaattcacctgtgcatgcccagacggaatgctgttggcccgcgatatgaggtcttgtctgacggaggccgaggccgctgtggcaacccaggaaacttccaccgtcagattgaaggtgagctcaacggcagtccgaacccagcacactactacccggcccgtcccggatactagccgcctgccgggagccactcccggactgactacggtggaaatcgtcaccatgtcacatcaggcccttggagacgtggcaggtcgcggaaacgagaagaagccctcatccgtgagagccctgtcgatcgtgctcccgatcgtgttgcttgtgttcctctgcctcggcgtgttcctgttgtggaagaactggcggctgaagaacatcaactcgattaactttgataaccctgtctaccagaaaaccactgaggacgaggtccacatctgtcacaatcaggacggttatagctacccgtcccgccaaatggtttccttggaagatgatgtggcg

SEQ ID NO: 11399 - DNA, 2580 bp, Artificial Sequence
  derived and/or modified sequence
atggggccgtgggggtggaaacttcgatggaccgttgcactgctgttggcggctgcggggactgcggtcggggatcggtgtgagagaaacgaattccaatgccaggacggaaagtgcatctcgtacaagtgggtctgcgacggatccgccgaatgccaggatggctccgatgagagtcaggaaacttgcctgtcggtgacttgcaagagcggggacttttcttgtggaggacgcgtgaaccgatgtatcccacaattctggcggtgcgatggtcaagttgactgcgacaatggatccgacgaacagggatgccctcctaagacgtgctcacaagatgaatttcggtgccacgatggcaagtgtatctcgcgccagttcgtgtgtgatagcgatcgggactgcctcgacggctccgacgaggcttcatgcccggtgctgacctgcggaccggcctcgttccagtgcaattcctccacgtgcatcccgcaattgtgggcgtgtgacaatgatcccgattgcgaggacgggtcagatgaatggccgcaacgctgccggggactgtacgtgttccagggggattcctcgccgtgtagcgcattcgagttccattgcctctcaggcgaatgcatccactcgagctggagatgcgacggtggaccggactgtaaggataagtcggacgaggaaaactgtgctgtggccacgtgccgccctgatgagttccagtgctcagacggcaattgcatccatggatccaggcaatgtgacagggagtacgattgcaaggacatgtcggacgaagtcggctgcgtgaacgtgactctttgcgagggacctaataagtttaagtgccactcgggagagtgcatcaccctcgacaaggtgtgcaatatggcgcgcgactgccgggactggtcagacgagccaatcaaggaatgtggcactaatgaatgcctcgacaacaatggaggatgttcgcacgtttgcaatgatctcaaaatcggcgctgaatgtttgtgcccagacggttttcagttggtggcgcagcgccgatgcgaagacatcgatgaatgccaagacccggatacttgctcacagctctgtgtgaatttggaaggaggctacaagtgccaatgcgaggaaggattccaactggatccgcataccaaagcctgcaaggccgtgggatcaatcgcatatctgttcttcaccaaccggcacgaagtgcgcaagatgaccctggaccgctccgaatacacctccctcatccctaacctccgcaatgtcgtggccctggacaccgaagtggcctccaaccggatctattggtccgatctgtcccagcggatgatctgtagcacccagttggatagggctcacggagtgtcgtcttacgacaccgtcatctcgcgcgatatccaggcgccggatggactggcggtggactggatccatagcaacatctactggaccgattcggtgctcggtactgtgtcagtggccgatactaagggagtaaagcgcaagaccttgtttcgcgaaaacggatccaaaccgcgggccatcgtcgtggaccctgtgcatggctttatgtactggactgattggggtacgccggccaaaatcaagaagggtggcctgaacggcgtggacatatactcgttggtgaccgaaaacatccagtggcctaacggcattactctggatctcctctcgggcaggctgtactgggtggattcgaaactgcactcgatctcatccatcgacgtgaacggaggaaacagaaagaccatccttgaagacgagaaacgcctcgcccacccgttttccctcgcagtgtttgaggataaagtcttttggaccgacatcatcaacgaagccatcttctccgcaaatcggctgactgggtcggacgtgaacctgctcgccgagaacctgctgtcgccggaagatatggtgctcttccacaacctcacccaaccgagaggcgtgaactggtgcgaacggaccactctctcgaatggcggatgccagtacctttgtctgccggcccctcagatcaatccccacagcccaaaattcacctgcgcctgcccggacggaatgcttcttgcgagagatatgcgcagctgcttgacggaagcggaggctgcggtcgccactcaagaaacttcgaccgtgcggttgaaggtgagctccactgccgtccgcacgcagcacaccactactcggccagtgcccgacacttctcgtttgccaggcgcgactcccggcctgactacggttgagatcgtgactatgtcccaccaagccctgggagacgtggcaggaagaggaaacgaaaagaaaccatcctccgtgcgggcgctctccatcgtcctgcctatcgtgctgctggtttttctgtgcctgggagtgttcctgctgtggaagaattggagactcaagaacatcaattcgatcaatttcgacaaccccgtgtaccaaaagactaccgaagacgaggtgcacatctgccacaaccaggatggctactcgtacccttccagacaaatggtttcactcgaggatgacgttgcg

SEQ ID NO: 11400 - DNA, 2580 bp, Artificial Sequence
  derived and/or modified sequence
atgggcccttgggggtggaagctccgatggactgtggcattactgctggctgccgctgggaccgctgtgggcgatcgatgtgagagaaatgaatttcagtgccaagacggcaagtgcattagttacaaatgggtatgcgacggttccgcagaatgtcaggatggctctgacgagagtcaagagacctgtctgtcagtgacttgtaagtctggagatttctcctgcggaggtagagttaacaggtgcattccgcagttctggcgatgtgacggccaggttgactgcgacaatggatccgacgagcagggctgtcccccaaagacctgtagccaggatgaatttcgctgccatgatggaaaatgtattagccgccagtttgtttgcgacagcgatcgtgattgtctggatggctccgatgaagcaagctgccctgtgttgacatgcggcccggcttccttccagtgcaactcctcaacctgtattccccagctatgggcgtgcgataatgatccagattgtgaggatgggtccgacgagtggcctcaacgctgccgagggctgtatgtcttccagggcgactcttccccctgttctgcttttgagtttcactgtctgtctggagagtgcatacatagctcttggcgttgtgacgggggcccggactgtaaggataagagcgatgaggagaattgtgctgttgctacctgtcgcccagacgagttccaatgcagcgacggaaactgcattcacgggtcgcgccagtgtgacagagaatacgactgcaaggacatgtcggatgaagtgggatgcgtgaatgtgaccctttgtgaaggccctaacaagttcaaatgtcactcgggcgaatgcattactttggacaaagtgtgcaatatggctagagactgccgggattggtccgacgaaccgattaaggagtgcggaaccaatgagtgcctcgacaataacggcggttgctcccacgtctgtaatgatcttaagataggagcagagtgtttatgccccgacggatttcagttggtggcacagcgtagatgcgaggacatcgacgagtgtcaggaccctgacacttgctctcaactgtgcgtcaacttagaaggtggttacaaatgccagtgtgaagaaggatttcagctcgatcctcataccaaggcttgtaaggccgtgggatccattgcttatctgttctttaccaacagacacgaagtgcgtaagatgacactggatcgctctgaatacactagcttgatccctaatctgcgcaacgtggtggctctcgacactgaggtggccagcaaccgcatctattggagtgacctgagccagagaatgatctgctcgactcagctcgatcgtgcccatggagttagctcttatgacacagtcatctcacgggatatacaagccccggacgggctcgcagttgattggatccactcaaacatctactggaccgattcagtgttgggaacagtgtccgtggccgataccaagggagttaaacggaaaaccctgtttagggagaatggctcgaagcccagggcgatagtcgtggaccccgttcacgggttcatgtactggaccgattggggcacacccgctaaaattaagaagggtggcctcaatggcgtggacatttacagtctggtgacagagaacatacagtggcccaacggaatcactctggacttactcagtggcaggctttactgggtcgattccaaattgcattccatatcaagcattgatgtgaacggaggcaaccgcaagaccatactagaagatgagaaacggctggcacaccctttttctctcgcagtgttcgaggacaaagtattctggaccgatataattaacgaggcaatcttttccgccaacagactgacgggatcggatgttaacttgttggcggaaaacctgctgtccccggaggatatggtgctatttcacaacctgacacagcctcgcggcgtcaattggtgcgaacggacaaccctttcaaatggtggatgccagtatctctgcctgcccgctccacaaatcaacccccactcaccgaaatttacttgcgcatgcccagacggaatgttactggccagggacatgagaagctgtctgacagaggctgaggctgctgtcgcgacacaggagacctccaccgttcgcctcaaggtaagctctacagcggtgcgcactcagcatacaacaactcgaccagtgcccgatacctcgcgattgcccggcgctacccctggcttaacaactgtagagatcgtgacaatgtcccaccaggctttgggcgatgtcgctgggcggggcaacgagaaaaaaccttcttctgtccgagctctctcaattgtattgcctattgtgctgctggtgttcttgtgtctcggggtcttcctgctgtggaaaaactggaggctgaaaaacataaactccattaatttcgataatcccgtctaccagaaaacaaccgaggatgaagtgcatatctgccacaatcaagacggctactcttacccctccaggcagatggtttctctggaggacgacgttgct

SEQ ID NO: 11401 - DNA, 2580 bp, Artificial Sequence
  derived and/or modified sequence
atggggccctggggatggaagctgaggtggactgtcgctctgcttcttgcggcagccgggacagcggtcggcgatcggtgtgagcgcaacgagttccagtgccaggatgggaagtgtattagctataagtgggtgtgtgacgggtccgccgagtgccaggacggcagcgatgaatcacaagagacgtgcctaagtgttacctgcaagagcggcgactttagctgtgggggtcgcgtgaaccggtgcataccacagttctggcggtgcgacggccaagttgattgtgacaatggcagtgatgaacagggatgccctccaaaaacatgtagccaggacgagtttcgatgccacgacggcaagtgcatttcgcgccagtttgtttgcgactcagaccgcgactgtctggatggcagtgacgaagccagctgccccgttctgacttgcggccccgcatcctttcaatgtaattccagtacttgtatccctcagctgtgggcgtgcgacaacgacccggattgcgaggatggaagcgatgaatggccccagcggtgtaggggcctctacgttttccagggagactcaagcccgtgtagtgcattcgagtttcactgccttagtggagaatgcatccacagtagttggagatgtgacgggggtcccgactgtaaggacaagtcagatgaagaaaattgtgctgtcgccacgtgccggccagacgagtttcagtgcagtgatgggaattgcatccacggaagcaggcaatgcgatagggaatatgattgtaaagatatgtctgacgaggtgggttgtgtaaatgtgactctttgcgaaggcccaaataagtttaaatgtcattcaggcgaatgtatcaccctggacaaggtctgtaacatggctcgcgactgtcgcgactggagcgacgagccaattaaggagtgtggtaccaatgaatgcctcgataataatggtgggtgttcccacgtctgcaatgatctgaagattggagcggagtgcctgtgcccagacggttttcagctggtggcccagcggagatgtgaagacatagatgagtgccaggatccagatacctgttcacaactctgtgtgaatctggagggggggtataagtgtcagtgcgaggaaggcttccagctggatccacacacaaaggcctgtaaggccgtgggctcgatagcctacctcttcttcaccaaccgtcatgaagtgagaaaaatgaccttggatcggagtgagtacacatcactcattccaaacctccgaaacgtggtggccctggatacggaggttgcttccaaccgcatttattggagcgacctaagccagcggatgatatgttcgacgcaactggatagagctcatggcgtaagctcttacgacacagtgatttccagggatatacaagcgccggacggattggccgtggactggatccactcaaatatctattggacagacagcgtgctgggcacagtgagcgttgcagacaccaaaggagtgaagagaaaaacattattccgcgagaacgggtcaaagcccagggcaattgtagtggatcctgttcatggattcatgtactggaccgactggggaacacctgcaaagataaagaagggtggtcttaacggagtggacatctactccttggtcacggagaacatccaatggcccaacggcattaccttggacctgctttctggacgcctgtattgggttgactcaaagctgcacagtatctcttcgattgacgtgaatgggggcaatcggaagacgattctggaagacgagaaacgtttggcacaccctttctcattagcggtgttcgaagacaaagttttctggacagacattatcaatgaggccatttttagcgcaaaccgacttactggctctgatgtaaacttgctggccgaaaacctccttagtcctgaagatatggtactgttccataatctgacccagccgagaggggtcaactggtgcgaacgcacaacattgtccaatggcggatgtcagtacctctgcctgccggccccccagattaatcctcactctccaaagttcacctgcgcttgccctgatggaatgcttctagctagggatatgcgatcctgtctcaccgaagccgaagctgctgtggccactcaagaaacgagcactgtccgtctgaaggtgagctctacagcagtgcgtacacagcacaccacaacccgccctgtgcccgacacgtcccggctaccgggagcaacaccagggttgaccactgtggaaattgtgaccatgtcccaccaggctctcggcgatgtggctgggcggggaaatgaaaagaagccctcttctgtacgggcgctgtccattgttctgcccattgtcctcctcgtgtttctgtgcctcggcgtgtttctgctctggaagaattggaggctaaagaacataaacagtattaattttgacaaccctgtctaccagaagaccaccgaggatgaggtccacatctgccataatcaggacggatattcataccccagccgacagatggtgtctctggaggacgacgtggct

SEQ ID NO: 11402 - DNA, 2580 bp, Artificial Sequence
  derived and/or modified sequence
atggggccgtggggttggaaactccggtggaccgtcgccctgctgctggccgcggcaggaactgccgtgggagacaggtgcgaacggaacgagttccaatgccaggacggaaagtgtatttcctacaagtgggtgtgcgacggatccgcagaatgccaagatggtagcgacgaaagccaggaaacgtgcctctccgttacctgcaagtcgggagatttctcatgtggagggcgagtgaatcggtgtatcccccaattttggagatgcgatggacaggtcgactgcgacaacggctccgatgagcaaggatgccctcccaaaacgtgctcgcaagatgagttccggtgccatgatggaaaatgcattagccgccagtttgtgtgcgacagcgaccgggactgcctggacggctcggacgaagcctcatgtcccgtgttgacctgtggcccggcgtccttccagtgcaactcgtcaacctgcatcccgcaactgtgggcctgcgacaacgacccggattgcgaggatgggagcgacgagtggccccagcgctgccgcggactctacgtgttccagggagacagctcgccgtgttcggccttcgaattccactgcctgtcgggcgaatgcatccacagctcctggaggtgcgatgggggaccagactgcaaggataaatccgacgaagagaactgcgccgtggccacctgtagaccagatgagttccaatgttcagacggtaactgcatccacggctcacgccaatgtgaccgcgaatacgattgcaaagacatgtcggatgaggtgggatgcgtcaatgtgactctgtgcgagggccctaacaaattcaaatgccattccggtgaatgcatcaccctggacaaggtgtgcaatatggcacgggactgtagggactggagcgacgaaccaatcaaggaatgcggaactaacgaatgtctcgataacaacggaggatgcagccacgtgtgtaacgatctgaagatcggcgcggagtgcttgtgtcctgatggattccaactggtggcccagagacgctgcgaggacattgacgaatgtcaggatccagatacctgctcccagctgtgcgtaaatctcgaggggggatataagtgccagtgcgaggaaggcttccagctcgatccgcatacgaaagcatgcaaggccgtgggaagcattgcctatctgttcttcaccaaccggcacgaagtgcgcaagatgaccctcgacaggagcgagtacacctccctgatcccgaacctgcggaacgtggtggcactcgatactgaagtcgccagcaaccgcatctactggagcgacctgtcccaacggatgatctgttccacccagctggatagagctcatggcgtctcgagctacgacactgtgatctcgcgcgacatacaggcccctgatggtttggccgttgattggatccactccaacatttactggaccgactcggtgctgggtaccgtgtcggttgccgatactaagggggtgaagcgcaagaccttgttcagagaaaacggaagtaaaccgcgcgccattgtggtggatccggtccacgggttcatgtactggactgactggggcacccccgcgaagatcaaaaaaggaggactgaatggagtggatatctacagcctcgtgactgagaatatccaatggcctaatggaatcaccctggatctcctctcaggacgcttgtactgggtggatagcaagctccactcgatctcgtcgatcgatgtcaatggaggaaaccgaaaaacgatccttgaagatgagaagagattggcgcatccattctctttggctgtgttcgaggacaaagtcttttggactgacatcatcaacgaagctatcttttcggcgaacagactcactgggtctgacgtgaatcttctggcggaaaacctcctctcaccagaggatatggtgctcttccacaatctgacccagcctcggggtgtgaattggtgtgaaaggacgactctgagcaacggtggatgtcagtacctctgtctccctgccccgcagatcaatccgcactcccccaaattcacttgcgcgtgccctgacggcatgctgctggcccgcgacatgcgctcctgcctcactgaagccgaagcagcggtcgcgacccaggagacttccaccgtgcgactcaaagtctcaagcaccgccgtgcgcactcaacacaccactactcggccggttcctgacacctcccgcctgccgggcgctaccccgggactgaccactgtggaaatcgtgacgatgtcccaccaggcgctgggagacgtggctggacgtggaaacgagaagaagccatcttccgtgagagcactgagcatcgtgctccccatcgtgctcctggtctttctgtgcctcggagtgtttctgctctggaagaactggagactgaagaacatcaacagcattaacttcgacaacccagtgtatcaaaagaccactgaagatgaagtccacatctgccacaatcaggatggatactcgtacccgtcacgccagatggtgtcactcgaggacgatgtggcc

SEQ ID NO: 11403 - DNA, 2580 bp, Artificial Sequence
  derived and/or modified sequence
atggggccgtggggctggaagcttcggtggacagtggcactgcttctggctgccgcaggaactgccgtgggcgatcgctgcgaacggaacgagttccagtgccaggacggaaagtgtatcagctataagtgggtgtgtgatggtagcgccgaatgtcaagatggatccgatgagagccaggaaacatgcctctcagtcacttgcaagagtggagacttttcttgcggaggtcgggtgaaccgctgcatcccacagttctggcgatgtgacggtcaggtcgattgtgacaatggatctgatgagcagggatgtcctcctaagacctgttctcaggatgagttccggtgccacgacggtaagtgcatctcacggcagtttgtgtgtgactctgaccgagattgtcttgacggatcagatgaggcaagctgtcccgtcttgacttgcggccccgctagcttccagtgcaattcatcaacatgtataccccagctgtgggcctgtgacaacgaccctgattgtgaagacgggtccgacgaatggcctcaaaggtgccgggggttatacgtgttccagggcgactccagcccttgctccgcttttgagttccactgtctgtctggcgagtgcatccactcgtcctggaggtgcgacggaggcccagactgcaaagataaatcagatgaggaaaattgcgccgtggccacctgtagaccggatgagttccaatgttcagatggcaattgtattcatggcagcaggcagtgcgacagggaatacgactgcaaagacatgagcgacgaagtgggctgcgtgaatgtgacgctgtgcgaaggccctaacaagtttaaatgccattccggggagtgtattactcttgataaggtttgcaacatggcccgggattgtcgagactggagcgatgagcccatcaaagagtgtggcaccaatgagtgtctggacaataacgggggatgctctcatgtgtgcaatgacctgaaaatcggggctgaatgcttgtgcccagatgggttccaactcgtcgcgcagaggaggtgtgaagatatagacgagtgccaggaccctgatacttgctcccaactatgcgttaacctggaagggggctacaaatgccagtgtgaggaaggtttccaactcgatccccataccaaggcctgtaaagctgtcggcagcatcgcttatttgttctttaccaacagacacgaagtgcgtaagatgaccttggatcgctccgaatacactagcttaattccaaacctccgcaacgtggtggccctggataccgaggttgcttctaaccgcatttactggtctgatttatcccagagaatgatctgctcaacacagcttgacagggcccacggggtctcaagctacgacactgttatctcacgcgacattcaagctcccgatggcttggccgtggactggatacactcaaacatctattggactgactcagtactggggacggtctccgtggcagatacgaagggagtgaaacgcaagaccttattccgggagaatggcagcaagcctcgtgccatcgtggtggaccccgtacacgggtttatgtactggactgactggggtacacccgctaagatcaagaaaggcgggctgaatggggtcgatatctactctcttgtcactgagaacatccagtggcccaatgggatcacgcttgaccttctgtcagggaggctgtactgggtagattccaaactgcatagcatcagttccattgacgtgaacggcggtaatcgaaagaccattttagaggacgaaaagaggctcgcccaccccttttctctggctgtctttgaggacaaggtgttctggacagatatcatcaacgaagctatcttctctgctaacaggctgacaggcagtgatgtgaatctgcttgctgagaacctgcttagcccggaggatatggtgctgtttcacaacctcacgcaacctcgaggcgtgaactggtgcgaaaggacaacgctgtcgaacgggggctgccagtacttatgtctgcccgcccctcaaatcaaccctcattcccccaagtttacctgcgcctgtcccgacggtatgttgttggcacgcgacatgcgctcatgccttactgaggcagaggccgccgtggccacccaggagactagcacagttcgactgaaggtgtcatctacagcggttaggacccagcacacgaccacgagacccgttcctgacacctcaagattacccggtgccacacctggcctcaccaccgtagaaatcgtcacaatgagtcaccaggcccttggcgatgtcgccgggcgcgggaacgagaaaaaaccatccagtgtgagggctctgtccattgtgctgccaatagtccttctagtgttcctttgcctcggggtgttcctcctgtggaagaactggaggctcaaaaatattaactctatcaattttgacaatccagtgtaccagaagacaactgaggacgaggtgcacatctgtcacaatcaggatgggtactcatacccttctagacagatggtctcactcgaagacgacgtggct

SEQ ID NO: 11404 - DNA, 2580 bp, Artificial Sequence
  derived and/or modified sequence
atgggcccatggggctggaaactgcgctggactgtagctcttctgctggcagccgcagggactgcagtaggagatcgttgtgaacgcaatgagtttcagtgccaggatgggaagtgcatctcttataaatgggtgtgcgacggctctgccgagtgccaggacggatcagacgaatctcaagaaacatgcttgagcgttacttgtaaaagcggcgatttcagctgcggagggagggttaacaggtgtattccacagttctggagatgtgatggacaggtggattgcgataacgggtccgacgagcaggggtgccctcccaaaacctgcagccaggatgaattcagatgccacgacggcaaatgtattagtcggcagttcgtttgtgattctgatcgggattgtctcgacgggtcagacgaggcgtcgtgtcctgtgctgacctgcggtccggcctcgtttcagtgcaatagcagcacctgtattccccagctgtgggcctgcgataacgacccagactgcgaggatgggtctgatgagtggccccagcgctgccgaggcctttacgtctttcagggggattccagcccttgctctgcttttgagttccactgtctaagcggggagtgtatccacagcagttggcgttgcgatggcggccccgattgtaaagacaagagcgacgaagaaaactgtgcggtggctacctgccgccccgacgagtttcagtgctcagacggcaactgtatccatgggtccagacagtgcgatcgagagtacgactgcaaagatatgtcagacgaggttggatgtgtcaacgtgacgctgtgtgaaggcccaaacaagttcaagtgtcacagcggcgaatgcatcacactggataaggtctgcaatatggcaagggactgtcgagactggagcgatgaacccataaaggagtgcgggacgaacgaatgtttagacaataacggaggatgctcacacgtgtgtaatgacctgaaaatcggcgcagagtgcctgtgccccgacggatttcagctggtcgcacaaaggcgttgtgaagacatagacgaatgccaggatcccgatacttgctcacagctgtgcgtaaatctcgagggcggatacaaatgccagtgcgaggaagggtttcagctggatccacataccaaggcttgtaaagctgtcgggtctatcgcttacctgtttttcactaaccggcacgaggttaggaagatgactcttgataggagcgagtataccagtttaattccgaatctaagaaatgtggtagcattggacaccgaggtagcatctaatcgcatatattggtctgacttgagtcagagaatgatctgtagtacccagctagatagagcacacggtgtgtcctcatacgataccgtgatctctagagatattcaagcccctgacggattagccgtggactggattcacagcaacatctattggaccgacagtgtgctaggtacggtgagcgtggcagatactaagggtgtgaaacgaaagacactctttcgagagaacgggtcaaagccccgggctatcgtggtggatcctgtacacggcttcatgtattggactgattgggggacaccggcgaagatcaagaagggaggactcaacggggttgacatctactcactcgttaccgagaatattcagtggccgaatgggatcacactggatctgctgagtgggagactgtattgggtcgattccaagctgcacagcataagctccatcgacgtgaatggcggtaatcgtaaaacaattctggaggatgagaaacgcctggcacaccctttttcactagccgtgttcgaagataaagtgttctggaccgacatcatcaatgaggccattttttcagctaatagattaaccggttccgacgttaatcttcttgctgagaacctgttgtctcctgaggatatggtactctttcacaacttgacacagccgaggggtgtaaactggtgtgagcgaactaccctgtcaaatggcgggtgccagtacctgtgtttaccggcacctcagatcaacccacactctccaaaattcacatgtgcctgcccagatggcatgctcttggcacgagacatgaggtcgtgcttgacggaggccgaagctgctgtggccactcaggagacgtcaaccgtgaggctgaaagtgtcaagtactgccgtgagaactcaacacactacaacgcgccctgttccagatacgagcagactacctggagccactccaggcctcacaactgttgagatagtgactatgtctcatcaagcccttggggatgtggccggccgaggaaacgaaaaaaagccatcctccgtgcgggccctatcaattgtcctccctattgtacttctagtgtttctgtgtctcggggtctttcttctctggaaaaattggaggcttaagaacatcaattctattaactttgacaatcctgtttaccagaaaacaacagaggacgaggtgcacatatgccataatcaagacgggtacagctacccgagccgtcagatggtgtcattggaggatgatgtcgcc

SEQ ID NO: 11405 - DNA, 2580 bp, Artificial Sequence
  derived and/or modified sequence
atggggccatggggatggaaactgcgttggacggttgccttgctcctcgcggcagcaggtactgcggtcggtgacaggtgcgaacggaatgagttccaatgtcaggatggtaagtgcatctcttacaaatgggtgtgcgacgggtccgccgagtgccaagacggatcggacgagtcccaggaaacctgcttgtcggtgacctgcaagtccggagacttctcatgtgggggaagggtgaaccgctgcatccctcaattctggagatgcgatggtcaagtggactgtgataatggatctgatgaacaggggtgcccaccaaagacttgcagccaggacgagttccggtgccacgacgggaagtgcatttcccggcagttcgtgtgcgatagcgaccgggactgcctggacggatccgacgaagctagctgcccggtgctgacctgtggtccagcctccttccaatgtaattcgtccacttgcatcccgcagctgtgggcatgcgataacgatccggattgtgaagatggcagcgacgaatggccgcagaggtgtagaggcctttacgtgttccagggagactcgtccccctgtagcgccttcgaattccattgcctgagcggggagtgcattcattcgtcgtggcgctgcgacggcggaccggactgcaaggacaaaagcgacgaagagaactgcgcggtggcgacttgccgaccagatgaattccaatgcagtgacggcaattgtatccacgggagccgccagtgcgaccgcgagtacgactgtaaggacatgtccgacgaggtaggttgcgtcaatgtgaccttgtgcgagggcccgaacaaattcaagtgtcattcgggcgagtgtatcaccttggacaaggtttgcaacatggcccgcgattgccgggattggagcgatgagccgatcaaggagtgtggaaccaatgagtgcctcgacaataatggcgggtgttcacacgtgtgcaacgatttgaagatcggagccgaatgtctgtgccctgatggcttccagctggtagcccaaagacggtgcgaagatattgatgaatgtcaagatcccgacacctgctcccagctctgcgtgaacctcgaaggtggttataagtgtcagtgcgaagagggtttccagctggatcctcacacgaaggcatgcaaggccgtcggaagtatcgcttatctgttcttcaccaacagacacgaagtccgaaagatgacgctggaccgctcagaatacacctcactcatccccaacctgcgcaacgtggttgctctggacaccgaagtggcaagcaaccggatttactggtccgacctctcccagaggatgatctgctcaactcaattggaccgggcacacggagtgtcctcatacgacaccgtgatctcccgggacatccaagcgccggacggactcgccgtggactggatccattccaatatctactggactgattcggtcttgggaacggtttcggtcgcagatacgaaaggtgtgaagcgtaagactctgtttagggagaacgggtcgaagccaagagctatcgtggtcgacccggtgcatggattcatgtactggacggattggggaactccagccaagataaagaaagggggactgaatggagtcgatatctactcgctggtcactgagaacattcagtggccgaacggaatcaccctcgacctcctgtccggtagactgtactgggtggactcaaagctccacagtatctcctctatcgacgtgaatggcggcaaccggaaaactattctcgaggacgaaaagcgcctggcacaccccttctcgctggccgtctttgaggacaaagtgttttggaccgacatcatcaatgaagccatcttctcagccaatcgcctgaccggaagcgacgttaaccttcttgctgaaaatctgctgagcccggaagatatggtgctctttcataacctcacgcagccgagaggcgtaaactggtgcgaaaggactaccctcagcaacggtggatgccaatacctttgcttgcctgcaccgcagatcaatccgcattcacccaagtttacgtgtgcctgccctgacggcatgctgctggctcgagatatgagatcgtgcctgaccgaggctgaagcagctgtggcgactcaggagacgagcacggtccgccttaaagtcagtagcaccgccgtgcgcactcagcacaccactactcggcctgttcctgacaccagccgcctgcctggagccaccccaggactcactaccgtggagatcgtgacgatgtcgcaccaagccctgggcgacgtggcgggaagagggaatgagaagaaaccatcatcggtgcgtgcgctctccatcgtgctcccgatcgtgctccttgtttttctgtgcctgggagtgttcctgctgtggaagaactggcgacttaagaacatcaactcgattaactttgataacccggtgtaccagaaaactaccgaagatgaagtccacatttgccacaaccaggacggatactcgtacccatctcgccaaatggtgtccctggaggatgatgtggcg

SEQ ID NO: 11406 - DNA, 2580 bp, Artificial Sequence
  derived and/or modified sequence
atgggcccctggggatggaagctgcgttggactgttgccctgctattagcggccgcagggacggcggtaggtgaccgctgtgagcggaatgaattccaatgtcaagatgggaaatgcattagttacaaatgggtgtgtgatgggagcgccgagtgtcaggatggctctgacgagtcccaagagacctgcttgtcagtcacttgcaagagtggagacttcagttgcggaggacgggtgaatcgttgcatcccccagttctggcgatgtgatggacaggtagactgcgacaatggatcggatgaacagggttgccctcccaagacatgctctcaagatgagtttagatgtcacgacggaaagtgtatctccaggcagtttgtctgtgactctgatcgcgattgcctagacgggtctgacgaggcttcctgccccgtcctgacatgcggacctgcctctttccaatgtaatagcagcacatgcattccacagctttgggcatgtgataatgatccggactgtgaggacggaagtgacgaatggccacagagatgccgcggcctgtatgtattccagggcgactcatcgccctgtagcgccttcgaattccattgcttgtccggtgagtgtatccacagcagctggcggtgtgacggtgggcccgattgcaaggataaaagcgacgaggagaactgcgccgtggctacgtgtagaccggatgagtttcagtgttctgacggcaattgcatccacgggtccaggcaatgcgacagagagtacgattgcaaggatatgagcgatgaagtgggctgtgtgaacgtgacactctgcgaagggcccaataagttcaaatgtcacagcggtgaatgtattactctggataaagtgtgcaatatggcacgggattgtcgtgactggagcgacgaacccattaaggaatgcgggaccaacgaatgtttagacaataacggggggtgttctcacgtctgcaacgatctgaaaatcggggctgagtgcctttgccctgatgggttccagttggttgctcagagacgctgcgaggatattgacgaatgtcaggatcccgacacctgtagtcaactctgcgtgaacctcgagggaggatacaaatgccaatgcgaagaggggtttcagctagaccctcataccaaagcctgcaaggcagtgggtagcattgcttatctattttttacaaaccggcacgaggtgaggaaaatgacccttgacaggagtgagtatacctctctgatacccaatttacgtaatgtggtggccttggacacagaagtggcttccaataggatctactggtcagacctgtcacaacgaatgatctgcagtacccagcttgacagagcacatggcgtgtctagttacgacacggttatttcccgtgacatccaggcacccgatgggctggctgtagattggatccattccaatatatactggactgattcagttttggggactgtgtccgtggccgacaccaaaggagttaaaaggaagacactgttccgggagaacggttccaagccgagggctattgtggtggaccccgtgcatggctttatgtactggacagactgggggacacctgcaaagataaagaagggagggttaaacggcgtggatatttatagccttgtgactgagaacattcagtggcccaacgggatcactctggatttgcttagtggacggctctattgggttgatagcaaactgcatagcatctcctcaatcgatgtgaacggggggaaccgcaagaccatcctagaggacgaaaaacgtttagcacatcccttttccctggctgtcttcgaggataaggtcttctggaccgacattattaatgaggctatattcagcgcgaacaggctgactggttctgatgtgaatctgcttgctgagaatctgttatcacctgaagacatggttctcttccacaatctgacacagcctcgcggtgttaattggtgtgaacgcaccaccctgagtaatggcggttgtcaatatctgtgtttgcccgctcctcagataaacccccattcaccaaagtttacatgtgcctgtcccgatggaatgctcctcgcgcgagacatgagatcctgcctgactgaggccgaagccgctgtggctacacaggagacatcgaccgtacgactgaaggtgtctagcacagccgtgagaacacagcacaccacaactcgacccgtccctgatacatcccgtctgccaggcgcaacccccgggctgacaactgtggagatcgtgacaatgtctcatcaggccctgggtgacgtagcagggaggggtaatgagaaaaagcctagcagcgtgcgtgccctcagtatcgtactccccatagtgttgcttgtgttcctgtgcctcggcgtgtttcttctgtggaagaactggaggctgaagaacatcaacagtattaattttgacaaccccgtttaccagaagacaaccgaggacgaagttcatatctgccacaaccaggatggctactcctacccctctcgccagatggtgtcccttgaggatgacgtggct

SEQ ID NO: 11407 - DNA, 2580 bp, Artificial Sequence
  derived and/or modified sequence
atgggcccctgggggtggaagctgagatggacagttgcacttttactggcagcggcgggtacggccgtcggggaccggtgcgagcgcaacgagttccagtgtcaggatggaaaatgtatctcatataagtgggtgtgtgatggctccgctgagtgccaggatgggagtgatgagtcccaagagacctgcttaagtgtaacttgcaagtctggagatttcagttgtggcggaagggtcaaccggtgcatccctcagttttggagatgcgatggacaggtagattgtgataacggctctgatgaacagggctgtcccccaaagacctgtagtcaggacgagtttaggtgccatgacggaaagtgcatcagccgacaatttgtatgcgattctgaccgcgactgtctcgatggaagcgacgaggcatcgtgtccagtgctgacttgcggccctgcctcgttccagtgcaatagttccacctgcatccctcagctatgggcatgtgataatgatccagattgtgaggacgggagcgacgaatggccccaacgatgtcgtggactctacgtattccaaggcgactcttcgccttgctcagcattcgaattccattgtctgtcaggagagtgtatccatagttcttggcggtgtgacggtggccccgattgcaaagataaaagtgatgaggagaactgcgcagtggctacctgcaggccagatgaattccagtgttcggacgggaattgcatccatgggtcccgccagtgcgatagggagtacgactgcaaggatatgtccgacgaggtcggatgcgttaacgtgacattgtgcgaggggcctaacaaattcaagtgccacagcggggaatgtataaccctggataaggtgtgcaatatggcccgcgattgtagggattggagtgatgagccaattaaagagtgcggaacaaacgagtgtctcgataataacgggggctgctcacatgtttgcaacgatctgaaaattggcgcggagtgtctctgtcccgatgggttccagctggtggctcagagaaggtgtgaagatatagatgagtgtcaagatcctgacacctgttctcagctgtgcgtcaaccttgagggagggtataaatgccagtgtgaggaaggcttccagctggatccccatacgaaagcctgcaaagcggtgggctcgatcgcctatctctttttcaccaatcgacatgaggttcggaagatgacgttggataggtccgagtacaccagtctgatccccaatctgcggaacgttgtcgcattggacaccgaggtggcatcgaacagaatctattggagcgacctgtcccagcgcatgatctgctctacccagcttgacagggctcacggggtgagctcttatgatactgtgatcagtagagacattcaggccccggatggcctggccgtggattggattcacagcaacatctattggacagatagcgttctcggaactgtttctgtcgcggacaccaagggcgtgaagagaaagactttattccgcgagaacggctctaaaccccgggctatcgttgtagaccctgttcacgggtttatgtattggactgattggggaacaccggccaagatcaagaaagggggattgaacggggtggacatctattcgctggtgaccgagaacatccagtggcccaatgggattacattggatctcctgagcggacggctgtactgggtggacagcaagttgcattccattagcagtatcgatgtgaacggaggaaatagaaagactattttggaggatgagaagaggctcgcccatcccttctcactagccgtattcgaggacaaggtattctggaccgatataatcaatgaggccattttctccgcgaaccggctcacagggtctgatgtgaatctgctagcagaaaatctgctctcccctgaagacatggtgctgtttcacaacctaacccagccacggggagtgaattggtgtgagcggaccaccctgtccaatgggggctgccagtacttgtgtctgccagcccctcaaatcaacccacacagccctaaatttacgtgcgcttgccctgatggcatgctcctagcgcgggatatgaggtcgtgcctgaccgaggccgaagctgcagtcgccacacaggagacttcgactgtgcgtctgaaggtgagttctaccgcagtgagaactcaacacaccactacccggccggtgcctgacacttcccgactgcctggagcaaccccaggacttaccacagtggagatagtaaccatgtctcaccaggcattgggagatgtggcaggcagaggaaacgaaaagaagccatctagtgtcagagcgctcagcatagtgctgccaatcgtccttctcgtgtttctgtgtctgggcgtcttcctgctgtggaagaattggcggttgaaaaatatcaactccatcaattttgacaaccctgtgtatcaaaaaactactgaagacgaggtccacatctgccataaccaggacggatattcctaccccagccgtcagatggtgtctctggaagacgacgtggca

SEQ ID NO: 11408 - DNA, 2580 bp, Artificial Sequence
  derived and/or modified sequence
atgggcccctggggttggaagctgcgatggaccgttgcacttctactggctgcagctggaactgccgtgggagataggtgtgagcgcaatgaattccaatgccaagatgggaagtgtatcagttacaaatgggtttgcgacggatccgcagagtgtcaagacgggtccgatgaaagccaagagacttgtttgtctgtgacctgcaaatcaggagatttctcttgtggtgggcgagtgaaccggtgtatcccccagttttggagatgcgatggccaagtggattgtgataacggcagcgatgaacaggggtgccctccaaagacctgctcacaggatgagtttcgctgccatgatgggaagtgcatctctagacagttcgtctgtgatagcgacagggactgcttggatggcagtgacgaggctagttgcccagtcctgacgtgcggccccgccagtttccaatgcaacagttcgacatgcattcctcagctgtgggcctgcgacaatgacccagactgcgaggacggaagcgacgagtggccacagaggtgtcggggattatacgtgtttcagggagatagttcgccctgctcggccttcgagtttcattgcctcagcggggaatgcattcacagtagttggaggtgcgatggagggccggattgcaaggataaatccgatgaggagaattgcgccgtggctacctgtcgacctgacgagtttcagtgttccgatggcaattgcatacacggatctcggcaatgcgaccgagagtatgattgtaaagatatgtccgatgaagtcggatgtgttaatgtgacactgtgtgaggggcctaacaagtttaaatgccatagtggcgagtgtatcacactcgacaaagtgtgcaacatggctcgggactgtagggactggtcagacgaaccaatcaaggagtgtgggacaaacgaatgtttggacaacaacggcgggtgctcccatgtgtgtaacgatttgaagattggcgccgagtgtttgtgtccagatgggttccagttggtggcccagaggcgatgtgaggatattgacgagtgtcaggatccagatacgtgttcccaactttgtgtgaatttggagggcggttacaagtgccagtgtgaagagggatttcagctggatccgcataccaaggcttgcaaggccgtcgggagcatcgcttatctgttctttactaaccgccacgaggtccgaaagatgactctggatcgcagcgaatatacatcactaattcccaacctgaggaatgtcgtggcccttgataccgaggtggcttccaaccgtatttactggagtgacctatcccagcggatgatctgttcaacacagctggatcgtgcacatggagtaagctcgtatgatactgtgatctcccgtgatattcaggcaccagacggtctggccgtcgactggatccatagcaatatctattggactgactctgtgttgggtacagttagtgtcgctgacactaagggagtcaagaggaagacactatttagggagaacggcagcaaacctagagccattgtagtcgacccggtccacgggttcatgtattggactgactgggggactcccgcaaagattaaaaaggggggactgaacggcgtggacatctacagtctggtgaccgagaatattcagtggcctaacggcattacccttgatttgctaagcggccgactgtactgggtcgactcaaagctccactcaatcagctcaattgatgtcaatggggggaataggaagacaatcttggaagacgagaaaaggctcgcccacccattctcactggcagtgtttgaggacaaagttttttggacggacatcatcaacgaggcaatcttctccgccaatagactgacaggctcagacgtgaacctgctagcagaaaacttactgtccccagaagacatggtgcttttccataatctgacccagcctcgaggtgtaaattggtgcgaaaggacaaccttgtctaacggggggtgccaatacctgtgtctcccagctcctcagatcaacccacactcccccaagtttacatgcgcttgtcccgacggaatgctcctagcgagagatatgagatcatgccttactgaagctgaagcagcggtggctacccaagaaacaagcaccgtgagactcaaagtctctagcactgccgtgcggacgcagcacacaaccacccggcccgtccctgatacgtcacggctgccaggcgcaacccctggacttaccaccgtcgagatcgtaacaatgtcccaccaggccctcggcgacgtggctggcagaggcaatgagaagaagcctagcagcgtgagggcgctgagcattgtgctcccaatcgttttgctggttttcctgtgtctgggggtatttctcctttggaaaaattggaggctgaagaatattaattctatcaacttcgataatcccgtttaccaaaagaccactgaggacgaggtgcacatatgccataatcaggacgggtattcgtacccttcaaggcaaatggtgtctttagaggatgacgtcgca

SEQ ID NO: 11409 - DNA, 2580 bp, Artificial Sequence
  derived and/or modified sequence
atgggtccctggggatggaagctccgctggaccgtggccctcctcctggcagccgcaggaaccgccgtgggcgatcggtgtgaaagaaacgaatttcaatgtcaagacggaaaatgtattagctacaagtgggtgtgcgatggatcggcagaatgtcaggatggctcggacgaatcgcaggaaacctgtctctccgtaacctgtaagagcggggatttttcatgcgggggcagagtgaacagatgcattcctcagttttggaggtgcgacgggcaagtggattgtgataatggttccgatgagcaaggctgtccacctaagacgtgttcccaggatgaatttcgctgccatgatggcaaatgcatttctcgtcaattcgtgtgtgattccgatagagactgcctggacggtagcgacgaagcatcgtgtcctgtgctcacctgcgggccagcatcattccaatgtaacagctccacttgtattccgcaactttgggcatgtgataatgatcctgactgtgaagatggttcagatgagtggccccagcgttgtaggggtctgtacgtgttccagggggatagctcaccatgttcggctttcgaattccattgcttgtcgggagagtgtatccattcctcgtggcggtgtgatgggggacccgactgtaaggataaatcggatgaagaaaactgcgcagtcgcaacctgccgcccagatgaatttcagtgttcagatggaaattgcattcatggttcgagacagtgtgacagagaatatgattgtaaggacatgtcagatgaggtcggttgtgtgaatgtcactctttgcgaaggtccaaataagtttaagtgtcatagcggggagtgcataacccttgacaaggtgtgcaatatggcaagggactgtagagactggtccgatgaacctattaaggagtgtgggaccaacgaatgtctcgacaacaacggaggctgttcacatgtctgtaacgatctgaaaataggtgctgaatgtctgtgcccagatgggtttcaacttgtggcgcaaagaagatgcgaggacatcgatgaatgtcaagaccctgatacctgcagtcagctgtgtgtcaacctcgaagggggatacaagtgccaatgtgaggaaggattccagctggatccccacactaaagcatgtaaggccgtgggctccatagcatatctgtttttcaccaaccggcatgaggtgaggaagatgactcttgaccggtctgaatacacttcgctcattccgaacctccgcaatgttgtcgccctggacaccgaggtggcgagcaaccggatttactggtccgacctcagccaacgcatgatatgctccacccaattggaccgggcacatggagtttcctcgtacgacaccgtgatttcgcgagatatccaagcaccagatggcctggccgtggactggattcattcaaacatttactggaccgatagcgtccttggcaccgtcagcgtggccgatacgaagggtgtcaaacgaaagactctctttagagaaaatggttcgaaaccacgcgccatagtcgtggatcctgtccacgggtttatgtactggactgactgggggactcctgcaaaaatcaagaagggaggtctgaacggagtggacatctactccttggtcaccgagaatattcagtggcccaatggaattacgcttgaccttctttccggtaggctttactgggtcgactctaaacttcacagcattagcagcattgatgtgaatggtggcaacagaaagactatcctggaagatgaaaagagactggcccatcccttttcgctcgcagtgttcgaggacaaagtgttttggacggatatcatcaacgaagctatcttctcggccaacagacttactggatccgatgtcaatcttctcgccgaaaacctgcttagccctgaagatatggtgctttttcataaccttacccagccacggggagtgaactggtgtgagcgcacgaccttgtctaatggcggatgccagtatctttgtctgcctgcaccccagattaacccgcactcgccaaagtttacttgtgcgtgccctgacggaatgcttctggcaagggatatgcggagctgtctgacggaggcagaggcagcagtggcaacccaagaaacctcaaccgtgcgcctcaaagtctcatccaccgccgtgcggacgcagcacactaccacgcggccagtaccagatacttcgcgcctgcctggagccacccctggactcaccactgtggagatagtgacgatgtcgcatcaagctctgggtgacgtggccggaagaggaaatgagaaaaagcctagctccgtgagagctctttcgatcgtacttccaattgtcctgctggtgtttctctgcctgggtgtgttcctgctgtggaagaactggcggcttaagaatatcaactcgatcaactttgataatcctgtatatcaaaagaccactgaagatgaggtgcatatatgccacaatcaggacgggtactcatacccttcacgtcaaatggtgtcacttgaagatgacgtcgcg

SEQ ID NO: 11410 - DNA, 2580 bp, Artificial Sequence
  derived and/or modified sequence
atgggtccttggggatggaaattgcgatggactgttgcattactactcgcagcagccggaacagctgtcggagacagatgtgagcgtaatgaatttcagtgccaggatggaaaatgtatctcgtacaaatgggtctgtgacggaagtgctgaatgtcaagatggaagtgatgagagtcaggaaacttgtctttctgtcacttgcaagtcgggagattttagttgcggaggtagagttaatagatgtattccacaattctggagatgtgatgggcaggtagactgcgataacggaagcgatgagcagggatgtccaccaaaaacatgttctcaggatgagttcaggtgtcacgacggaaagtgcatctctcggcagtttgtatgcgattcagacagggactgccttgatggctcagatgaagcatcgtgtcctgttcttacatgcggtcctgcctctttccagtgcaatagttctacgtgtattccacagttgtgggcttgcgacaacgacccggattgtgaagatggaagtgatgaatggccgcaaagatgtagaggactttacgtgttccaaggcgatagttcaccatgttccgcttttgaattccattgtttaagcggcgagtgtatacattcctcttggagatgtgatggtggccccgattgtaaagataaaagtgatgaagaaaattgcgcagttgctacgtgtagaccagatgaatttcagtgcagcgatggaaattgtattcatggatctcgacaatgcgacagagagtatgattgtaaggatatgtctgatgaggttggatgtgttaatgtcacgctctgtgagggtcctaacaagtttaaatgtcattcaggagaatgtattactttggacaaagtgtgtaatatggctcgtgactgccgagactggtcggacgagccgattaaagagtgtgggacaaatgaatgtcttgataataacggcggttgctcacatgtgtgtaacgacctaaaaattggagctgagtgtttgtgcccggatggattccaactcgtcgcacagagacggtgtgaagacatcgatgaatgccaggacccagatacatgctcacaattatgcgtgaacctcgaaggaggatataagtgtcaatgtgaagaaggtttccaattggatcctcatacaaaagcttgcaaggccgttggatccattgcatacctcttcttcactaaccgacacgaggtgcgtaagatgacattagatagaagcgaatatacttcactcatccccaacttgcgtaacgttgttgcacttgatacggaagttgccagtaaccgcatttactggtctgacttgtcacaacgtatgatttgctcaacccaactcgatcgagcacacggagtctctagttacgatacagtgatctctcgagatatccaagcgccagatggattggcagtcgactggatccacagtaatatctattggacggattcagtgttgggtacagttagcgtggctgataccaaaggcgttaaacgtaagaccctttttagagaaaatggaagtaaaccaagagctattgttgttgacccggttcatggattcatgtattggactgattggggaacaccagctaaaatcaaaaaaggagggttgaacggagtggatatatactctcttgttactgaaaatattcagtggccgaacggaattactctcgatttgctgagtggaagactttactgggttgatagcaaactccatagtattagcagtattgatgtaaatggaggtaatcgtaagacaattctggaagacgagaagagactcgctcacccattctccttggcggttttcgaagataaggtattttggacagacataattaatgaagcaatctttagcgcaaatagacttacgggctcagatgtaaatttgttggcggaaaatctcctatctccggaagatatggttttgtttcacaatttgactcaaccaagaggagttaactggtgtgaacggactacactatccaacggaggatgccaatatctgtgtcttccggctccacagattaacccgcacagtccaaaattcacgtgcgcgtgccctgatggaatgttgctcgcacgagacatgagatcctgtttgacagaggcagaggctgccgtggctacccaagaaacatcaacagtcaggctcaaagtttcctctacagcagttagaacacaacatactaccacaagacccgtgcctgatacatctagattaccaggagccacccctggacttacaacggtagagattgtgactatgagccatcaagctttaggagacgtcgctggacgtgggaacgaaaaaaaaccaagttcagttcgtgctttgtcaattgtgctgccaattgtgttgcttgttttcctctgcttgggagttttcctgctttggaaaaactggcgtttaaaaaatattaacagtattaatttcgataatccagtgtatcaaaagacaacagaagacgaagtccacatctgtcacaaccaagacggctattcctacccatctaggcaaatggtgtcgttggaggatgacgtagct

SEQ ID NO: 11411 - DNA, 2580 bp, Artificial Sequence
  derived and/or modified sequence
atgggcccgtgggggtggaagctccggtggacggtagcgctgctgttggctgcagccggaactgccgtgggagatcgctgcgagaggaacgaattccaatgccaagacggcaagtgcatctcctacaagtgggtgtgcgacggatcagcagagtgccaggatggctccgacgaatcccaggagacttgcctcagcgtcacctgtaaaagtggagacttctcgtgcgggggtagagtgaaccggtgtatcccgcaattttggagatgcgacggacaagtggactgtgacaacggatccgacgagcagggatgccccccaaagacttgctcgcaggatgagttccgctgccacgacggaaagtgtatatcccgccaattcgtgtgcgatagcgaccgggattgcctggatggttcggacgaggcttcctgcccggtgctgacttgcgggccggcgtccttccagtgcaattcgtccacgtgcatcccacaactttgggcatgtgataacgacccggactgcgaagatggatccgatgagtggccgcagcgctgtcggggcttgtacgtgttccagggcgactcttccccgtgctcggcatttgaattccactgccttagcggagagtgcatccacagctcgtggaggtgcgatgggggtccggactgtaaggataaatcagacgaagagaattgcgccgtagctacctgtcgcccggatgagttccagtgctccgatgggaactgtatccatggatcccgccagtgtgacagggaatacgattgcaaagacatgtcagacgaggtgggctgcgtgaacgtgactctgtgcgagggcccgaacaagttcaagtgccacagcggagaatgtatcaccctggataaagtctgcaacatggccagagactgtcgggattggagcgacgagccaatcaaagaatgcggtactaatgagtgcctggacaataatggaggatgctcgcacgtgtgtaatgacttgaaaattggcgccgagtgcctgtgcccggacggattccagctggtcgcccagcggcgctgcgaggatatcgacgagtgtcaagaccccgacacttgttcccaactttgcgtcaacctcgagggaggatacaagtgtcagtgcgaagaagggtttcaattggacccacataccaaagcgtgtaaggccgtgggctccatcgcctacctgttcttcactaataggcatgaagtgcgtaagatgacgctggaccgctcggagtatacctctctgatcccaaacctgaggaatgttgtggccctcgataccgaggttgcgtccaaccggatctattggagcgacttgagccaacgcatgatttgttcgactcagctcgaccgggcacacggtgtctcttcttacgacaccgtcatctcccgggatattcaggcccccgacggactggctgtcgactggatccattcgaacatctactggaccgatagtgtgctcggcactgtgtctgtggcagacaccaagggtgtgaaaagaaagaccctctttcgcgagaacggcagcaaaccaagggccattgtggtggatcctgtgcacggatttatgtattggaccgattggggaacccctgctaagatcaagaagggaggactgaatggcgttgacatctactctctcgtgactgagaatatccagtggcctaacgggatcacccttgacctgctctcaggcagactgtactgggtggatagcaaactgcattcgatctcctcaattgatgtgaacggaggaaaccgtaagaccattctggaggacgagaaaaggttggcgcacccatttagcctggcagtgttcgaggacaaggtgttctggactgacatcatcaatgaagcaatcttctcagccaacagactgactggatcggatgtcaacctgctcgcggaaaatctgctgtcgccagaagatatggtcttgttccacaacctgacccagccaagaggagtgaactggtgtgagcgcaccacgctgtcaaacggcggctgccaatacctgtgccttccggctccgcagatcaacccgcatagcccgaaattcacttgtgcgtgcccagacggcatgctgctggcgagagatatgcgcagctgcctgactgaagccgaagcagctgtggccacccaagagacttcgactgtgcggctgaaggtgtcgtcaaccgcagtgcggacccaacacaccactactagaccagtgccagacacttcgcggttgcctggagccacccctggacttaccaccgtcgagattgtgaccatgtcgcaccaagctctgggtgacgtggcgggacgcggaaatgaaaagaaaccctcaagcgtgcgcgcgctctccatcgtgctcccgatagtcctgctggttttcctttgcctcggcgtctttctgctgtggaagaattggcggctcaaaaacatcaattcaatcaacttcgacaacccggtctaccaaaagaccacggaggacgaagtgcacatctgccacaatcaggatggttactcgtacccgtcgaggcagatggtgtccctggaggatgatgtggca

SEQ ID NO: 11412 - DNA, 2580 bp, Artificial Sequence
  derived and/or modified sequence
atgggtccgtggggctggaaactcagatggactgtcgctctactgctggcagcagcggggaccgccgtcggtgatcgatgcgagcgtaacgaatttcagtgtcaagatgggaaatgcatttcctacaagtgggtctgtgatgggtcggctgaatgccaggatgggtcggacgagtctcaagagacgtgcttgtcagtaacgtgtaagtctggggatttctcttgcggggggcgagttaatcgatgtatcccgcaattttggcgctgcgatgggcaggttgactgcgacaacggcagtgatgaacaaggctgcccccctaagacgtgttctcaagacgaatttcgatgccacgatggcaaatgtatttcgcggcaattcgtatgtgattcggaccgggattgtctcgatggaagtgacgaagcctcatgcccagtgctcacctgcggacctgcatcatttcaatgcaactcgagtacttgtattcctcaactttgggcctgcgacaatgatccagattgtgaagacggctctgatgaatggccccagagatgtagaggtctctacgtctttcaaggcgattcgtcaccatgttcggcctttgagtttcattgtcttagcggtgagtgtatacatagctcctggcggtgcgacggcgggccggactgcaaagataagagcgacgaggaaaactgcgctgttgcgacctgtcggccagacgagtttcagtgctctgacgggaactgtatccacggatctcgacaatgcgatagagaatatgattgcaaggacatgagtgatgaagtcggatgcgtgaatgttacactctgcgagggtccgaacaagttcaagtgccactccggagagtgcattacgcttgacaaggtgtgtaacatggctcgcgactgccgtgattggtctgatgagccgataaaggaatgtggcaccaatgagtgcctagacaacaatggtggttgtagccatgtgtgcaacgacttgaaaatcggggccgagtgcttgtgtcctgacgggttccagctggttgcccagcgcaggtgcgaggatatagatgagtgccaagatccggacacgtgcagccagctgtgtgttaatttggagggcggttataagtgccaatgcgaagaaggttttcagcttgacccacatactaaggcctgcaaggcggttggcagcatcgcctatctcttctttacaaatagacacgaggtgagaaaaatgactctggacagaagtgaatatacatcgctgatccccaacttgcggaatgtcgtagccctcgatacagaagtcgcttcaaatcgcatctactggtccgacttgtcccagaggatgatttgctcgacacaacttgacagggcccacggggtctcttcgtacgacaccgtcatcagtcgtgatattcaggcgccagatggactcgccgttgactggattcattcaaacatctattggaccgactcggtcctgggtacagtctccgttgcagacacaaaaggcgtaaagcgcaagactttgtttcgtgaaaacggctcgaaacctcgagcaattgtagtggatcctgttcacggttttatgtattggacggactgggggacgccagccaagatcaagaagggcggactcaacggtgttgatatctacagccttgtcaccgagaacattcagtggccgaatggcatcacgcttgatttacttagcggtcggctttactgggtcgattccaagttgcattcgatttctagcatcgacgtcaacggaggtaaccggaaaaccattttggaggacgagaagcgcctagcccatcccttcagcctggctgttttcgaagacaaagttttctggactgatataatcaatgaggccatcttctccgccaaccgactcacgggctccgacgttaatctgttagctgaaaacctcctctcgccagaagatatggttctgtttcacaacctgactcaacctcgtggtgtcaactggtgcgagagaaccacgcttagtaacggaggttgtcaatatctgtgtctccccgcccctcagatcaacccgcattctccaaaatttacctgtgcgtgccctgacggtatgcttctagcccgggacatgcggagttgtctcaccgaggcggaagcggcagtcgctacgcaggagacatctacagtgcgactaaaagtctcctcaactgcagttcgcactcaacatactactactcgaccagtccctgacacttctcgtcttcctggtgccacacccgggttgactaccgttgagatcgttaccatgagtcaccaagcacttggggacgttgcaggacgcgggaatgagaaaaaaccgagtagtgtccgcgcactctcaattgtcctcccaatcgtgcttttagtcttcctctgtctgggagtcttccttctgtggaagaactggagattgaaaaatatcaactcgattaatttcgataacccggtctaccaaaagacaaccgaagacgaagtgcatatctgtcacaaccaggacggttattcctacccaagccgacagatggtctctctcgaagatgacgtcgcc

SEQ ID NO: 11413 - DNA, 2580 bp, Artificial Sequence
  derived and/or modified sequence
atggggccatggggctggaagctgagatggacagtcgctctattgctggctgcagcaggaacagctgtgggggataggtgcgagaggaatgaatttcaatgccaagatggcaaatgtatatcgtataagtgggtatgtgacggctcggctgagtgtcaggatgggtcagatgaatcgcaggaaacctgtctgtccgtcacatgtaagtcgggggactttagctgcggtgggcgagtcaaccggtgtatcccccagttttggcggtgtgacgggcaggtcgattgtgacaacggttctgacgaacaagggtgtcctcccaagacctgcagtcaggacgagtttaggtgccatgacggcaagtgtatcagccggcaattcgtgtgtgattctgatcgcgactgcctggatggctccgacgaagcctcatgccccgtactaacgtgtggtccagcaagctttcagtgtaactccagcacctgcattcctcagctctgggcgtgtgataacgaccccgattgtgaggatggaagcgatgagtggccacagaggtgccggggactctacgtgttccagggagattcatcgccctgtagcgccttcgagttccactgtctgtcaggagaatgtatccactctagttggcgctgcgatgggggccctgactgtaaagacaaatcagacgaagaaaattgcgcagtcgcaacatgccgcccggacgaattccagtgtagtgacggcaactgtatccatgggtcacgacagtgcgatcgagaatatgactgcaaagatatgagcgatgaggtgggctgtgtaaatgtgactttatgcgagggacctaacaagttcaagtgccatagtggcgagtgcattaccctggacaaggtctgcaatatggcacgcgactgcagagactggagtgatgaacccattaaggaatgtggcactaatgagtgcctggacaacaacgggggttgcagccatgtatgcaatgatctgaagatcggtgccgagtgcctgtgccctgacggctttcagctcgtggcccaaagacgttgcgaggatatagacgagtgtcaggaccccgatacatgcagccagctgtgtgtcaaccttgagggaggctacaagtgtcagtgcgaggaagggttccaactcgatccacacaccaaggcctgcaaggcggtggggtccatcgcctacctattcttcactaaccggcacgaagtgcggaaaatgacccttgaccgttcagagtacacttcgctgattcccaatttacggaacgttgttgcactggatactgaggtcgcctccaaccgaatttactggtccgacctttcgcagcgtatgatctgcagtacgcagctcgaccgcgctcacggcgttagctcctatgacacagtgatttctagggacatccaggcccctgacggcctggcagtggactggatacacagcaacatctactggaccgactcggtcctggggacagtctccgtcgcagataccaaaggggtgaaacggaagacactgtttcgggaaaatgggtctaagccccgtgcaattgtggttgaccctgtacatggctttatgtattggaccgattggggaacccccgcaaaaataaagaagggcggtctcaatggcgtggatatctactccctagtgacagagaatattcagtggcccaacggaatcaccttggacctcctgtcaggcaggctctactgggttgactcaaaattgcattctatctctagcattgacgtgaacggggggaatcgtaagaccatactcgaagacgagaagcggctggcacacccgttcagtttggcagttttcgaggacaaagtattctggacagatatcattaatgaagccatattctcggctaatcgcctcaccggatcagacgttaacctgctagctgaaaatttgttatccccggaggacatggtactgtttcacaacctgacacagcccaggggggtgaactggtgcgaacgcaccacactgtccaacgggggctgccagtacctgtgcttgcctgcgccccagattaaccctcatagccccaagttcacctgcgcctgtccagacgggatgcttctagcacgagacatgcggagttgccttacagaggccgaagccgctgtggccacgcaggagaccagtactgtgagactgaaagtcagctcaaccgcggtgagaacgcagcacacaaccacgaggccggttcccgatacctctcgactccccggagcaacacctggattaacaacggtggaaatcgtgactatgagtcaccaagccctgggggacgttgcgggccgcggtaatgagaaaaagccgagctcggtccgcgctctttccatcgtcctacccatcgtgctcttagtctttctgtgtcttggcgtctttctcctttggaaaaactggcgattgaagaacatcaatagcattaacttcgacaatcccgtttaccaaaaaaccactgaagatgaggttcacatctgccataaccaggacggctacagctacccttcgagacagatggtgtctctagaagacgatgtcgca

SEQ ID NO: 11414 - DNA, 2580 bp, Artificial Sequence
  derived and/or modified sequence
atggggccttggggttggaagctcagatggacagttgccctgcttctggcagctgctggtacggctgtgggtgatcgctgtgagcggaatgagttccaatgccaggacgggaagtgcatctcttacaaatgggtgtgtgacggctctgcggaatgccaagacggctccgacgagtcacaggagacatgtctgtccgtgacttgcaaaagcggtgatttctcctgcgggggtagagtgaaccgatgtatcccacagttttggaggtgtgatgggcaggtggactgcgataacggatcagacgagcagggttgtcccccaaaaacttgtagtcaggacgagttcaggtgccatgatggcaaatgtatcagtaggcagttcgtgtgtgactcagatcgggactgtctggatggcagcgatgaggcgtcttgccctgtgctcacctgtggtccggcaagcttccagtgtaatagttctacttgcattccccagctgtgggcctgcgataacgatccggattgcgaggatggatctgacgaatggccccagcggtgtaggggcctctacgtgtttcaaggggatagtagcccttgtagcgctttcgaattccactgtctgagtggcgaatgcatacattcaagctggcgctgcgatggaggacctgattgtaaggataagtctgacgaggaaaattgtgctgtcgccacttgccggcccgacgaattccagtgttccgacggaaattgtatccatggcagccgccagtgtgatcgagaatacgattgcaaggacatgtccgacgaggttggttgtgtcaatgtgactctttgcgagggcccaaataaatttaagtgccattctggagaatgcatcacattggataaggtgtgcaacatggcacgagactgccgggattggagcgatgaacctattaaggaatgcggcactaatgaatgccttgacaataatgggggctgttcccacgtttgcaatgatctgaagattggagcggaatgcctctgccctgatgggttccagctggtggcgcagagacgctgcgaggatattgatgaatgtcaggaccctgacacatgttcccagctgtgcgtgaacctggaaggtggttataagtgtcaatgcgaggagggctttcagctggatccgcacacaaaggcctgcaaagcagtgggaagcatcgcttacctgtttttcacaaatcgccacgaggtccggaaaatgaccctcgatcggagcgaatatacctcccttattcctaacttgcgcaatgtggttgcactggataccgaggtggcgtctaatagaatctattggagtgatctcagccagagaatgatctgctccacacaattggaccgcgctcacggtgtgtcaagctatgataccgttatatctagggatattcaggcacccgatggactcgcagttgattggattcattccaacatttactggacagatagcgtgttgggtaccgtgagtgtcgctgatacaaagggcgtgaagcggaagaccctctttagggaaaatggtagtaagcctcgggccatagtagttgatccggtccacggatttatgtattggaccgactggggcactcccgctaagattaagaagggcggcctgaacggcgttgatatttacagcctggtgacggaaaacatccagtggcccaacggcatcactctggacctgctgtccggcagactgtactgggtggattctaagctgcacagcatcagctctatcgatgtcaacgggggaaacaggaagacgattctggaggatgaaaaacggctggcccacccattcagcctggcagtgttcgaagataaggtgttttggacggatattatcaacgaggccatattcagcgccaacaggcttacgggctctgacgtcaatctgctcgccgaaaatcttctgagcccagaggatatggtgctcttccacaatctgacccagccacgcggtgttaactggtgcgagagaactactctgagcaacgggggctgtcagtacctgtgtctgccagctccccaaatcaacccccattcaccaaaatttacctgcgcttgtcccgatggcatgttgctggccagggatatgaggtcctgcctcacggaggctgaagcagcagtggccactcaggagacttctactgttcggcttaaagtcagctctactgctgtgaggacacaacatacaacgaccagaccagtgcccgacacctctcggctgccgggggccacccccgggctgaccaccgtggagattgtcacaatgtcacaccaggctctgggggacgtagcaggcaggggtaacgaaaagaagcccagctcagtgagggcactcagcatcgtgctgccaatcgtactgctggtcttcctttgtctgggcgtctttcttctgtggaaaaattggaggctgaaaaacatcaacagcattaactttgacaatccggtgtatcagaagaccacagaagatgaggtacacatatgtcacaatcaggacggatactcctatcctagcaggcaaatggtatctctggaggacgatgtggcc

SEQ ID NO: 11415 - DNA, 2580 bp, Artificial Sequence
  derived and/or modified sequence
atgggcccatggggatggaagttgcgttggactgtagcgctcctattagctgcagcgggtactgccgtgggagatcgctgcgagcggaatgaatttcaatgccaagacggcaaatgcatatcgtacaagtgggtgtgtgatggttctgcagaatgccaggatggtagcgatgaatctcaggagacctgtctgagcgtaacatgcaagtccggcgacttctcatgtggaggtagggtgaaccgatgtattccccaattctggagatgtgacgggcaagtcgattgtgataatggatcagatgaacaagggtgcccccccaagacatgctctcaagatgaattccgatgccatgatggtaagtgtattagtcgacagtttgtgtgcgactctgatagagattgtctggacggcagtgatgaagcctcgtgccctgtgctaacctgcgggccagcctctttccagtgtaactcgtctacttgtataccacaactttgggcttgtgataacgatcccgattgcgaagatgggagcgatgaatggccacaacgttgtagggggctttacgttttccaaggggattcgtcgccgtgctcagccttcgaattccattgcctgtcaggtgagtgcatccacagtagctggaggtgtgatggcggccctgactgtaaggataagagcgacgaggagaattgcgccgttgctacctgcaggcctgatgaattccaatgttctgacggaaattgtattcatggttccagacagtgtgacagagagtacgactgcaaggatatgtccgatgaggttgggtgtgtgaatgttacgctttgtgagggaccaaacaagttcaaatgtcatagtggtgaatgtattacattggataaagtctgcaatatggctagagattgtagggattggtcagacgagccaattaaagagtgtggaaccaatgaatgcctggataataatgggggttgttctcatgtatgcaacgatctcaagattggagcagagtgcctttgtccagacggcttccagcttgttgcccagaggagatgcgaagacattgatgagtgtcaagaccctgatacctgttcacaattgtgtgtgaatttggaaggcggttacaaatgtcaatgcgaggaaggatttcaactggacccgcatacaaaggcttgcaaagcagttggctcaatagcttacttattctttaccaaccggcacgaggttaggaaaatgactttggaccgttcggaatacacttctcttatccccaacctaagaaacgttgtggcactagacactgaagttgcttcaaacaggatttattggtctgaccttagccaaaggatgatttgcagtactcaacttgacagggcccatggggtgagctcatatgacactgtaatctctagagacatacaagctcccgacgggcttgctgtggactggattcatagtaacatctattggactgatagcgttctagggaccgtctcggtagccgatacaaaaggcgtgaagagaaagacgttgtttcgtgaaaacgggtcaaagccccgagctatcgtggtggatccagtccatggtttcatgtattggaccgattggggaacgcctgctaagattaaaaaaggtgggctaaatggtgttgacatatatagcctcgtgaccgaaaatatacaatggccaaatggaatcacgctcgatttgcttagtggaagactttactgggtggactctaaattgcactcaatatcaagtattgatgtaaacggtggaaacaggaagacaattcttgaagatgaaaagaggcttgcacatcccttctcactcgctgtttttgaagataaagtgttttggaccgatattattaacgaggcgatctttagtgctaatcgtttgaccggttccgatgttaaccttttggcggaaaacttgctttctcctgaggatatggtattattccataaccttactcagcctcgcggtgtgaattggtgtgaaaggacaactcttagcaatggtgggtgccaatatttatgtttgccagcccctcaaattaacccacactcccctaagttcacatgcgcttgccctgatggtatgctgcttgcccgagatatgcgctcgtgtctgacagaggctgaggcagcagttgctacccaggaaacttcaactgtgagactcaaggtgtcatcaaccgccgtgaggacccagcataccacgacaaggcccgttcctgatacgtcacgtttgccgggagcgacaccaggcttaactactgtggagatagttaccatgtctcatcaagctctaggtgacgtcgccggccggggaaatgaaaaaaaaccttcgagtgttcgagctctgtctatcgtgttgcctatcgttctgcttgttttcctttgtcttggtgtgttcttgctctggaagaactggagactgaaaaacatcaactcaataaattttgataaccctgtttaccaaaagacaacggaagacgaggtacatatttgccataatcaagatgggtattcttatccttctcggcagatggtaagcttagaggacgatgtggct

SEQ ID NO: 11416 - DNA, 2580 bp, Artificial Sequence
  derived and/or modified sequence
atgggaccgtggggttggaaacttcggtggactgtcgcactgcttctggccgcagctggcactgcggtgggtgatcggtgtgaaagaaacgaatttcagtgccaggatggcaagtgtatatcgtacaagtgggtgtgcgatggatccgcggaatgccaagacggaagcgatgaatcacaggagacttgcctgtcagtcacctgcaagtcaggtgacttttcatgcgggggtagggtcaaccggtgcattccccaattttggcgctgtgacggccaagtcgactgcgacaatggatccgatgaacaaggttgcccacccaagacctgttcgcaggacgagttcaggtgtcacgatggaaagtgcattagtcgccagttcgtgtgtgacagcgaccgtgactgtctggatggatcggacgaagcaagctgccctgtgttgacttgcggaccagcatcctttcagtgcaacagctcgacttgcatccctcagctctgggcatgtgataacgatcctgattgcgaggatggttccgacgaatggcctcagcggtgtcgtggtctgtacgtctttcaaggtgattcgtccccttgtagcgcatttgagtttcattgtctctcgggagagtgcattcattcctcctggcgctgtgatggaggtccagattgtaaagataagtcagatgaagaaaattgtgcagtggcaacctgccgccccgatgaatttcagtgtagcgatggcaactgtattcatggatcgagacaatgtgatagggaatacgactgtaaggatatgtccgacgaagtagggtgcgttaacgtgactctgtgtgaaggaccgaacaagtttaagtgtcactccggagaatgcattaccctcgataaggtctgcaatatggcaagagattgccgtgattggagcgacgaacccatcaaggaatgcggtaccaatgagtgtctggataacaatggcggatgttcgcatgtgtgcaacgatctgaagatcggcgcagagtgtctctgtcccgatggtttccaactggtggcacaaagaagatgtgaagatattgatgagtgtcaagacccggacacctgcagccaactgtgtgttaatcttgaaggtggatacaagtgtcaatgcgaagaaggttttcagctcgatccccacactaaggcgtgtaaggcagtggggagcatagcgtacctgtttttcactaatagacatgaagtgagaaagatgactctggaccgttcagaatacacttcacttatccctaaccttcgcaacgtggtcgccctggatactgaggttgcaagcaaccgcatttactggtcggatctttcacaaagaatgatttgttctactcagcttgatcgagctcatggcgtgtccagctacgataccgtgatcagccgtgacattcaggctccagacggcctcgcagtggattggatacattcaaacatctattggacggattcggtcctgggaaccgtctccgtcgccgataccaagggtgtgaagagaaaaacgctgtttcgtgaaaatggatctaaacctagagcaatcgtcgttgaccccgtgcatgggttcatgtattggactgattgggggactcctgccaagatcaaaaagggaggattgaatggtgtggatatctattcgctggtgactgaaaacattcagtggcctaatgggattaccttggatctgctgtccggtcgtttgtactgggtggattcgaagctgcattccatctcctctattgatgtgaacggcggaaaccgtaagaccatccttgaagatgaaaagcgtctggcacaccctttctccctggccgttttcgaggacaaggtcttttggactgacattatcaacgaagctatcttttcagcgaatcgcttgaccggttcagatgtgaaccttctggctgagaatctgctgtcccccgaagatatggtgctgttccacaacctgacccaacccaggggagttaattggtgcgaaaggaccacgctcagcaacggaggatgccagtacctctgccttcctgccccacaaatcaatcctcattcccccaagttcacctgtgcatgcccggatggaatgttgcttgccagagacatgcgaagctgtcttactgaagcagaagcagcggtggcaacccaggaaacctcgactgtgcgcctgaaggtgtcgagcaccgcagtccgcactcagcacaccaccaccaggccagtccccgacactagcaggcttccaggagctactccagggcttaccaccgtggagattgtgactatgtcccaccaggcactgggtgacgtcgcaggacggggaaatgagaaaaaaccctcgagcgtgagggcattgtcgattgtgcttcctatcgtgttgctggtctttctgtgtctcggagtgtttcttctctggaagaactggagactgaagaacataaacagcatcaactttgacaacccagtctaccaaaaaactactgaagatgaagtccatatctgccataatcaagacggttactcctacccctccagacaaatggtgagcctcgaggatgacgtggcc

SEQ ID NO: 11417 - DNA, 2580 bp, Artificial Sequence
  derived and/or modified sequence
atgggaccgtggggttggaagctgaggtggaccgtcgctctgctcctggcagccgcaggaaccgcggtcggggatcgctgcgagcggaacgagtttcaatgtcaggacggaaagtgcatctcttacaaatgggtgtgcgacggctccgccgagtgccaggatggttccgacgaatcgcaggaaacttgcctgagcgtgacttgcaaatccggagacttctcgtgcggaggacgggtgaatagatgcatcccacagttctggaggtgtgacggacaggtcgactgcgataacggatccgacgagcagggctgccctccgaaaacctgttcgcaagatgagtttcggtgtcacgatggaaaatgcatctcgagacaattcgtgtgcgattcagatcgggactgcctggatggctcagacgaagcatcctgtcctgtgctcacctgcggcccagcttctttccagtgcaattcgtccacgtgtattccgcagttgtgggcgtgcgacaacgacccggattgcgaggacggtagcgacgaatggcctcaacggtgcaggggactctacgtgttccaaggggactcatcaccgtgctcagccttcgagtttcactgcctgtcgggagaatgtattcactcctcctggcgctgcgatggagggcccgactgcaaggataaatcagatgaagaaaactgcgcggtggctacttgcagaccggacgaattccaatgcagcgatggtaactgcattcatggatcccggcaatgcgaccgggagtatgattgcaaagatatgtcagatgaagtgggttgtgtgaacgtgaccctgtgcgaaggcccgaacaagtttaagtgtcattcgggggaatgcatcactctggacaaggtgtgcaacatggcgcgtgactgcagggattggtccgacgagccgataaaggagtgtggtaccaacgaatgtctcgataacaatggcggatgctcccatgtgtgcaatgatctcaagatcggggctgagtgtctgtgcccagacggattccagctggtcgctcagcgccggtgtgaagatatcgatgaatgtcaggacccagacacctgctcacagctctgcgtcaatctggaaggtggatacaagtgccaatgtgaggaaggtttccaactcgacccgcacaccaaagcgtgtaaagccgtggggagcattgcttatctctttttcactaatcggcatgaagtcagaaagatgacccttgacagatcagaatacacctcccttatcccgaatttgagaaacgtggtcgccctggataccgaggtggcgtccaacagaatctactggtcggacctgagccagcgaatgatttgttcgacccaactggatcgggctcacggcgtgtcgagctacgacaccgtgatctcgagagacatccaggccccagatggactcgccgtggattggatccactctaacatctactggaccgactcagttcttggcaccgttagcgtcgccgacactaagggagtgaaacgaaagaccctgtttagggaaaatggaagcaaaccacgggcgatagtggtggaccccgtgcatggcttcatgtactggacggactggggaacgcccgcaaagatcaagaagggtggactcaacggcgtggacatctactcgctggtgactgagaatatacagtggcctaacggaatcacgttggatctgttgtcgggcaggctgtactgggtggattccaagctccatagcatttcgagcatcgatgtgaacgggggaaaccgaaagactatcctcgaagatgagaaacgcctcgcgcacccgttctccctcgccgtgttcgaggataaggtgttctggaccgacatcatcaatgaggcaatcttcagcgccaatcggttgaccgggtcggatgtgaacctgctggcggagaacctgctttctccggaggacatggtcttgttccacaacctcacccagccccgaggagtcaattggtgtgaacgcactactctgtcaaacgggggatgccaatacctgtgcctgcctgccccgcagatcaacccacactccccgaaattcacctgcgcatgcccggacggaatgctgctggccagagacatgcgctcttgcttgactgaagctgaagccgccgtggccactcaagagacgtccactgtgcgccttaaagtctcctcgacggctgtgagaacccagcacaccaccacgcggccggtgcctgacactagcagactcccgggtgcaacgccgggactgaccaccgtggagattgtgaccatgtcgcaccaggcccttggcgacgtggcaggacgcggcaacgagaagaagccgtcctccgttcgcgctctgtcgatcgtcttgcccatcgtgctcctcgtgtttctgtgccttggagtctttctgctgtggaagaattggcgtctgaagaatatcaattccatcaacttcgacaacccagtttaccagaaaactaccgaagatgaggtccatatctgccataaccaagatggctacagctatccatcccgccagatggtgtcgctcgaagatgacgttgcc

SEQ ID NO: 11418 - DNA, 2580 bp, Artificial Sequence
  derived and/or modified sequence
atgggaccctggggttggaaactccgctggaccgtggccctgctgttggccgccgcgggtaccgcggtcggagataggtgcgaacgcaatgagtttcaatgccaggacggaaaatgcatctcgtacaagtgggtgtgcgacggatccgctgagtgccaggatggatcagacgaatcacaagaaacttgcctctccgtgacttgcaagagcggagacttcagctgtggtggaagagtgaatcgttgtatcccccagttttggcggtgcgatgggcaggtcgactgcgataacgggtccgacgaacagggttgtccaccgaaaacctgctcccaggacgagtttagatgtcatgatggcaagtgcatcagcagacagttcgtgtgcgactccgatcgggactgtctggatggcagtgatgaagcctcctgccccgtcctgacgtgcggaccggccagcttccagtgcaattcgtcgacttgcatacctcagctttgggcctgtgacaatgaccctgactgtgaagatgggtccgacgagtggccgcaacgctgtaggggcctttatgtgttccaaggtgattcgtctccgtgctcggctttcgaattccactgcctcagcggagaatgcatccattcctcctggcgctgcgatggcggtcctgactgcaaggataaaagcgacgaggagaactgcgccgtggcaacttgccggccggacgagtttcagtgttccgacgggaactgcatccatgggtcaaggcaatgcgacagagagtacgactgtaaggacatgtccgatgaggtcgggtgcgtcaacgtgactctgtgcgagggaccgaacaagttcaaatgtcatagtggcgaatgcattaccctggacaaggtgtgcaacatggctagagattgccgggattggagcgacgagcctatcaaggagtgtggcacgaacgaatgccttgacaacaacggtggatgttcgcacgtctgcaacgatctgaagattggagctgaatgtctctgccctgacgggtttcaactcgtggcacagcgtcgctgcgaggacattgatgaatgtcaggacccagacacctgctcgcaactctgtgtcaacttggaaggagggtacaagtgccaatgcgaggaaggcttccaactcgacccgcataccaaggcttgtaaagcagtgggctctatcgcctacctgttcttcaccaatagacacgaggtgcgcaagatgacgctggatcggtcggaatacaccagcctcatccctaacttgcggaatgtggtcgccctggacactgaagtcgcgagcaaccgcatctactggtcagacctgtctcagcgaatgatctgttccacgcaactcgacagagcccacggcgtgtccagctacgacaccgtgattagccgggatatccaggccccagacgggctggctgtggactggattcactccaatatctactggaccgactcggtgctcggcactgtctccgtggcggacaccaagggtgtgaagcgaaagaccctcttccgcgaaaacggttcgaagcctagagcaattgtggttgaccctgtgcacgggttcatgtactggactgattggggaaccccggccaagatcaagaagggaggactcaacggagtggatatctactcgctggtcaccgagaatatccagtggccaaatggaatcaccctcgatctcctttcagggcgtctgtactgggtcgactccaagctgcactcaatctcctcaatcgatgtaaacgggggcaatcggaaaactatcttggaagatgaaaagcgcctcgcccatcctttttcgctggctgtgttcgaggataaagtgttctggaccgatatcattaatgaggccatcttttcggcgaatcgccttactggaagcgacgtgaaccttctggcggagaatttgctgtcgccggaagatatggtgttgttccataacctgacccaaccacggggcgtgaactggtgcgaacggactactctgtcaaacggcggatgccagtacctgtgcctccccgcaccacaaatcaatccgcactcgcccaaattcacgtgcgcgtgcccggacgggatgctgctggcacgggatatgcggtcctgcctgaccgaggccgaggcagccgtcgcgactcaggaaacgtcaaccgtgcgcctcaaggtgtcgtcgactgcggtccgaactcagcacactaccactagaccggtaccggatactagccgcttgcccggagctaccccaggcttgaccactgttgagatcgtaactatgtcgcaccaggcactgggcgacgtcgctggacggggaaatgaaaagaagccgtcgagcgtgcgggccttgtccattgttctgccgattgtgctgctggtgttcctgtgtctcggagtgttcctgctgtggaaaaactggcgactgaaaaacattaactcgatcaacttcgacaacccggtttaccagaaaaccactgaggatgaagtccacatctgccacaatcaagatggctacagctatccgtcaagacagatggtatccctggaggacgacgttgcc

SEQ ID NO: 11419 - DNA, 2580 bp, Artificial Sequence
  derived and/or modified sequence
atgggtccctggggctggaaacttagatggactgtcgcactgctccttgcagcggcgggaactgctgtgggtgatcgctgcgaacgcaatgaatttcagtgtcaagacgggaagtgcataagctacaaatgggtctgcgatggatccgcggaatgccaggatggttccgatgagagccaagaaacttgcctttccgtgacttgtaagagcggcgacttctcgtgtggtggcagagtgaatcggtgcatcccacaattttggcggtgtgatggacaagtggactgcgacaacgggtccgatgaacagggatgcccaccgaaaacttgctcgcaggatgaatttagatgtcatgatggaaaatgtatctcccgccagttcgtgtgcgatagtgatcgggactgcctggatggttcggatgaagctagctgtccagtgctgacttgtgggcccgctagctttcaatgcaactcctcgacttgtattcctcagctttgggcctgtgataacgaccctgactgcgaagatggctccgatgaatggccgcagcggtgcagagggctctatgtgttccaaggcgatagcagcccttgctcagcatttgaattccattgtctgtcgggagaatgtatccactcaagctggcgatgcgatggtgggcccgattgcaaggacaaaagcgacgaggagaattgtgccgttgccacgtgtcgccctgatgagttccagtgttcggacggcaactgtattcatggatctcgacagtgtgatagagagtacgactgcaaagacatgtcggatgaagtgggatgtgtgaacgtgactctgtgtgaagggcccaacaagttcaaatgccactccggtgaatgtatcacgctggacaaggtgtgtaacatggcacgagactgtagggattggtctgatgaaccgattaaggaatgcggaaccaacgaatgtctggataacaatggaggatgctcccacgtctgtaatgatctgaagattggtgcagagtgcttgtgtcctgatggttttcaactggtggcccaaagacgttgcgaggatatcgatgaatgtcaagatcctgatacttgttcccagttgtgcgtgaacctcgaaggaggttacaaatgtcaatgcgaagagggattccaactggacccccacactaaggcctgtaaagcagtgggaagcatcgcatacctcttctttaccaatcgccatgaggtccggaagatgactctggataggtcggaatacacctcgctgataccgaacctcaggaatgtggtggccctggataccgaggtcgcatcgaatagaatttactggtcggatctctcccaaaggatgatttgctccacccaacttgatcgcgcccacggcgtctcatcctacgacaccgtgatctcgcgtgatattcaagccccagacggactggcagtcgactggatccattccaacatttactggactgactcggtcttgggtactgtctccgtggcagacactaagggtgtcaagagaaagactctctttcgcgagaacgggtcaaagccacgggcaatcgtcgtggatccggtgcacggctttatgtactggaccgattggggaaccccagcaaagatcaagaaaggaggtcttaacggtgtcgacatctattcgcttgtcaccgaaaacatacagtggccaaacgggataacccttgaccttctttcgggacgtctctactgggtggattccaagctgcacagtatctcgtccattgacgtgaatggaggtaatagaaagacgattcttgaagatgaaaagaggctcgctcacccgttttcgcttgctgtgtttgaggataaagtgttttggactgatatcattaacgaagccatattctccgcaaatagactgactggttcagatgtgaacctgcttgcagaaaacctgctttcaccagaagatatggtgctttttcataacttgactcaaccccgtggcgtgaactggtgtgaacgaaccacgctgagcaatggcggatgtcagtacctttgcctgcctgcaccccagatcaacccgcatagtcccaaattcacctgtgcatgccccgacggaatgttgctggccagagacatgcgctcttgtctgaccgaagcggaagcagctgtggcaacccaagaaacctctactgtgcgacttaaggtgtcatcgaccgcagtgcggactcaacacaccaccaccagacctgtccctgacacgtcgcggctgccaggtgcgactcccggcctgaccaccgtggaaatcgtgaccatgagccaccaagccttgggagacgtcgcaggtaggggaaacgagaagaaaccatcgtccgtgcgcgccctgtcgattgtgttgccaatagtgctgctggtgttcctttgccttggggttttcctgctgtggaagaactggcggctgaaaaacatcaattccattaacttcgataatccagtgtaccaaaagactaccgaggatgaagtgcatatatgtcacaaccaggacgggtacagctacccatcgagacagatggtgtccctggaggatgacgtggca

SEQ ID NO: 11420 - DNA, 2580 bp, Artificial Sequence
  derived and/or modified sequence
atgggaccttggggttggaagctgcgttggaccgtggcactgctgcttgcagccgccggaaccgctgttggagatcgatgcgaacggaacgagtttcagtgtcaagacgggaagtgtatatcgtacaagtgggtgtgtgatggatcggccgagtgtcaggatggaagcgatgaatcccaggaaacttgtctttccgtgacttgcaaaagcggagatttttcgtgtggaggtcgtgtgaatagatgcatccctcagttttggaggtgcgatggacaagtggattgtgacaatggttctgatgaacagggctgccctcctaagacctgctcccaagatgaatttcgctgtcatgacggaaagtgcatttcccgacagttcgtctgcgattcagacagagactgtcttgacggatccgatgaagcatcatgtccagtccttacctgcggacccgcctcgtttcaatgcaatagctccacctgtatccctcagctctgggcttgtgataatgaccctgattgtgaggatggctcagacgaatggccacagcggtgtcgaggcctgtacgtattccagggcgattccagcccatgttcggcatttgaattccattgcctctcaggagagtgtatccattcgagctggcggtgtgatggaggtcctgactgtaaagataaatcagatgaagaaaactgtgccgtggctacgtgtagacctgatgaatttcagtgcagcgatggaaactgtatccatggctccagacagtgtgaccgagaatacgattgtaaagatatgtcagacgaagtcgggtgtgtcaacgtgactctgtgcgaaggaccaaacaagtttaagtgtcactcgggcgagtgcattactcttgataaagtgtgtaacatggcacgcgattgtcgggattggtcggatgagccaattaaggaatgtgggactaatgagtgcttggacaacaacgggggctgttcccatgtgtgcaacgatctgaaaattggtgcagaatgtctgtgtcctgatggctttcaactggtggcccagagaagatgcgaagatatcgatgagtgccaggatcccgacacttgttcgcaactctgcgtcaaccttgaggggggctacaaatgtcaatgtgaagagggcttccagttggatccccatactaaggcctgtaaggcggtgggttccatagcatacctgtttttcaccaatcggcatgaggtgcgtaagatgaccctggacagaagcgagtacactagcctgattcctaatctccgcaacgtggtggctctggatactgaggtggcatccaatcggatctattggtcggatctctcccagaggatgatctgttcgacccagcttgatagagcacatggtgtctcgtcgtacgataccgtgatttccagggacattcaggcacctgatggactcgcagtcgactggatccattcgaacatttactggactgattccgtgcttggaactgtgtccgtggccgacactaagggcgttaagaggaaaacgctcttcagagagaacggatccaagcctagagcaattgtcgtggaccccgtccatggatttatgtactggacggactggggaactccagcgaagataaagaaggggggattgaatggagtggatatctactcgcttgtgaccgaaaacatccagtggcctaacggcatcacccttgatcttcttagcggacgtctttactgggtggatagcaaacttcatagcatttcaagcatcgatgtcaacggtggtaacagaaagactatccttgaagatgagaagcgactggcacatcccttttcgcttgccgtgtttgaagataaggtcttttggaccgacatcattaacgaggcaatcttcagcgcaaaccgccttacggggagcgatgtgaatctccttgccgaaaaccttctgtcaccggaagatatggtgctgttccacaatctcacccaacctaggggagtgaactggtgcgagcggaccaccctcagcaacggcggttgtcaatacctgtgtctgccagcacctcagataaatcctcacagccccaagtttacttgcgcgtgtcctgacggaatgcttctggcacgagatatgcgtagctgtttgaccgaggcggaggcggccgtggcaactcaggaaacttccaccgtgagacttaaggtgtcctctaccgcagtgcggacccaacataccaccaccaggcctgtcccagacacctcaagacttccaggtgcgacgccaggtcttacgactgtggagattgtgactatgagccatcaagcactgggagatgtggccggccggggaaatgaaaagaagccttcatcggtgcgcgccctttcgatcgtcctgccaattgtgcttctggtgtttctttgtctgggcgtgtttttgctttggaagaactggcggctgaagaacattaacagcataaactttgataacccagtgtaccaaaagactaccgaggacgaagtgcacatatgtcataatcaagatgggtactcttacccatcgaggcaaatggtgtcgctggaagatgatgtcgca

SEQ ID NO: 11421 - DNA, 2580 bp, Artificial Sequence
  derived and/or modified sequence
atgggcccatggggttggaagttgagatggacggtggcactgcttctggcagcagcaggaactgcagtgggagatagatgcgaaaggaacgaattccaatgccaggatggtaagtgcatttcatacaaatgggtgtgtgacggttccgcagaatgtcaggatggttctgatgagagtcaggaaacttgcctctcggtgacttgtaagagtggtgattttagctgtgggggacgtgtgaatcgctgcattcctcaattttggaggtgtgacgggcaggtggactgcgacaacggatccgacgagcaaggatgtccaccaaaaacctgttcgcaggacgagtttcggtgtcacgacggaaagtgtattagtagacaatttgtatgtgattcggatcgtgattgtcttgacggttcagatgaagccagctgccctgtgctgacctgtggcccagcctccttccaatgcaattcatcgacttgtattccccagctgtgggcatgcgacaacgatcctgattgtgaagatggttcggatgaatggccccagcgatgcagaggcctgtacgtgttccagggagatagctcaccgtgttccgcttttgaatttcattgtctttcgggggaatgcatacattcatcctggcgctgcgacggcggacccgattgcaaggacaagagcgacgaagagaattgtgcagtcgccacgtgtagaccagacgaatttcaatgctccgacggtaactgtatccacggttcgcgtcaatgcgatagagagtacgattgtaaggacatgagcgatgaagtgggatgtgtaaacgtgaccctttgtgagggtccaaacaagttcaaatgccattcgggtgaatgtatcacccttgacaaagtctgcaatatggcgcgcgattgccgcgattggtccgatgaacctattaaggaatgtggaaccaacgaatgtcttgacaacaacggcggctgctcgcacgtttgcaacgatctgaagattggagctgaatgtctttgtcccgacgggtttcaactcgtcgcacaacggcggtgtgaggacattgatgagtgtcaggatcccgacacttgtagccaattgtgtgtgaaccttgaagggggctacaaatgtcagtgcgaggaaggcttccaactcgatcctcatacgaaagcatgcaaggctgtcggatccattgcatacctgttctttactaatcgccatgaggttagaaaaatgactcttgaccgatcagaatatacttctcttatccctaacctgagaaatgtcgtggcactggatactgaggtggcctcaaatcgcatctattggagcgatctgtcccagaggatgatttgttccactcaacttgatcgagcgcacggtgtctcgtcgtacgacaccgtgatttcgcgggatattcaagcccctgatggactcgcagtagactggatccattcaaacatctactggactgattcagtgctgggaaccgtgtcagtggctgataccaagggagtcaaacggaaaaccttgtttagagagaacggatcgaagccccgagccatcgtcgtcgatccagtgcatggcttcatgtactggacggattggggcactcctgcgaagatcaaaaagggaggcctcaatggagtggacatttactcccttgtgaccgagaacattcagtggccgaacggcatcacgctggaccttctctcggggagattgtactgggtggactcgaagctccactctataagctccattgatgtgaacgggggcaatcggaaaactatccttgaagatgaaaagcgcctggcacatccgttttccctcgcggtgtttgaggataaggtattttggactgatatcattaatgaagcgatcttttcggccaatcgcctcactggatcggatgtcaaccttctggccgaaaaccttctttcccctgaggatatggtcctgttccataatctcacccaaccacgtggtgtgaactggtgtgaaagaaccacccttagcaatggaggctgccaatacctttgtttgcctgcccctcagattaaccctcactccccaaagttcacctgcgcgtgtccagacggtatgctgcttgcccgagatatgcgtagctgtttgactgaggcagaagcagcggtcgcaactcaggaaaccagcaccgttcggctgaaggtcagttcaaccgctgtgcggacccaacatacgacgaccagacctgtccctgacacgtcgcggttgccgggtgcaactcccggattgaccactgtggagatagttaccatgagccatcaagccctcggagatgtcgcaggaagaggaaacgagaaaaagccctcgtccgtccgagcactttccattgtccttcctatcgtgcttctggtgttcctttgtctcggtgtgtttctgctgtggaagaattggagactcaagaacataaactcgattaactttgataatccagtgtaccagaaaaccaccgaagatgaagtgcacatatgtcataatcaagacgggtacagctacccatcccgacaaatggtgtctctggaagatgacgtggca

SEQ ID NO: 11422 - DNA, 2580 bp, Artificial Sequence
  derived and/or modified sequence
atgggcccatggggatggaagctccgctggactgtcgctctccttttggccgctgcaggaaccgcagtgggggataggtgcgagaggaatgagttccaatgccaggatggaaaatgtatttcatataagtgggtctgcgacggatccgcagagtgtcaggacggcagcgacgaatcccaggaaacatgcctctcagttacatgcaagtccggcgacttttcttgtggtgggagagttaaccggtgtattcctcaattctggcgatgcgacgggcaggtcgactgcgataatgggagcgatgagcaagggtgtcctcctaaaacttgtagtcaggacgagttcaggtgtcacgatgggaaatgtatttctagacagttcgtgtgtgatagtgatcgcgactgcttggacggctcagacgaggccagctgccccgttctgacgtgcgggcctgcttccttccagtgtaactcttctacttgcatccctcagctctgggcctgcgacaacgaccctgactgtgaagatgggtccgatgaatggccgcagcgctgcagagggctctatgtttttcagggagattctagcccttgctctgcattcgagttccactgcctgtcaggcgagtgcatccactcttcctggcggtgcgacggtggtcccgactgcaaagataagtccgacgaggaaaactgcgccgtcgctacctgccggcccgatgaattccagtgtagcgatggaaactgtatccacggctcaagacagtgtgatcgagagtacgactgtaaagacatgagcgatgaggtcggctgtgtaaacgtcaccttgtgtgagggccccaacaaattcaagtgtcactcaggcgagtgcatcaccctggataaggtgtgtaacatggctagggattgtagagattggagcgacgagcccattaaagagtgcggaacaaacgagtgcctggataacaacgggggatgctcacacgtgtgcaacgacttgaagattggagcagagtgcctgtgcccagacggctttcagctcgtggcgcagcggaggtgtgaagacatcgacgaatgtcaggatcctgatacctgcagtcagctgtgcgtcaacctggagggaggatacaaatgtcaatgcgaggagggctttcagctggacccccatactaaagcctgtaaagccgttggttctattgcgtatctgtttttcactaataggcacgaagtgcggaagatgaccctcgacaggagcgaatacacaagcttgattcctaacctgcgaaatgtcgtcgccctggacaccgaagtggctagcaataggatctattggagcgatctctctcaacggatgatttgctcaactcagctggatcgagcgcacggcgtgagctcttatgacacggtgatatccagggacattcaggcacctgatgggctggccgtagactggattcactctaatatctattggaccgactccgtgctcggaaccgtctctgttgctgataccaaaggggttaagcgaaagactttgttcagagagaacggtagtaaaccgcgggcgatcgtcgtggacccggtgcatggtttcatgtattggactgattggggcactccagcaaaaattaaaaaaggaggccttaacggggtagatatctactccttggtaacagagaatattcagtggccaaatgggattaccctggatctcttgagcgggcgcctgtactgggtggatagcaagctccatagcatctcaagtatcgacgtgaacggtggcaacaggaaaacaatcctggaggatgagaagcgcctggcccatcccttctcactggctgttttcgaagataaagtattctggactgatattataaacgaagcaattttttccgccaacaggctgacagggtccgacgtgaacttgctggcagaaaacttgttgagccccgaggatatggtcctcttccataaccttacccagccaagaggtgtcaactggtgcgagcgcacaacactgtcaaacggcggttgccagtacctgtgcctgccggccccgcagatcaaccctcacagccctaagtttacctgtgcatgccccgatggaatgcttcttgcacgggatatgaggtcctgtctgactgaggctgaagcggccgtggcgacacaagagaccagcacggtcagactgaaggttagtagcaccgctgtgaggacacagcacactactactaggcccgtgccagacacatcacggctgcccggggccacccccgggctgacaactgtggaaatagtgacgatgagccaccaggctttgggcgatgtggcaggaagaggcaatgagaagaaacccagcagtgttagggccctttctattgtactgcccatcgtgctgctggtttttctgtgcttgggtgttttcctcttgtggaaaaactggagactgaagaacatcaacagcattaactttgataaccccgtctaccagaaaaccacagaagatgaggtgcacatatgtcacaatcaggatgggtatagctacccctctcgccaaatggtgtcactggaagacgatgtggca

SEQ ID NO: 11423 - DNA, 2580 bp, Artificial Sequence
  derived and/or modified sequence
atgggcccgtgggggtggaaactacggtggaccgtggccttgttgctggcagccgctggcaccgctgtgggcgacagatgtgagcggaacgagttccagtgtcaggacggtaagtgcatctcctacaagtgggtgtgcgatggcagtgctgagtgccaggacgggtctgacgagtcgcaggaaacgtgtctgagcgtgacctgcaagtctggtgatttctcatgtggagggagggttaaccgctgtataccgcagttctggaggtgtgatgggcaagtagactgtgataacggaagcgacgagcagggctgtcctccgaaaacatgcagtcaggacgagtttcggtgccacgacggtaagtgcatctccagacaattcgtctgcgactccgacagggattgtctggatggatccgatgaggcctcctgccctgtactcacctgtggccccgcctcgtttcaatgcaatagctctacgtgtattccccagctctgggcctgcgacaacgaccctgactgcgaggacgggtctgacgagtggcctcagagatgccgtggactgtacgtgttccaaggagactcctctccgtgttctgcttttgagttccattgcctctccggcgagtgcatccacagtagttggaggtgcgatggcggaccggactgtaaggacaaaagcgacgaagagaattgcgccgtggctacctgcaggcccgacgagttccagtgcagcgacgggaattgcatccatggtagccggcagtgtgaccgggaatatgactgtaaagacatgtcggatgaggtgggttgcgtaaacgttacactgtgtgagggcccaaacaaatttaaatgccattctggggaatgcattaccctcgacaaagtgtgtaacatggctagggattgtagagattggtctgatgagcccataaaagagtgtggtaccaatgagtgccttgacaataatggtggctgttctcacgtgtgtaacgatttgaagatcggagccgaatgtctatgtccggatgggtttcagttggttgcccagcgacggtgcgaggatattgatgagtgccaggatcctgacacctgctcccagctctgtgtcaacctggaaggaggctacaagtgccaatgcgaagaaggttttcagctggacccacacactaaggcatgcaaagccgtgggatctatagcgtaccttttcttcacgaatcgccatgaagttcggaagatgaccctggaccggagcgaatacactagtctgattcccaacctgcgtaatgttgtagctcttgacacagaagtcgcttccaatcgtatttactggtctgacttgtcacagaggatgatctgctcgacacagttggaccgcgcccatggagtgtccagctatgacacagtgatatcaagagatatccaagcccctgacggactagcagtggattggattcactccaacatttactggactgactcagtgctgggcacggtgtccgtcgctgacactaagggggtgaaacgaaaaaccctgttcagagaaaatggaagcaagccacgggcaattgtggttgaccccgttcatgggtttatgtactggactgactggggtaccccagctaaaatcaaaaaaggagggcttaatggcgtcgatatttactcgcttgtgacagaaaacattcaatggcctaatggaatcactctggacctgctaagcggaagactgtactgggtcgattcaaagctgcactctatcagctccatcgatgtgaatgggggtaataggaaaaccattctcgaagacgagaagcggttggcccaccccttctccctcgcggtatttgaagacaaagtgttttggactgacattatcaatgaggctatctttagcgccaatcggctaacaggctccgacgttaatttgctggctgaaaatctgttatctcccgaggatatggtcttatttcataacctaacacagccaagaggcgtcaattggtgtgagaggaccacgctgtccaatgggggctgccagtatctctgcctccctgctccgcagatcaacccccattctccaaagttcacatgcgcctgccccgacgggatgctgctggccagagacatgaggagttgtctcaccgaagccgaagctgcagtggctacgcaggagacttctaccgtacgactgaaagtgtcatccactgcggtcaggacgcagcataccacgacaaggcctgtgcctgacacctcgcggctccccggagcaactcccggcctgaccaccgtggaaatagttactatgagccatcaggcgttgggcgacgtggccggcagaggcaacgagaagaagccctcctctgtcagagccctctcaatcgtgctgccaatagtgctcctcgtctttctgtgcttgggcgtgtttctactatggaagaattggaggcttaaaaatatcaactcaattaactttgacaaccccgtttatcagaaaaccaccgaggatgaggtacacatctgtcataaccaggatggctacagctaccccagccggcagatggtcagcctggaggacgacgtcgcc

SEQ ID NO: 11424 - DNA, 2580 bp, Artificial Sequence
  derived and/or modified sequence
atgggaccatggggttggaagctcaggtggaccgtggcgttgctcctggctgccgcagggaccgcggtgggtgatcgatgtgagcggaacgagtttcaatgccaagacggtaagtgcatctcttataagtgggtgtgtgacgggtcggccgaatgtcaagatggttcggacgaatcgcaagagacgtgtctgtccgttacctgtaagagtggagacttttcctgcggaggtcgagtgaaccgatgcattccccagttctggcgttgtgatggtcaggtcgattgtgataacggatccgatgaacagggttgcccacctaagacctgttcgcaagatgagtttagatgccatgacggaaagtgtatttccagacagtttgtgtgcgatagcgatagggactgtctggacgggtccgatgaagcaagttgccctgtcctgacctgcggccctgcatcctttcaatgcaattcctcgacttgcattcctcaactctgggcttgtgacaacgatccagactgtgaagatggctcggacgaatggccgcagcgctgtcgtggcctctacgtctttcagggcgacagcagcccttgttcggcatttgaattccactgtctgagcggcgagtgtattcacagcagctggcgatgtgacggaggacccgactgtaaggacaagtcggatgaggagaactgtgcagtggcgacttgcagacctgacgagttccaatgttcggatggtaactgtattcatggctcgagacagtgtgaccgcgaatacgattgtaaggatatgagcgatgaagtcggctgcgtgaacgtcaccctttgtgaaggaccaaacaagtttaagtgtcattccggagaatgcattaccctggataaggtgtgtaacatggcccgagattgcagggactggtcagacgagcccattaaagagtgtgggaccaacgaatgtctggataacaacgggggatgctcgcatgtgtgcaatgatctcaagatcggagcggaatgcctttgcccggatggattccagttggtggcacaaagacggtgtgaggatatcgacgaatgccaagatcctgatacctgctcccagctttgtgtcaacctggagggcggttacaagtgtcaatgcgaggaagggtttcagcttgatccacataccaaggcatgtaaggcagtgggaagcattgcctacctctttttcactaacagacatgaagtcagaaaaatgactttggaccgttcggagtatacctcgcttattccaaatctcagaaacgttgtcgccctcgacaccgaggtggcatcgaaccgtatatactggtcagacttgtcacagaggatgatttgttcgacgcagcttgacagagcacatggtgtgtcctcttacgataccgttattagccgcgacattcaggcccctgatgggcttgcagtggattggatccattcgaacatttactggactgatagcgtccttggtactgtgtcagtggcagatacgaaaggtgttaagagaaaaaccctgtttcgagaaaacggtagcaaacctagggctatcgtggtggatccggtgcacgggtttatgtactggaccgattggggaacccctgccaagataaagaagggtggtcttaacggcgttgacatttactcgctggtgactgaaaacatacaatggccaaatgggattactcttgatcttctgtccggtcggctgtactgggtggactccaagctccattcgatctcgtcaatagatgtcaacggaggaaaccgcaagactatccttgaagatgaaaaaagactggcgcatcctttttcgctcgcagtctttgaagataaggtgttttggactgatatcatcaacgaggcaatattctcagccaatcgtctcaccggttcggatgtcaatctcctggcagaaaatcttctgtcccctgaggatatggtgctttttcataacctgacccaaccacgcggcgtcaattggtgtgaacggactacgctttcgaacggaggttgtcagtacctgtgcctgcctgcccctcagattaacccccactcgcctaagtttacctgtgcatgccccgatgggatgcttctcgcgagagacatgcgctcatgcctgactgaagcagaggcggcagttgcaactcaggaaacgagcactgtgagactgaaagtgtcctccaccgcagtgagaacccaacacactaccacgaggcccgtgccggatacctccagactgcctggtgcgaccccagggcttactaccgtggaaattgtgaccatgtcccatcaggctcttggagatgtggcaggtagaggcaacgagaaaaagccctcctccgtgcgtgcattgtcgattgtgttgcctatcgtcctccttgttttcctctgtcttggcgttttccttctttggaagaactggagacttaagaacattaactcaattaacttcgacaatcctgtctaccaaaagacgacggaagatgaagtgcatatttgccacaaccaagacggatactcgtacccttcacggcaaatggtttcgctcgaagatgacgtggcg

SEQ ID NO: 11425 - DNA, 2580 bp, Artificial Sequence
  derived and/or modified sequence
atgggaccatggggatggaagctcaggtggaccgtagccctcctcctggcggcagcgggaaccgccgtgggagatagatgtgaacgcaatgaattccagtgccaggatggaaagtgtatatcgtacaagtgggtctgtgacggtagcgcagaatgtcaagatgggtcggacgagagccaagaaacgtgcctgtctgtgacctgtaagagcggtgatttttcgtgtggaggccgcgtcaacaggtgcattccacaattctggaggtgtgatggtcaggtggactgcgataacggatcagatgaacagggctgtcctccaaaaacgtgctctcaggatgaatttaggtgccatgatggtaagtgcatctccagacaattcgtttgtgattcggatagggattgtttggatggtagcgacgaagcaagctgtccggtccttacctgtggccccgcctcattccaatgtaactcgtcaacctgtatccctcaactttgggcatgcgataacgatccagattgtgaagatggatcagacgaatggcctcaaagatgtcgcgggctctacgtgttccagggtgacagctcgccatgctcggcatttgaatttcactgtctgtccggagagtgcatacattccagttggagatgtgacggtggacccgactgcaaagacaagagcgacgaagaaaattgtgcggtcgcaacttgtagaccagatgaatttcaatgcagcgatggaaactgtattcacggcagcagacaatgcgatcgcgagtacgactgtaaggacatgtccgacgaagtgggctgtgtcaacgtgaccctgtgcgagggtcccaacaaattcaagtgtcactctggcgaatgtataactctcgacaaagtgtgtaacatggctcgggactgcagagactggtctgacgaacctattaaggagtgtggtacgaacgaatgccttgataacaatggtggatgctcgcatgtctgtaatgatctcaagattggcgccgaatgtctgtgccctgatggctttcagttggtggcccaacgtagatgtgaagatatcgatgagtgtcaagacccggacacctgctcccaactgtgtgtgaatctggaaggtggatacaagtgtcaatgcgaggagggttttcagcttgaccctcacactaaggcctgcaaggcggtgggttcgatagcctacctgtttttcaccaaccgtcatgaagtcagaaagatgaccctggacagatccgaatacacctctctgattccaaacctgaggaacgtggtggcactggacactgaggtcgcatccaatcgcatttactggagcgatctgagccagcggatgatatgctctacccagctggatagagcacatggtgtgagctcgtacgatactgtcatttcacgtgatatccaggcacccgatgggcttgctgtggattggatacattccaacatatactggaccgactccgtgcttggaacggtgtcggtcgcagatactaagggggtcaaaagaaaaacgctgtttcgggagaatgggtcaaaacctcgagctatagtggtcgatcctgtgcacggattcatgtattggaccgattggggaactccagcaaagataaagaaaggtggacttaatggagtcgacatttactccctggtcaccgaaaacattcagtggcccaatggcattacgctggacctgctgtccggcagactttactgggttgattcaaagctgcattccatttcgtcgatcgatgtgaatggcggcaatcgcaagactattctcgaagatgagaaaagacttgcgcatcctttttccctcgcagtctttgaggacaaggtgttttggaccgatatcattaacgaggccatcttttcggccaatcgcctgaccggatcggatgtgaaccttcttgccgagaaccttctttccccagaagatatggtcctttttcacaacctcacccaaccacgaggcgtgaactggtgcgagcgtaccactctgagcaatggaggttgtcagtacttgtgtctcccagcgcctcagatcaaccctcattcgcccaagttcacctgcgcatgccctgacggcatgctgctggctcgcgatatgcgcagctgcctcactgaagcagaagccgccgtcgctactcaggaaacgtcaacggtgcggctgaaagtcagctccacggccgtgcgtacgcaacacactactacgaggccggtgccagatacttcccgattgcctggagcgactccaggactcactactgtggaaatcgtgaccatgagccatcaggcacttggagacgtggcaggtcggggcaacgaaaagaaaccaagctccgttagggccttgtcaattgtgctgccaatagtacttttggtgtttctgtgtcttggcgtgttcctgctgtggaagaactggaggctgaagaatatcaactcgattaactttgacaaccctgtgtaccaaaagaccactgaggatgaagttcatatatgtcataaccaggatggatacagctacccttcgcgccaaatggtgtcactggaggacgatgtggca

SEQ ID NO: 11426 - DNA, 2580 bp, Artificial Sequence
  derived and/or modified sequence
atgggcccttggggctggaagctgcgctggacagttgcacttctgttggcagctgccggcacagctgtgggggaccgctgcgagcgtaacgagttccagtgtcaggacggaaaatgtatcagctacaaatgggtgtgcgatggaagtgcagaatgccaagacgggtcggacgaatcacaggagacctgtctttctgtgacgtgcaaatctggtgatttttcatgcggcggccgcgttaatcgctgtattcctcaattttggagatgcgatggacaagtagattgcgacaatggcagcgatgaacaagggtgccctccaaagacatgctctcaggatgagtttagatgtcacgatggtaaatgcattagtcggcaatttgtgtgcgacagtgatagggattgcctcgatgggagcgacgaagcaagttgtcccgtcctgacctgcggaccagctagtttccagtgtaatagcagcacctgcatcccgcagctctgggcttgtgataacgacccggactgcgaggacggatcagatgaatggccccagaggtgtcggggactttacgtattccagggagactcttcaccatgcagcgcctttgagttccattgtctgtccggggaatgcatccacagttcttggaggtgtgatggcggcccagattgtaaagataaaagcgatgaggaaaactgcgcggtcgccacctgtaggccagatgagttccagtgctcagacgggaactgcatacacggtagcagacagtgtgaccgagagtatgattgcaaggacatgtctgacgaagtgggctgcgtgaacgtcactctttgtgaaggacccaacaaattcaaatgccactctggcgaatgcatcacactcgataaggtgtgtaacatggccagagattgcagagactggagcgatgagccaatcaaggaatgtggcacaaacgaatgcctggacaacaatggcgggtgcagtcacgtatgtaacgatctgaagataggggccgagtgcctgtgtcccgatggattccagctcgtcgcgcaacgaaggtgtgaagatatcgacgaatgccaagatccagatacctgcagccagctttgtgttaatctcgaggggggatacaagtgccaatgtgaggaaggctttcagctcgatcctcacaccaaagcgtgcaaggccgtcggaagtattgcgtacctcttctttactaacaggcacgaagtacgcaagatgactctggaccggagcgagtataccagtctgattcctaacctaaggaacgtggttgcgctggacacagaggttgcatccaacagaatatactggagcgatctgtcgcaacggatgatctgttcaacccagcttgacagggcccacggcgtgtcaagttacgacacagtgatctcccgcgacattcaggctccggacgggctcgcagttgattggatccacagtaacatatattggaccgatagtgtactgggcaccgtgtctgtcgctgataccaagggcgtaaaacgcaaaactttgtttagagagaacggaagcaaaccaagagcaatcgtggttgacccagtacacggcttcatgtattggaccgactggggaactcctgccaagataaaaaaggggggactgaatggtgtggacatctacagcctcgtcacagagaacatccagtggcctaacggtattactctggatctgctgagcggcaggctttactgggtggatagtaagttgcactccatttcgtcaatcgacgtgaatgggggcaacaggaaaacaatcttggaagatgagaagcgactggcccaccccttcagcctcgccgtctttgaggataaggtcttctggacggacatcataaacgaagctatctttagtgccaataggctgacagggtcagatgtgaatttacttgcagagaatctgctgtcccctgaggatatggtgctgtttcataacctgacacagccgcgaggggtcaactggtgtgagagaaccactttgtccaatggcggctgccagtacctgtgcctgccagctcctcagattaatcctcactcacctaagttcacttgcgcctgccctgatggcatgttgttggccagggacatgcgctcctgcctgaccgaagccgaagctgcggtggctacccaggagacgtcaaccgtgcgtctgaaggtttcgtctaccgccgtgcgcacacaacatactacaacacgtcccgtccctgacacctcccggctccctggcgcaacccctggcctgacaacagttgaaatcgttaccatgagccaccaggctttgggcgacgtggctgggagaggaaatgagaagaaacccagttctgtgagggcgctcagcattgtgctacccatcgtattgcttgtgttcctttgcctgggagtgtttctcctctggaagaactggaggctgaaaaacatcaacagcattaattttgacaaccctgtctaccagaaaaccaccgaagacgaggtccacatttgtcataatcaagacggatacagctacccatctaggcaaatggtgagcctggaagacgacgtcgct

SEQ ID NO: 11427 - DNA, 2580 bp, Artificial Sequence
  derived and/or modified sequence
atgggtccgtggggttggaaattacgttggacggtagcgctattactagcggcggcgggtacggcggttggtgatcgatgtgaacgtaatgaatttcaatgtcaagatggtaaatgtatatcgtataaatgggtatgtgatggttcggcggaatgtcaagatggttcggatgaatcgcaagaaacgtgtctatcggtaacgtgtaaatcgggtgatttttcgtgtggtggtcgagtaaatcgttgtataccgcaattttggcgatgtgatggtcaagtagattgtgataatggttcggatgaacaaggttgtccgccgaaaacgtgttcgcaagatgaatttcgttgtcatgatggtaaatgtatatcgcgtcaatttgtatgtgattcggatcgtgattgtctagatggttcggatgaagcgtcgtgtccggtattaacgtgtggtccggcgtcgtttcaatgtaattcgtcgacgtgtataccgcaattatgggcgtgtgataatgatccggattgtgaagatggttcggatgaatggccgcaacgatgtcgtggtttatatgtatttcaaggtgattcgtcgccgtgttcggcgtttgaatttcattgtctatcgggtgaatgtatacattcgtcgtggcgttgtgatggtggtccggattgtaaagataaatcggatgaagaaaattgtgcggtagcgacgtgtcgtccggatgaatttcaatgttcggatggtaattgtatacatggttcgcgtcaatgtgatcgagaatatgattgtaaagatatgtcggatgaagttggttgtgtaaatgtaacgttatgtgaaggtccgaataaatttaaatgtcattcgggtgaatgtataacgttagataaagtttgtaatatggcgcgagattgtcgtgattggtcggatgaaccgataaaagaatgtggtacgaatgaatgtttagataataatggtggttgttcgcatgtttgtaatgatctaaaaataggtgcggaatgtttatgtccggatggttttcaattagtagcgcaacgtcgttgtgaagatatagatgaatgtcaagatccggatacgtgttcgcaactatgtgtaaatctagaaggtggttataaatgtcaatgtgaagaaggttttcaattagatccgcatacgaaagcgtgtaaagcggtaggttcgatagcgtatctattttttacgaatcgtcatgaagtacgtaaaatgacgctagatcgttcggaatatacgtcgctaataccgaatttacgtaatgtagtagcgttagatacggaagttgcgtcgaatcgtatatattggtcggatttatcgcaacgtatgatatgttcgacgcaattagatcgtgcgcatggtgtatcgtcgtatgatacggtaatatcgcgtgatatacaagcgccggatggtttagcggtagattggatacattcgaatatatattggacggattcggttttaggtacggtatcggttgcggatacgaaaggtgttaaacgaaaaacgttatttcgtgaaaatggttcgaaaccgcgtgcgatagtagtagatccggtacatggttttatgtattggacggattggggtacgccggcgaaaataaaaaaaggtggtttaaatggtgttgatatatattcgttagtaacggaaaatatacaatggccgaatggtataacgctagatttactatcgggtcgactatattgggtagattcgaaattacattcgatatcgtcgatagatgtaaatggtggtaatcgtaaaacgatactagaagatgaaaaacgtctagcgcatccgttttcgttagcggtttttgaagataaagtattttggacggatataataaatgaagcgatattttcggcgaatcgattaacgggttcggatgtaaatttattagcggaaaatttattatcgccggaagatatggtattatttcataatctaacgcaaccgcgtggtgtaaattggtgtgaacgaacgacgttatcgaatggtggttgtcaatatttatgtttaccggcgccgcaaataaatccgcattcgccgaaatttacgtgtgcgtgtccggatggtatgctattagcgcgagatatgcgatcgtgtttaacggaagcggaagcggcggttgcgacgcaagaaacgtcgacggttcgtctaaaagtttcgtcgacggcggttcgtacgcaacatacgacgacgcgtccggttccggatacgtcgcgtttaccgggtgcgacgccgggtttaacgacggtagaaatagtaacgatgtcgcatcaagcgttaggtgatgttgcgggtcgtggtaatgaaaaaaaaccgtcgtcggttcgtgcgttatcgatagtattaccgatagttctattagtatttttatgtttaggtgtatttttattatggaaaaattggcgattaaaaaatataaattcgataaattttgataatccggtttatcaaaaaacgacggaagatgaagtacatatatgtcataatcaagatggttattcgtatccgtcgcgacaaatggtatcgttagaagatgatgtagcg

SEQ ID NO: 11428 - DNA, 2580 bp, Artificial Sequence
  derived and/or modified sequence
atgggaccatggggatggaagttgcgctggaccgtggccttgctcctggcagccgccgggaccgcggtcggagatagatgcgaaagaaatgaatttcagtgtcaggacggaaagtgcatctcgtacaagtgggtgtgtgatggctcagccgagtgccaggatggatcggatgagtctcaagaaacctgtctgtcagtcacctgcaaatccggagacttctcgtgcggtggacgggtgaaccgctgcatcccccagttctggcgctgcgatggtcaggtggattgcgataacggtagcgatgagcaaggatgccctccgaaaacttgctcgcaagacgagttcaggtgccacgacggaaagtgtatatccagacagttcgtttgcgactcagaccgggactgcctggatggctcggacgaagctagctgcccagtcctgacctgcggcccagccagctttcaatgcaattcatccacttgcattccgcagctgtgggcctgcgacaatgacccggactgcgaagatggatcggacgaatggccgcaaagatgtcgcggactgtacgtgttccaaggagattcgtcgccgtgctcggcgttcgaattccattgcctgtcgggcgaatgcatccacagttcatggcggtgcgacggtggacctgactgcaaggataagtcagatgaagaaaactgcgcagtggctacctgcaggccggacgagttccagtgctcagacggaaactgtatccacgggtcaagacagtgcgatagggagtacgactgtaaggatatgagcgatgaggttggatgcgtgaacgtcaccctgtgcgaaggaccgaacaagtttaagtgccattccggagagtgtatcaccctcgataaagtgtgcaacatggcaagggattgccgcgactggtcagacgaaccaatcaaggagtgcggtacgaatgagtgccttgacaataacggcggatgctcccatgtgtgcaacgatctgaagataggagccgaatgcctgtgtccagatggtttccagctggtggcccaacgccgctgcgaggatatcgatgaatgccaagatccggatacttgctcgcagctctgcgtgaacctggaaggaggatacaagtgccagtgcgaggaaggatttcagctggacccacacactaaagcgtgcaaggctgtcggctccattgcttacctgttcttcactaatagacatgaggtgcgtaaaatgaccctcgaccggtcagaatacacttccctcatcccgaacttgcgcaacgtcgtggccctcgacactgaggtcgcatcgaatcgcatctattggtccgacctctctcagagaatgatctgctcgacccagctcgaccgcgcgcacggagtgagctcatacgacactgtgattagcagagacatccaggcacctgacggactcgccgtggattggatccacagcaacatttactggaccgatagcgtgctggggaccgtgagcgtggcagacaccaaaggggtcaaaagaaaaactctgtttcgagagaacggatcgaagccgcgggcgatcgtcgtggatcccgttcacgggtttatgtactggaccgactggggaaccccggcaaaaatcaaaaagggaggtcttaacggagtggacatttactcgctcgtcaccgaaaacattcaatggccgaacgggatcaccctggacctgttgtctggacggctgtactgggtggattcaaagctgcactccatctcctccatcgatgtcaatggaggaaatcgcaagaccatcctggaggacgagaagcggctggcccacccattttccctggctgtctttgaagataaggtgttctggaccgacatcataaacgaagcgatcttctcagccaaccggctgacgggctcagacgtgaacttgctggcagagaatttgctgtcgccggaggacatggtactcttccacaacctgactcagccgagaggagtgaactggtgcgaaaggactaccctgtccaacggcgggtgccagtacctgtgcttgccggcaccacaaatcaatccgcattcgccaaagttcacctgcgcctgcccagacggaatgctgctcgctagggatatgcgttcgtgcctcaccgaggccgaggccgcggtggcaactcaggagacgtcgaccgtgagactcaaggtgtcatcgaccgccgtgcgcacgcagcatacgactacccgccctgtgccagatacctcgaggcttccaggggccacgcctggccttacgactgtggaaattgtgaccatgagccaccaggctctgggagacgtcgcaggccgcgggaacgaaaagaaaccatccagcgtgcgcgccctcagcatcgtgcttcccatcgtgctgttggtgttcctctgccttggagttttcttgctgtggaagaactggcggctcaagaacatcaactccatcaacttcgataatccggtctaccaaaaaactaccgaagatgaagtgcacatctgtcataaccaggacggatactcatacccttcacgccagatggtgtctctggaagatgacgtggcg

SEQ ID NO: 11429 - DNA, 2580 bp, Artificial Sequence
  derived and/or modified sequence
atgggtccttgggggtggaaactgcggtggacagtggccctgcttcttgctgccgcgggcacagcggtgggagataggtgtgaacgaaacgagttccagtgccaggacgggaaatgcatctcttataagtgggtatgcgacggcagtgctgaatgccaggacggctcagacgagtcccaagagacatgtttatccgtgacgtgtaagagcggcgacttttcatgtggaggaagagtgaatcgctgcatccctcagttttggcgctgtgacggccaggtggattgcgacaacgggtccgacgagcaaggctgtccaccgaaaacctgctcccaagacgagtttagatgccacgacggaaagtgcatctctaggcagtttgtatgcgattccgatagagattgcctcgacggttcggacgaagcttcctgccccgtgctgacctgcggaccagcctccttccagtgtaatagttcgacctgcatcccccagctgtgggcatgtgacaatgatccagattgtgaggacggttctgatgagtggccacagaggtgccggggcctctatgtttttcagggtgacagctctccatgtagcgcctttgagttccactgcctgagtggcgagtgcatccactcatcctggaggtgcgatgggggcccagactgtaaggacaagtccgacgaggaaaactgcgccgtggcaacatgtcggccagacgagtttcagtgctctgacggaaactgtatccatggatctcgccagtgtgatcgggagtatgattgtaaggacatgagtgatgaggtgggatgtgtgaacgtgactctttgcgaaggtcctaacaagttcaagtgccattcaggggagtgtattacgttagataaagtctgcaatatggctcgcgactgccgggattggtcagatgaacctatcaaagaatgtggcacaaacgaatgtcttgataacaatgggggttgttcacatgtgtgtaacgacctcaagatcggggccgagtgcctatgtccagacggctttcagctcgtcgcacagaggcgctgcgaagacattgatgaatgtcaggatcccgacacttgtagccagctctgtgttaaccttgagggtgggtacaaatgccaatgtgaggaagggtttcagttggacccccacaccaaggcgtgtaaagcggtgggttctatcgcttatctgtttttcactaatcggcacgaggttaggaagatgactctggacaggtcagaatacactagtctgattccaaacctgcgcaacgtagtggccctcgataccgaggtggcctcaaaccgtatctattggtccgacctgagccagcgtatgatctgttctacccagcttgaccgggcacacggcgtctcttcttatgataccgtcatctccagagacatccaggcgcctgatggactagcagtcgactggatccactccaacatatactggaccgacagcgtgctgggaactgtttccgtggctgataccaagggcgtgaagagaaaaactttattccgggagaacggctctaagccaagagcgatcgtcgtagatccagttcacggattcatgtattggacagattggggtaccccagcgaaaataaagaaaggtggattgaatggagtagatatctacagtttggtcaccgagaacatccagtggccgaacggtatcactcttgatctgttgagtggacgattatattgggtggactcgaagctgcacagcatctcatcgatcgatgtgaacggtggaaaccggaaaacgatacttgaggatgagaaacggttagcgcacccttttagtttggccgtgttcgaagacaaggtcttttggaccgacattatcaacgaggccatcttctctgccaaccggctaactggaagcgacgttaacctactggcggagaacctgttgtccccagaagacatggtcctgttccacaatttgacacagcctaggggggttaactggtgcgagcgaacaacgctgagcaacgggggatgtcagtatctctgcctgccggccccccaaattaatccccactccccgaagttcacgtgcgcttgccccgacggtatgctactcgctagagatatgcggtcatgtcttacagaagccgaggctgccgtggctacgcaggagacttcaactgtgcgactgaaggtgtccagtaccgccgttaggacccagcacactactacgagaccagtcccagatacttcacgcctgcccggggccacacctggcctgacaacagtcgagatagtgaccatgagccaccaggcgctgggagatgttgctggaaggggcaacgaaaagaagccgagttcagtgcgggccctatccattgttttgcccatcgtcctgctggtatttctctgtttgggggtttttctgctctggaaaaactggcggctcaagaacattaactccattaattttgacaacccggtctaccagaagacaactgaggacgaggttcacatctgtcacaaccaggacggctacagctacccatctcgtcagatggtgagcctggaagatgatgtcgcc

SEQ ID NO: 11430 - DNA, 2580 bp, Artificial Sequence
  derived and/or modified sequence
atggggccgtggggttggaaactgaggtggaccgtggccctcctgctcgcagccgctgggaccgcggtgggagatcgttgcgagcggaacgagtttcagtgtcaggacgggaagtgcatctcttacaagtgggtgtgcgacggatccgcagaatgccaagacgggtccgatgaatcccaggaaacctgcctgtccgtgacgtgtaaatcaggggatttttcctgcggcggacgcgtgaaccgttgcatccctcaattttggaggtgtgacggacaggtcgactgcgataatggcagcgacgaacaaggctgccctccaaagacttgcagccaggatgagttccggtgtcacgacggcaagtgcatctcgaggcagttcgtctgcgactcggacagagactgcctggatggtagcgacgaggcctcctgtccggtgctgacttgcggcccggcctccttccagtgcaactcatccacttgcataccgcagctgtgggcgtgcgacaacgatccggactgcgaggacggttccgacgaatggccgcagcgctgtcgcggactctatgtctttcaaggagactcgagcccttgctcggcgttcgaattccactgcctgtccggagaatgcatccatagctcatggaggtgcgatggtggcccggattgcaaggacaaatctgacgaggaaaactgtgcagttgcgacttgcaggccagatgaattccagtgctccgacggaaactgtatccacggatctcggcagtgtgatcgcgagtacgactgcaaagacatgtcagatgaagtgggctgcgttaatgtgaccctctgcgaaggaccgaataagttcaagtgccactccggagagtgcatcactctggataaggtgtgcaacatggcccgggattgccgcgactggtcggacgaacctatcaaggagtgtggaactaacgaatgcctggataacaacgggggctgctctcacgtgtgcaacgatctcaaaatcggagccgaatgcttgtgccctgatggcttccagctcgtggcgcaaagacgctgcgaagatatcgatgaatgtcaagaccccgacacctgtagccagctctgtgtgaacctcgagggagggtataagtgccaatgcgaagaaggattccagcttgacccccacaccaaggcatgtaaagccgtgggctccattgcgtacctcttcttcaccaacagacatgaggtcagaaaaatgactctggatcgctcagaatacacttccctcatcccgaatctgagaaatgtcgtggcactggacactgaagtggcctcgaaccggatctactggagcgacctctcccagcgcatgatctgtagcacccaactggaccgcgcgcatggggtgtcaagctacgatactgtgatttcacgggatattcaagcgccggacggactggccgtagactggatccattcaaacatctactggaccgatagcgtgctgggcactgtgagcgtcgcagatactaagggagtcaagagaaagacgctcttccgggaaaacgggtcgaagccaagagcaatcgtggtcgaccctgtacacgggttcatgtactggacggactggggaaccccggccaaaatcaagaagggagggctcaatggggtcgacatttactccctggtgaccgagaatatccagtggcctaacgggatcaccctcgatctgctttcgggtcgcctgtactgggtggatagcaagctgcatagcatatcatcgatcgacgtgaacggagggaatcgaaagaccatcctggaggacgaaaagcgcctggcccacccgtttagcctggccgtgttcgaggacaaggttttctggaccgacatcatcaatgaggcgatcttttccgcgaatcggctgaccggctcagatgtgaacctgctcgcggaaaatctcctgtcgccggaggatatggtcctcttccataaccttacccaaccccgcggcgtgaattggtgtgagcggactaccctgagcaacggcggatgccagtacctctgcctgccagcaccacagattaatccgcacagccctaagtttacctgcgcttgccctgatggaatgttgctcgcacgggacatgcggagctgcctcaccgaggctgaggctgcggtcgctactcaagagacttcgaccgtccggctgaaggtgtcatctacggcagtgcgcacccaacatactactacccggccagttccagatactagccgcctgccaggtgcaactccaggtctgactactgtggaaatcgtgaccatgagccaccaggccctcggtgacgtcgccggacgcggcaatgaaaagaagccaagctccgtgcgggcactctcgatcgtcctccccatcgtgttgctggtgtttctgtgcctcggagttttcctgctgtggaagaattggcgcttgaaaaacataaactcgatcaacttcgacaatccagtgtaccagaaaacgaccgaggacgaggtgcacatctgccacaatcaagacggatacagctacccgagccgccaaatggtgagcctggaggatgatgtggct

SEQ ID NO: 11431 - DNA, 2580 bp, Artificial Sequence
  derived and/or modified sequence
atgggaccttggggatggaaacttcgctggaccgtggcgctgctcctcgccgcggccggaaccgccgtcggcgatcggtgtgagcgcaacgaattccaatgccaagatggcaaatgtatctcatataagtgggtctgcgacggctccgctgaatgtcaggacggatctgatgagtcacaggaaacttgcctgtcagtcacttgtaagtcgggcgatttctcctgcggaggccgggtcaacaggtgcattccacaattctggcggtgcgacggtcaggtggattgcgacaatggatcagatgaacagggatgcccgcctaagacttgttcgcaggatgaattcagatgccacgacggaaagtgcatttcacgccagtttgtctgcgattctgaccgcgattgccttgacggctccgacgaggcgtcctgcccagtgctgacctgtgggcctgcgtcctttcaatgcaactcctcgacgtgtatcccgcagctgtgggcttgcgacaacgacccagattgcgaagatggctcagatgagtggccccaacgctgtaggggactgtacgtgtttcaaggagactcttcaccatgctcggcatttgaattccactgcttgagcggagaatgcatccacagctcgtggcgctgcgatggcgggccagactgcaaggacaagtccgatgaagaaaactgcgctgtggcgacctgcagaccagatgaatttcagtgctcggatggcaactgcatccatggctcacgccagtgtgaccgggagtacgactgcaaagatatgtcggacgaagtgggttgcgtcaacgtgactctgtgtgaaggaccaaacaagttcaagtgtcactcgggagaatgcattactctggacaaagtctgcaatatggctagagactgcagggattggtcggacgaaccaatcaaggaatgtggaaccaacgagtgcctggacaataacggaggatgctcccacgtctgcaatgatctgaagatcggggccgagtgcctctgccccgacggctttcagctggttgcgcagaggcgctgtgaagatatcgacgaatgccaagatccagacacctgctcgcagctgtgtgtgaatctcgagggcggatacaagtgtcaatgtgaggaggggttccagctggatccccacaccaaggcatgcaaggcagtcggctcgatcgcctacctgttcttcactaatcgccacgaggtgcggaagatgactctggaccggtcagagtatacgtcgctgatacccaatctccggaatgtggtggccctggacactgaagtggcttcgaacagaatctactggagcgatctctcgcagagaatgatctgtagcacccaactggaccgggcccatggagtgtcaagctacgacactgttatttcacgtgatattcaggcgccggacggtttggctgtggactggatccactccaatatctactggacggacagcgtcctgggcaccgttagcgtggcggatactaaaggcgtgaagaggaaaaccctctttagggaaaatggatccaaaccgcgagcaatcgtggtggatccggtccacggattcatgtattggaccgattggggaaccccggctaagattaagaaaggaggactcaacggagttgacatttactctctcgtgaccgagaacatccagtggccaaacggaatcactctggatctgctgtcaggcagactgtactgggtcgactcgaaactccactcaatctccagcatcgatgtgaacggcgggaatcgcaaaactatcctcgaagatgaaaagaggctggcacacccgttctccctggccgtgttcgaggacaaggtgttctggaccgacatcatcaacgaagccatcttctcagcgaatcggctgactgggagcgacgtgaacctgctcgccgaaaatctcctgtcaccggaggacatggtgttgttccataacttgactcagccaagaggcgtgaactggtgcgaaagaactaccctgtccaacggtggatgccagtacctgtgcctcccggctcctcagattaatcctcactcgccgaagttcacttgtgcgtgtccggatggtatgctgttggcccgtgatatgcgctcctgtctgactgaggcagaagcagcggtcgccactcaggaaacctccaccgtgcggctcaaggtgtccagcaccgcagtgcggactcaacatacgactactcggccagtgccagatacctcacggctgccgggggcgactccgggtctgaccaccgtggagatcgtcacgatgtcccaccaggcactgggagacgtggccggaagaggcaacgagaagaaaccctcatcggtgagagcactgtcaattgtgctgcccatcgtcctgctggtgtttctgtgcctgggcgtattcctcctgtggaaaaactggcgcctgaagaacatcaactcgattaacttcgacaatcccgtgtaccagaaaaccaccgaggacgaagtgcacatctgtcacaaccaagacggatacagctacccttcgagacagatggtgagcttggaagatgacgtggcg

SEQ ID NO: 11432 - DNA, 2580 bp, Artificial Sequence
  derived and/or modified sequence
atgggcccgtggggatggaaacttcgatggactgtcgcactgctcttggccgccgccggtacagcagtcggcgatcggtgtgagaggaacgaattccagtgccaagacgggaaatgcatcagttacaaatgggtctgtgacggctccgccgaatgccaggatggtagcgacgaatctcaagagacttgcctcagcgtgacctgcaagagtggggatttcagctgcggcggtcgggtcaatagatgtattcctcagttctggcgatgtgacggtcaggtagattgcgacaatggctccgatgagcaagggtgccctcctaaaacatgttctcaggatgagtttcgatgtcacgacgggaaatgtatatctaggcaattcgtttgcgactctgatagggactgtttggacggatccgacgaagctagttgtcctgtgcttacttgtggacctgcgtcatttcagtgtaatagttcgacgtgcatacctcagctctgggcctgtgataatgaccctgattgcgaagatggatcagatgagtggccacagcgatgccgtggcctgtatgtctttcagggcgatagttctccctgcagcgccttcgaattccactgcctgtctggcgaatgtattcacagctcatggcgatgcgacggtggaccagattgtaaagacaagtcggatgaggagaactgtgcagtggcgacctgtaggcctgatgagttccaatgttcagatggcaactgtattcatggaagtcgacagtgcgatagggagtatgattgcaaagacatgtcagatgaagttggctgcgtaaacgtcactctgtgtgaggggcccaacaagttcaaatgccattccggtgaatgcatcacgctggataaagtgtgtaacatggctagggactgcagggattggtctgacgagccaatcaaggaatgcggaactaatgagtgcctagacaacaatggaggatgtagccacgtgtgcaatgatctgaaaattggtgcagagtgcctgtgccctgacgggtttcagctcgtagctcagcgaaggtgcgaggacattgatgaatgccaggatccagacacgtgttcacagctatgtgtcaacctggagggtggatataagtgccagtgcgaagaaggttttcagctcgacccccacacaaaggcttgtaaagccgtgggttccattgcttacctgttcttcaccaatcgacacgaagtgaggaagatgacccttgacagaagcgaatacacctcgttaatccctaatctccgaaacgttgtagctctggacaccgaggtggcctccaaccgaatctattggagtgacctcagccagcgaatgatctgttccacccagcttgacagggcgcatggtgtatcgtcttatgacaccgtgatctcacgagatatccaggcccctgacggactggccgtcgattggatccactccaatatttactggactgattctgttctggggactgtctccgtggccgatacaaaaggtgtgaaacgaaagaccctctttagagagaacgggagcaagccgagagctatcgtggtggaccctgtgcacgggtttatgtattggaccgattgggggacccccgccaagattaaaaagggcggcctgaacggagtagatatttacagccttgtgaccgaaaatattcagtggccaaatggcatcaccctggatcttctcagcggccgactgtattgggtagatagtaaactacacagcatatcaagtattgacgttaacggaggtaacaggaaaactatcctagaagacgaaaaacgcctggctcacccattctctctggccgtctttgaggacaaggtgttttggacggatattatcaacgaagcaatcttcagtgctaatcgattgacaggcagtgacgtgaacctgctggcagaaaatctcctgtcgcccgaagatatggttctgttccacaatttgactcagccgagaggagtaaactggtgtgagcgtacaacgttgtcgaatggggggtgtcagtatctgtgcttgcccgcaccccagattaatcctcactctcctaagttcacctgtgcatgcccggacggaatgttgttggccagagacatgcgaagctgcctaaccgaggcggaggccgcagtggcgacacaggaaacctcaaccgtcaggcttaaggtgagttccaccgcagttagaacacagcacacaaccactcgacctgtgcccgacacctcacgacttccaggggcaaccccaggactgacgacagtcgagatcgtgacgatgtcccatcaggccctcggagatgtggcaggccgaggtaacgagaaaaagccttcatcagttcgggcattgagcatagtcctgccaatcgtgctgctggtgttcctgtgtctgggtgtgtttctgctgtggaagaactggaggttaaagaacatcaactcaattaactttgacaatcccgtttatcagaaaaccacagaggatgaagtgcatatctgccacaatcaagacgggtatagctatccttctaggcagatggtgtcactggaggatgacgtcgct

SEQ ID NO: 11433 - DNA, 2580 bp, Artificial Sequence
  derived and/or modified sequence
atggggccatggggatggaaattgcgatggacagtcgccttactgttagccgcagctgggacagcagtgggggatagatgtgaaagaaacgaattccagtgccaagatggaaaatgtatctcttataaatgggtctgcgatggaagtgcggaatgccaggatgggtcagacgaatcccaagaaacttgtctctcagtcacatgcaaaagtggggatttttcctgtgggggaagggtcaaccgatgcatcccccagttttggcgctgcgatgggcaggtagattgtgataacggatcagatgaacaggggtgccctcccaagacatgctcgcaggatgaatttaggtgccatgatgggaaatgtatctctagacagttcgtgtgtgattcagatcgagactgtctcgatggatccgatgaagcctcgtgtcccgtgcttacatgtgggccagcatcctttcagtgcaactccagtacttgtatcccacagctctgggcttgtgataacgatcctgactgcgaggacgggtccgatgaatggccgcagcgctgtagggggctttatgtctttcagggggattcctcgccttgctccgcttttgaatttcactgcctctcaggggagtgcatacattcatcttggcgatgtgatgggggacccgactgtaaagataagtctgatgaagaaaattgcgctgttgccacgtgccgtcccgatgaattccagtgttctgatggaaactgtattcacggatcccgacagtgcgacagagaatatgattgcaaagatatgtccgatgaggtggggtgtgttaacgtaacactctgtgaaggacccaacaaatttaaatgccactcaggggaatgtattactcttgataaggtgtgtaatatggcacgggattgccgggattggtccgatgaacccatcaaagaatgtgggacaaacgaatgcctggataataatggaggatgttctcatgtttgtaacgatttaaaaataggagccgaatgcctctgtcctgatggatttcagttggtcgcccagcggcgatgtgaagatatagacgaatgccaggatcccgatacttgctcacagctctgtgtcaacttggaagggggatataaatgtcagtgtgaagaaggatttcagttagatccacacactaaagcttgtaaagccgtgggatccatcgcctatctctttttcacaaaccggcacgaggtgagaaaaatgactctcgacaggtctgaatatactagtctgataccaaatctcaggaatgttgtggctctggatacagaagttgcttcaaatagaatctactggtcagatctctcacagcgcatgatttgttccacacagctcgatagggctcacggggtctcatcatatgatactgttatatctcgtgatatacaggctcccgatgggctcgccgtcgattggatccactctaatatatattggactgattccgtcctcggaacagtctccgtcgctgacacaaaaggggtgaaaaggaaaactctctttagagagaatggaagtaagccacgagccatagtggtggatcctgtacatgggtttatgtattggactgattggggaacacccgccaaaatcaaaaaagggggacttaatggggttgatatctattcattggtaacagaaaatatccagtggcccaacgggatcactttagatcttctatccggacggctgtactgggtcgactcaaaactccattcaatctcttccatagatgtgaacggagggaatcggaaaacaatcttagaggatgaaaaacgcttagcccaccccttctctctcgcagtatttgaagataaagtcttctggactgatatcatcaacgaagcaatattctcagctaaccgattaactggatcagatgtcaacctcctcgctgaaaatctgctgtcacctgaagatatggtcttattccacaaccttactcagcctcggggggtcaattggtgtgaaaggactacactctctaatggggggtgtcagtacttatgtttgcccgcacctcagatcaatccacactctccaaaattcacatgcgcttgtcctgatggaatgttgcttgcacgcgatatgaggtcgtgtctcacagaagctgaagcagctgtggcaactcaggaaacttctacagtgaggctcaaagtttcctctactgcagttcgcacacagcacacgacgacacgcccagtgcccgatacttccagactacctggagccactcctggattgactactgtggagatagtaactatgagtcatcaggcactaggggatgttgcggggagaggaaacgaaaaaaaaccatcctcagtacgggccctttctattgttctgcccattgttctcctggttttcctttgcctgggagtttttctcctctggaagaattggaggctcaaaaatattaattctatcaactttgacaacccagtctatcagaaaacaacagaagatgaggtgcatatatgtcacaaccaggatgggtattcatatccttcgaggcagatggtctctcttgaagatgacgtagct

SEQ ID NO: 11434 - DNA, 2580 bp, Artificial Sequence
  derived and/or modified sequence
atgggaccttgggggtggaagctgcgttggacggtagctctcctgctagccgccgccggaactgccgtgggtgacagatgcgaacgtaacgagttccagtgccaggacggaaaatgcatctcttacaagtgggtctgcgatgggagtgccgagtgccaggatggctctgacgagagccaggaaacatgcctgtctgtgacatgcaaatcaggagatttctcctgcgggggccgcgtgaataggtgcatcccgcaattctggagatgcgatggccaagtggactgtgacaatggcagtgacgagcaagggtgccccccaaagacatgctcacaagacgagttccggtgccatgacggaaaatgcatctctagacaatttgtgtgcgattctgatcgcgattgccttgacgggagtgacgaagcctcatgtccagtcttgacttgtggaccagctagtttccagtgtaattcgtcgacttgcatcccccagctgtgggcctgtgacaatgacccagactgcgaggacggatcagacgagtggcctcagagatgcagggggctgtatgttttccagggggattcctccccttgttctgccttcgagtttcattgtctgtccggggagtgcattcattccagttggcgatgtgacggtgggcctgactgtaaggacaagtcggacgaggagaattgcgccgtagcaacctgccggccagacgagtttcaatgctctgatgggaactgcatccatgggagccggcagtgtgacagggagtacgattgcaaagacatgtccgatgaagtgggttgcgtgaacgtgaccctgtgtgaaggtcctaacaaattcaaatgtcatagcggagaatgcataaccttggataaggtatgcaacatggcccgggattgccgagactggtcagacgagccaattaaggaatgcgggaccaatgagtgcttggacaacaatggcggctgttctcacgtgtgcaacgacttaaaaataggagcagagtgcctttgccccgacggatttcaactggtagctcagcgccggtgcgaagacatagacgaatgccaggaccccgatacatgttcccagctgtgtgtgaacctagagggcggatacaagtgtcagtgtgaggagggctttcaactggatccccacaccaaggcctgtaaagctgtcggctctatcgcctacctgttcttcactaaccgccacgaggtaagaaagatgactctcgaccggagtgagtacacatccctgatcccaaaccttcgcaatgtcgtggctctggacacggaggtagcttcaaatagaatttactggtccgatttatctcagcggatgatttgctccacacagctggaccgggcccacggggtctcgtcatacgataccgtcatatctcgcgatattcaggcaccagatggattagcagtcgactggatccactccaatatttattggaccgatagcgtcctgggaacagtttccgtggcagataccaaaggcgtcaaacggaaaacattattcagggagaatggatcaaaacctcgagcgattgttgtcgacccagtgcatgggttcatgtattggacagattggggcaccccagcgaagatcaaaaagggggggctaaacggcgtggatatatacagcctcgtcacagagaatatccagtggcccaatgggattacactcgatttgctgagcgggcgcttgtattgggtggactcgaaactccattctatcagttctatcgatgtgaatggcggaaatcgtaagacgatccttgaggacgagaagaggctcgctcatccattctcactggccgtgtttgaagacaaggtgttctggactgacatcatcaatgaagccatattctccgcaaaccggctgactggcagcgacgtgaacctgctggctgaaaatctcctcagtccggaggatatggtcttgtttcataacttgacccaaccccgaggagtcaactggtgtgaaaggacaactctcagtaacggcgggtgccagtacctgtgcctgccagccccgcaaattaatccccacagccctaagtttacttgcgcttgcccagacgggatgctgttggcccgggatatgcgtagctgtcttactgaagctgaagcggccgtggcaacccaggagactagtacggttcgtcttaaagtgagcagcaccgccgtgagaacccagcataccactacacggcccgtgcctgacaccagtagactgcccggggcaacacccggccttaccacagtcgaaatagtcaccatgtcacatcaagctctcggcgacgttgcagggagaggcaatgagaaaaagccaagttccgtgcgggccctgtctatcgtacttcccatagtcctgttggtgttcctctgcctcggtgtctttctcctgtggaaaaactggcgcctgaaaaacatcaacagcataaattttgacaatccggtctaccaaaagaccaccgaggacgaagtgcatatctgccataatcaggatgggtactcttatccatccaggcagatggtgtcactggaagatgacgtggcc

SEQ ID NO: 11435 - DNA, 2580 bp, Artificial Sequence
  derived and/or modified sequence
atgggaccctggggatggaagctgcggtggactgtggcgcttctcctagcagctgccggaactgccgtgggagatcgctgcgagcggaatgaattccagtgccaggatggaaaatgcatatcctacaaatgggtgtgcgatgggtccgctgaatgccaagacggatctgatgaaagtcaggaaacttgccttagtgtcacatgcaaatccggagatttttcttgcggggggcgggtaaatagatgcattccacagttctggaggtgtgatgggcaggttgattgcgataatggatccgacgaacaggggtgtcctcctaagacgtgctctcaggatgaattccggtgccacgacggaaaatgtattagtagacagttcgtttgtgacagtgatagggattgcctagatgggtctgacgaagcatcctgccccgtcctcacttgtggacccgcttccttccagtgcaattcctctacatgcatccctcagctgtgggcctgcgataacgatcccgattgtgaagacgggtccgatgaatggccccagaggtgtcgggggctctacgtgttccagggagattcttccccttgctccgcttttgaatttcattgtttatccggagaatgtatccattcctcatggcggtgcgatggagggcctgattgcaaagataaatctgatgaagaaaattgtgccgtagctacatgccggcctgatgaattccaatgttctgatggaaattgcatccatggaagtaggcagtgtgatcgcgaatatgattgtaaagatatgtccgatgaagtcgggtgtgttaatgtgacactgtgtgagggacctaacaaattcaagtgccactctggagagtgtattactctcgataaagtctgtaacatggcacgtgactgcagggattggtccgatgaacccatcaaagaatgtggaacaaatgaatgtcttgataacaatggaggatgcagtcatgtgtgcaatgacctgaaaatcggagctgaatgcctctgtccagatggattccagctggtggcacagcgccggtgcgaagatattgatgaatgtcaggatccagatacttgctcccagttatgcgtgaacctggaggggggatataaatgccagtgcgaagaaggattccagctcgatccacacacaaaagcctgtaaagctgtggggagtatcgcctatctctttttcacaaacaggcatgaagtacgcaaaatgactttagatcggtcagaatatactagtttaataccaaatcttaggaacgtggtagctctcgacacagaagtagcgtctaaccggatctattggtcagatctaagtcagcgcatgatctgtagtactcaactcgatcgggcacatggagtatcctcttatgatacagttatatcacgcgatattcaggcacctgatggactcgcggtggattggattcacagtaatatctactggactgattcagtcctgggaactgtcagtgtagcagatactaaaggggtgaaacgaaaaactctttttcgggaaaatgggtccaaaccacgcgccatcgtggtggatcccgttcatggatttatgtactggactgattgggggactcccgccaaaatcaaaaaaggagggcttaacggagtggacatatattcccttgtgacagaaaatatacagtggcccaatgggataacactcgacctgctgtccggaaggctatactgggtagattccaagctgcactcgatatcttccatcgatgtcaacggaggaaaccggaagactatccttgaagatgaaaaaaggctggcccaccccttctctctcgccgtgttcgaagacaaggtcttttggactgatatcataaatgaagctattttttccgctaaccgactaactgggagtgatgtgaatctcctagctgaaaacctcctttcacctgaagacatggtgctctttcataatttaacacagccaaggggagtaaattggtgtgaacggacaactctatcaaatggagggtgccagtacctttgcctccccgcccctcaaatcaatccacatagtcccaaatttacatgtgcctgtcccgatgggatgctactggctcgggatatgcgatcttgtctcacagaagccgaggcagccgtggccacacaggagacttctacagtccggctaaaagtgtcgagtacagctgttaggacacagcatactacaactcgccccgtacccgatacaagtcggctcccaggggccacacctggattaacaacagtggaaatcgtaacaatgtctcaccaggccttgggggatgtcgcggggcgcgggaacgaaaaaaaaccctcctctgtgagggcattaagtattgttctgcctatcgtcctccttgtcttcctatgcctcggagtattcctgctttggaaaaactggcgactgaaaaatatcaatagtatcaatttcgataatcccgtttaccaaaaaacaactgaagatgaagtgcatatatgccataaccaggatgggtactcttatccaagtcggcagatggtgtctctggaagatgatgtggct

SEQ ID NO: 11436 - DNA, 2580 bp, Artificial Sequence
  derived and/or modified sequence
atgggtccttggggatggaaacttcggtggactgtcgcgctgctgttggctgccgcgggcacggcggtaggtgatcgctgcgaacgaaacgagttccaatgccaagacggcaagtgtattagctacaaatgggtctgtgacggctctgcggaatgccaagatggctctgatgagagccaggaaacgtgtctgagcgttacttgtaagagtggggacttcagctgcggtggacgagttaaccgctgcatacctcagttttggcgatgcgatggccaggttgattgtgataacggttcagatgaacaaggttgtcctccgaaaacctgcagccaagatgaattcaggtgccacgatgggaagtgtatctcccgccagttcgtttgtgattctgaccgggactgcttggacggatctgacgaagccagctgcccggtcctgacttgtggccctgcctcgtttcagtgcaactctagcacttgcattccacagctgtgggcgtgcgataacgaccctgactgcgaggacggcagcgatgagtggccccagcgttgtcgaggtctgtacgtgttccaaggcgacagctccccttgttctgcctttgagtttcattgcttgagcggcgaatgcatacactcttcttggcgctgtgatgggggcccggattgtaaggacaagagtgacgaagaaaattgcgccgtggcgacctgccgtcctgatgagtttcagtgctctgatggtaactgtattcacggcagccgccaatgtgatcgcgaatacgactgtaaagatatgagcgatgaggtgggctgtgttaacgtcaccctgtgtgagggtcctaataagttcaagtgtcatagcggagaatgtattactttggacaaagtttgtaacatggcacgcgattgccgcgactggagtgatgagccgattaaggagtgcggcactaacgagtgcctggacaataacggtgggtgctctcacgtttgcaatgacctgaaaatcggggccgagtgcctctgtccagacggctttcaactggttgcacagcgacgttgtgaagacatcgacgagtgtcaggacccggatacctgtagccaactttgtgtgaatttggagggtgggtacaaatgtcagtgtgaagaagggttccagctggatccacacacgaaagcctgtaaagctgttggttcgatcgcatatctgttctttacgaaccgtcacgaggtccgtaagatgactctggaccgatccgagtatacctcgctgatcccgaacctgaggaatgttgtcgccttggatactgaagtggcaagcaatcggatttattggtccgatctgagccaaaggatgatctgttccacccaactggaccgggctcatggtgttagcagctatgacacggtaataagccgggacattcaagcaccagacggcctcgccgtggattggattcatagcaatatttactggaccgatagcgtgctcggcaccgtgtccgttgcggacaccaaaggtgtcaaaaggaaaacgctcttccgcgagaatggaagtaaaccacgcgctatcgttgtagacccggtccacggttttatgtactggactgactggggtacgccagccaaaatcaagaagggcggattgaacggggtagacatctacagcttggtgaccgagaatattcaatggccgaacggtattaccctggacctcctgagcggacggttgtactgggtggattctaagctgcattccatttccagcatcgatgttaacggtggtaacaggaagaccatcctcgaagatgaaaagcgtctggcccacccatttagcctggccgtattcgaggataaggtgttttggaccgacattataaatgaggcgattttctctgcaaatcgcctgacgggtagcgacgttaacctgctggcggagaatctactctcccctgaagacatggtcctgttccacaatctgactcaaccacgaggagtcaactggtgtgaacggaccaccctgtctaacggcggctgccaatatctgtgcttgccagccccgcagattaatcctcattctccgaagttcacctgtgcctgtccagatgggatgctgctggcgcgggacatgcgcagctgtctgacggaagcagaagcggcagtagcaacccaggagaccagcaccgttagactgaaagtaagcagtacggcagtccgtactcaacacaccacgacgcgcccggtccctgatacctcccgcctgccgggtgccacccccggcctgacgaccgtggaaatcgtcaccatgagccaccaggccctgggtgacgtggcgggtcggggtaatgagaagaaaccgagcagcgtgcgcgctctgagcatcgttctgccaatcgttttgctggtttttctgtgtcttggtgtctttttgctgtggaagaactggagactcaaaaatattaatagcattaacttcgataacccagtgtatcaaaagaccacggaggacgaagtgcacatttgccacaaccaggatggctattcttatccttcacgccagatggtgtctctggaggacgacgttgcg

SEQ ID NO: 11437 - DNA, 2580 bp, Artificial Sequence
  derived and/or modified sequence
atgggcccatggggctggaagctccggtggacagtggctctgttgcttgccgctgcggggacggctgttggggatcgatgtgagcgcaatgagttccagtgccaggacgggaagtgtatatcatataaatgggtctgtgatgggtccgcagaatgtcaggacggctccgacgagtctcaggaaacctgcctttccgtaacgtgtaagtcaggcgacttttcctgcggtggtagggtgaatagatgtattccccagttttggaggtgcgatggccaggtggactgcgataatggaagtgacgaacagggttgtcccccgaagacatgctcccaagacgagtttcggtgccacgacggcaagtgtattagcaggcagtttgtgtgtgactccgacagggattgtcttgatggttctgacgaggctagctgccctgtcctcacatgtggcccggcctcattccagtgcaactccagtacctgcatccctcaactgtgggcgtgtgataatgaccctgattgcgaagatggaagtgacgagtggcctcagagatgtcgagggctgtacgtgttccagggcgattcctccccgtgttctgctttcgagtttcactgtctttcaggggaatgcattcattcaagctggcgatgcgatggaggaccagattgcaaggacaagtctgatgaagaaaattgtgcagtcgctacatgtcggcccgacgagtttcagtgctccgatgggaattgtattcacggctccagacaatgcgatcgggaatatgactgtaaagacatgtctgatgaggtaggatgcgttaacgtgaccctgtgcgaggggcctaacaagtttaaatgtcactccggtgagtgtatcacactggacaaggtgtgtaacatggcccgggactgccgggactggtctgacgagccgattaaagagtgtgggactaatgagtgcctggacaacaatggaggctgctctcatgtttgtaacgatctgaaaattggtgcagagtgtctgtgtcctgatgggtttcaactggttgctcagcgccgctgcgaggacatcgatgaatgtcaggaccctgacacttgctcccagctttgtgttaacctggagggcggctataagtgtcagtgtgaagagggcttccagttggacccgcatacaaaggcctgcaaggctgtaggctccattgcctacctcttcttcacaaatcgacatgaagtgcgcaagatgacattggacagatcagagtacacctctttgatccctaatttgcggaatgtggtcgccctcgataccgaggtggcgtcaaacaggatctattggtctgatctgtctcagcggatgatttgttctactcagctcgaccgggctcacggggtctcctcatatgataccgtgatctcaagggacattcaggcccctgacggccttgccgttgattggatacattccaatatatattggaccgatagcgtgctcggtaccgtcagtgtggccgacacgaagggagtgaagcgcaaaactctcttcagggaaaacgggagtaagccaagggctatcgtggtcgatcccgtgcacgggttcatgtactggacagactgggggacaccagccaagataaaaaaaggaggcctgaatggcgtggatatttatagcttggtgaccgagaacatacagtggcccaatggtattactctcgatctgctgtcaggtaggctgtactgggtggactctaaattgcatagcatatctagcatcgacgtgaacggcggtaatcggaagacaatcctggaggacgagaagcggcttgcccaccctttttctctggccgtttttgaggacaaagtattttggacggatatcattaacgaagctatcttcagcgctaacagactgaccggctcagacgtgaatctcctcgctgagaatctgctctccccagaggacatggtgcttttccataacctgacccagcccaggggggtgaattggtgtgagaggacgactctttccaatggaggttgccagtacctgtgtctgcccgcgccgcagattaatcctcactctcccaagttcacatgtgcgtgtccggatggtatgctgctggcccgggatatgagatcctgtctcacagaagctgaggctgcagttgctactcaggagactagcacagtaaggctgaaggtgagttcaactgcagtgcgaactcagcacacaactacaaggccagttcctgacacttccaggctgcccggcgcaaccccgggtctcaccacagtcgaaatcgttacaatgtcccaccaagcccttggggatgtggccgggcgcgggaatgagaagaagccttcatcagtgcgggccctgtccattgttttgcccatcgtcctgctcgtgtttctctgcctgggcgtcttcctcctctggaagaactggaggctgaaaaacatcaactctatcaactttgacaatcctgtgtaccagaagactaccgaggacgaggtccacatatgtcataatcaggatggatactcctacccctcccgccaaatggtgagtctggaggacgacgtggcc

SEQ ID NO: 11438 - DNA, 2580 bp, Artificial Sequence
  derived and/or modified sequence
atgggtccttggggttggaagctgagatggactgtcgcacttctgctcgctgcagcaggtaccgcagtcggagatcggtgtgaacgaaacgaatttcagtgccaagatgggaagtgtatctcgtacaagtgggtttgcgacggttcagcagaatgccaagatggttccgatgaaagccaagagacttgtctctcggtcacctgcaagagcggtgatttttcctgtggtggccgcgtcaatcggtgtattcctcaattttggagatgtgacggacaggtggattgcgataatggatcagatgaacaaggctgcccaccaaaaacttgttcccaagacgagtttcgttgtcatgatggcaagtgtatctcccgtcaattcgtgtgtgattcagatcgcgattgccttgatgggtcagatgaagcatcttgccccgtgctcacttgcggaccagcgagcttccaatgtaactcgagcacctgtataccacaactgtgggcgtgcgataacgacccggactgtgaagatggaagcgatgaatggcctcagcgatgcaggggcctttacgtgttccaaggtgactcctcgccgtgctcagcgttcgaatttcattgtctttccggagaatgcattcattccagctggcggtgtgatgggggtcctgactgtaaagacaaatcggatgaggagaattgtgcagtcgctacctgtagacctgatgaatttcaatgttcagacggaaactgcatccatgggtcgcggcaatgtgaccgcgaatacgattgtaaggacatgtcagacgaagtgggatgcgtgaatgtcactttgtgcgaaggacctaataagttcaagtgtcacagcggagaatgtatcacccttgacaaagtgtgtaatatggcccgcgattgcagagattggtcagatgagccgattaaggaatgtggcaccaacgaatgccttgataacaacgggggatgttcccacgtgtgcaatgacctcaaaatcggagccgagtgtctgtgcccagacggttttcagctcgtcgcgcaacgtagatgtgaggacattgatgagtgccaagacccagatacgtgttcacaactgtgtgtcaacctggagggagggtacaagtgtcagtgtgaggagggcttccaactggatcctcataccaaggcatgtaaggcagtcggaagtatagcatacctcttcttcactaacaggcatgaggtgcgcaagatgaccctcgatcggtcggagtacacctctcttattcctaaccttcgtaatgtggtcgcgcttgataccgaagtcgcttcaaaccgtatttactggtcagacctttcgcaaagaatgatatgtagcacccagctggatagagcgcacggtgtgtcctcttacgacactgtgatttcccgagatattcaagcaccggatggacttgcagtcgactggattcactcaaacatctattggaccgactcggtccttggtactgtgtccgtggcggatacgaaaggagtgaaacggaaaactctgtttcgcgaaaacggttcaaagccaagagcgattgtggtggaccctgtgcatggattcatgtattggacggattggggtacccctgcaaagatcaagaaaggggggctgaacggcgtcgatatctactcgctggtcaccgagaatattcagtggccaaacggaattactcttgatttgctctcgggtagactgtactgggtggattcgaagctccattcgatttcgtcaatcgatgtcaacggtggcaaccgaaagacgatcctcgaagatgagaaaagactcgcacatccgttttccctcgcagtgtttgaagataaggtgttttggaccgatatcataaacgaagccattttctccgcaaaccggctgactggttccgatgttaaccttttggccgaaaatctgctctcgccagaggatatggttcttttccataacctgactcaaccgcgtggagtgaattggtgcgaacgaaccactcttagcaatgggggttgccagtacctctgtctcccagctccacagataaaccctcactcacctaagttcacttgtgcgtgccccgacggaatgctgctggctcgtgacatgcggagctgtttgactgaagcagaagcagctgtggcgactcaagaaacctcaaccgtaagactcaaggtgagctcgactgcggtgaggactcagcacacgaccaccaggccagtgcctgatacgtcccgcctgcctggagcaactcccggtttgaccaccgtcgagattgtgactatgagccatcaggcattgggtgatgtggcagggcggggtaatgagaagaaaccctcgtctgtgagggcactgtcgattgtgttgcctattgtactgcttgtgtttctctgccttggagttttcctgctttggaagaattggcgtctgaagaatatcaactcgatcaacttcgataacccggtctaccagaaaaccactgaggatgaagtgcacatctgccataaccaagacggttactcatacccttcccgccagatggtatctcttgaagatgatgtcgca

SEQ ID NO: 11439 - DNA, 2580 bp, Artificial Sequence
  derived and/or modified sequence
atgggcccctggggttggaagctgcggtggaccgtggccctcttgctggctgcagccggaactgccgtcggcgaccgatgtgagcgtaacgagtttcaatgccaggatgggaagtgtatcagctacaagtgggtgtgcgatggaagcgccgagtgtcaggatggcagtgacgaatcccaggagacgtgtttaagcgtgacatgtaaatctggtgacttcagctgcggaggtcgagtcaaccggtgtattccgcaattttggaggtgcgacggtcaggtcgactgtgataacggatccgatgaacagggctgtccccccaaaacgtgctcacaggatgaatttaggtgccatgatggtaagtgcataagcaggcagtttgtgtgtgacagtgatagggattgcctggatggatcagacgaggcatcctgcccagtgctgacgtgtgggcctgcgtcctttcagtgtaactcctcaacctgtataccacaattgtgggcctgtgacaacgaccctgattgcgaggatggcagcgacgaatggccccagcgctgccgaggactttatgtgttccagggcgactccagcccctgtagtgctttcgagttccactgcttgtccggtgagtgtattcatagctcctggcgatgcgacgggggccccgattgtaaagataagagcgacgaagaaaactgtgctgtggctacctgccgtccagacgaatttcaatgttccgacggcaattgtatacacgggtcacgacagtgcgaccgtgaatacgactgtaaggacatgtcagatgaggtgggatgcgtgaacgtgacgctctgcgagggacctaacaaattcaagtgtcacagtggcgagtgtatcacactagacaaagtttgtaacatggctagagactgcagggactggagcgatgagcccattaaagaatgtggtactaacgagtgcctggataacaacggcggctgcagtcacgtgtgcaatgacttgaaaatcggcgcagaatgcttgtgtccagacggcttccaactagtcgcccagaggcgatgcgaagatatcgacgaatgccaagaccccgacacctgctcccaactttgcgtcaacctcgagggcggatacaagtgtcagtgtgaagagggctttcagctggacccccatacaaaagcttgtaaagcagtgggcagcatcgcttacctcttttttacaaacaggcatgaggtccgaaaaatgaccctggacagaagtgaatataccagcctgatacccaacctgcgaaatgtggtcgctcttgacactgaggtggctagtaaccgaatttactggtctgatctctcacagaggatgatatgcagtacacagttagatagagcacacggcgtctcttcgtacgatactgtaatcagccgggatatccaggcaccagacgggctcgcagtggactggatacactccaacatatattggaccgactcagttctcgggacagtaagcgtcgcggacaccaagggcgtaaagcgtaaaacattgtttagggaaaacggctctaaacccagggcaatcgtggttgatccagtccacggcttcatgtattggacagattggggcacaccggccaagatcaagaaggggggtctgaacggagtggatatctacagcctggtcaccgaaaacattcagtggccaaacggaattacattggatctcctctcaggtagactctactgggtcgattccaaacttcatagtatcagcagcatcgacgtcaacggtggtaaccgcaaaacgatactcgaggatgaaaagagattggcacatcctttttccctggccgtgttcgaggacaaggtgttctggaccgacatcataaacgaagccattttcagcgctaatagattgacgggttctgatgttaatctccttgcggagaatctcctgtccccagaggacatggtgctgtttcataaccttacacagccacgaggcgtcaactggtgcgaacgcaccaccctctctaacggcgggtgccagtacctgtgcctcccggcgccccagattaacccccattcaccaaagttcacatgtgcatgccccgacgggatgctgctggcccgagatatgaggtcctgtctcacagaagctgaggcagccgtcgctacacaagaaaccagcacggtaaggctcaaagtttccagcaccgccgttcgtacccagcatacaaccactcgcccggtgcccgatacaagcagactgccgggcgccactcccggcctgaccactgtcgaaatcgtgacaatgtctcatcaggccttgggtgacgtggctggccggggcaacgagaagaaaccatctagcgttcgagcactctccatcgtactaccaatagtgctgctcgtcttcctgtgcctgggagtttttctgctctggaaaaactggaggttaaagaacataaacagtattaattttgacaaccctgtctatcaaaaaacgacagaagacgaggtgcacatatgtcacaaccaggacggctattcttaccctagccgacagatggtctcccttgaagatgatgtggcg

SEQ ID NO: 11440 - DNA, 2580 bp, Artificial Sequence
  derived and/or modified sequence
atgggtccttggggatggaagctgagatggactgtggctctgcttctcgctgctgcgggaacagctgtaggggaccggtgtgagaggaacgagttccagtgtcaggacggcaaatgtatctcttacaaatgggtttgcgatggctccgcagaatgccaggatggtagcgacgaaagtcaggagacctgtctgtctgttacctgtaagtccggcgacttcagctgtggcggtagagtcaaccgctgcatccctcagttctggcggtgcgatggtcaggttgactgcgacaacgggtctgacgagcaggggtgtcctcccaagacatgttctcaagacgagtttcgatgtcacgatgggaaatgtatttccagacagttcgtgtgtgactcagatcgtgattgtttggatggttccgacgaagcctcttgtcctgtgctcacttgtgggccggcctccttccagtgcaattcatctacttgcatcccacagctatgggcctgtgataatgacccagactgcgaagacggatctgatgaatggccccaaaggtgtagaggcctgtacgtatttcagggagatagctcaccctgtagtgccttcgagtttcactgcctctcaggcgaatgcatacattcctcgtggcgctgcgacgggggccccgattgtaaagataagtccgatgaggaaaattgtgcagtggcaacctgtcgaccagacgagtttcagtgctctgacgggaattgtattcacgggtcccggcaatgcgaccgggagtatgattgtaaggacatgagcgacgaagtgggttgcgtaaacgttacattgtgcgaaggtcctaacaaattcaagtgccatagtggcgaatgtatcaccctcgataaagtttgtaacatggctcgcgactgtcgagattggtctgacgaaccaataaaagagtgcggaaccaacgagtgtctggacaacaacggaggatgtagccacgtttgtaacgatcttaagataggggccgaatgcctgtgcccagacggctttcagcttgtggcacagcgccgctgcgaggatattgacgaatgccaggaccctgacacatgcagccagttgtgcgtgaacttggagggtggctacaagtgtcaatgtgaggaggggtttcaactcgaccctcacacgaaggcatgcaaagcggttggttccatcgcttacctcttcttcactaaccggcacgaagtccgtaaaatgactctagatcggagcgagtacacttccctgattcctaatttgcggaacgttgtggctttagataccgaagtagcctccaacaggatctattggagtgacctgagccagcgcatgatctgctccacccagctggacagagctcacggggtgtcttcatatgataccgtgataagtagagatatccaggcacctgatgggttggcagttgattggatccacagtaacatctattggacagacagcgttctggggaccgtaagtgtggccgataccaagggcgtgaagcgcaaaactttgtttcgggagaacggatcaaagccacgagcgattgtagtggacccagtacacgggtttatgtactggaccgattggggcacacctgctaaaatcaagaaaggtggcctgaatggcgtggacatttactctctggtgactgaaaatatccagtggcccaatgggatcacactggacctactatccggacgcctgtattgggtggactcgaagctgcatagcataagcagtatcgacgtgaacggcgggaacagaaaaacaatcttggaggatgaaaaacggctggcacaccctttttctttggcagtcttcgaggataaggtgttctggaccgacatcattaacgaggcaatcttttccgccaatcgcctgaccggctctgatgttaacctgctagcagagaatctcctgagtcctgaggacatggtactgttccataacctgactcaaccccgcggcgtgaattggtgtgagcgcactaccctttctaatggcggatgccagtatctgtgcctgcccgcgccacagatcaacccccacagcccaaaatttacgtgcgcttgccccgacggaatgctcctggctcgcgatatgcgcagctgtctgactgaggcagaagccgctgtggcaacacaagaaaccagtacggtcagactgaaagtttcttcgacagctgtccggactcagcatacaaccaccaggcccgtacccgacacctcacgtctccccggcgcaacacccggactgacaaccgtcgagattgtcactatgtcccaccaagcgctgggcgacgtcgcaggacggggcaacgaaaagaagccaagttcggtaagggccctgagtatagtcctacccatcgtgttattggtgttcctgtgtcttggtgtgttcctgctgtggaagaactggagactgaagaacattaacagcataaactttgataatccagtgtaccagaaaactactgaggacgaggtccatatctgccacaatcaggatggatacagctatccttctaggcagatggtttccctggaggatgatgtcgct

SEQ ID NO: 11441 - DNA, 2580 bp, Artificial Sequence
  derived and/or modified sequence
atgggaccctggggatggaaactgcgctggaccgtggcactgctgctcgcagcagccggaacggcagtgggagataggtgtgagagaaacgagttccaatgtcaagacggtaaatgtatttcgtacaaatgggtgtgtgatggctccgccgagtgccaagatggatccgatgagtcgcaggagacttgtctctccgttacttgtaagtccggggatttcagctgtggcgggcgggtgaacaggtgtattccacaattttggagatgtgatgggcaagtggattgtgacaacgggtcggatgaacaggggtgtccaccaaaaacttgctcgcaagatgaatttcggtgccacgacggcaagtgtatcagccgccaatttgtgtgtgattcggatcgcgactgtctggacggatcggatgaagcatcctgtccagtgcttacctgtggccccgcctccttccagtgtaattcgtcgacctgtataccccaattgtgggcatgtgataacgacccagattgcgaagatggcagcgatgagtggcctcagcgctgtagggggctttacgtgtttcagggtgactcctcgccctgttccgcatttgagtttcattgtctctcgggagaatgtattcattcgtcgtggcgatgcgatggaggaccagactgcaaagacaaatcagatgaggagaattgtgcagtggcaacctgtagaccggatgagtttcaatgcagtgatggtaactgcattcatggatcccggcaatgcgatagagagtacgattgtaaggatatgagcgacgaggtgggatgcgttaacgtgaccctgtgtgaaggacccaataagtttaagtgccattccggcgaatgtataacccttgataaggtgtgtaacatggctcgtgattgccgggattggtcggacgaacctataaaggaatgcggcaccaacgaatgtctcgataacaacggaggttgttcgcatgtgtgcaacgatcttaagataggcgcagagtgtctttgtcctgatggttttcagcttgtggctcaaagaaggtgtgaagatatagatgaatgtcaagaccctgacacctgctctcaactgtgcgtgaatctggaaggtggatacaagtgtcagtgtgaagaaggattccagcttgaccctcatactaaggcctgtaaggcagtcggttctatcgcgtacctgtttttcacgaaccggcacgaagtgcggaagatgactcttgatcgtagcgagtacacctcccttattccaaatctgcgcaatgtggtcgcactggatactgaagtcgccagcaacagaatctactggtcggatctgtcccaacggatgatctgctcgacccaactggatcgtgcccatggagtcagctcctacgacaccgtgatctctcgcgacatccaggcaccagatggtctggcagtcgactggatacattccaacatttactggacggattcagtgctcggtactgtgtccgtggcggacaccaagggagtgaagagaaagactttgtttcgggagaatgggtctaagccaagagcaattgtggtggaccccgtgcatggtttcatgtactggactgattggggaactccagctaagatcaaaaagggaggtctgaacggagtggatatctacagccttgtgactgaaaacattcagtggcccaacggaattaccctggacctcctgtcgggacggctgtattgggtggattcaaagctgcacagcatttcaagcattgatgtgaacggaggaaatcggaaaaccattcttgaggacgaaaagcggctggcacatccttttagcctcgcagtgtttgaagataaggtcttttggaccgacatcattaacgaggcgattttctcagcaaataggctgactggaagcgatgttaacctgcttgcagaaaatctgcttagccccgaggacatggtgctctttcataaccttacccaaccaagaggagtgaattggtgcgagagaaccaccttgtcaaatggcggttgtcagtacttgtgcctcccggccccacagatcaacccccactcccctaagttcacgtgcgcgtgccccgatggcatgctcctcgcacgggacatgaggtcgtgtctcactgaagcagaagctgcagtagcgacccaagagactagcactgtcagacttaaagtgtcctcgaccgcagtgagaacccaacatactaccacccgtccagtccccgatacgagcagactccctggtgcaactcctggcctcactactgtcgaaatcgtgactatgtcgcatcaagcactcggtgacgtggccggacggggaaacgagaaaaagccaagctcagtgcgtgcgctttcaatcgtccttcctatcgtgctgcttgtgttcctttgcctcggagtgtttttgctgtggaaaaactggagacttaagaatatcaattccatcaactttgataaccctgtgtaccaaaagaccaccgaagatgaggtgcacatctgtcataaccaagacggctacagctacccctcgcgccaaatggtgtcattggaagatgatgtcgcc

SEQ ID NO: 11442 - DNA, 2580 bp, Artificial Sequence
  derived and/or modified sequence
atggggccctggggatggaagctgcggtggaccgtggctcttctgctggcggccgcgggtactgctgtgggggaccggtgcgaacggaacgaattccagtgccaggacggtaaatgcatctcatacaagtgggtctgtgacggatctgcggagtgccaggatgggtcggacgaaagccaagagacttgcttgtcagtgacttgcaagagcggcgatttcagctgcggaggccgcgtcaacagatgtattccgcaattctggagatgcgatggacaggtggattgcgataacggttcggacgaacagggatgtccgcctaagacttgctcccaagacgaatttagatgtcatgatggaaagtgtatcagccgacagttcgtgtgtgattcggaccgtgactgcctcgacggaagcgacgaggcttcctgcccggtgctcacctgcggtccggcctccttccagtgcaattcctccacctgcatcccccagctgtgggcttgtgacaacgaccctgactgcgaagatggatcagacgaatggccgcagcggtgcagaggtctgtacgtctttcaaggcgactcgtccccttgctccgcattcgaattccactgcctgtcgggagagtgtatccactcctcgtggcggtgcgatggcggacccgattgtaaggacaagtctgacgaggagaactgcgccgtggcaacttgtcgcccagacgagttccagtgctccgacggaaactgcatccatggcagccggcaatgcgacagagaatacgattgcaaggacatgtccgacgaggtgggatgcgtgaatgtcaccctgtgtgagggacctaacaagtttaagtgccactcaggagaatgcatcactctggataaggtgtgcaatatggccagggactgccgggactggtccgacgaacctatcaaggagtgcgggaccaacgaatgcctggacaataacggtggatgctcccacgtgtgcaacgacttgaagatcggagctgaatgcctctgcccggatgggttccaacttgtggctcagcgccgatgcgaagatatcgacgaatgtcaggacccagacacctgctcccagctctgtgtgaacctcgagggtggatacaagtgccagtgcgaggagggcttccagctcgaccctcacaccaaggcctgcaaggcagtgggctcaatcgcatacctcttctttactaaccgccatgaagtcagaaaaatgactctcgatcgctcagaatacaccagcttgatcccgaacctgcgcaacgtggtggctctcgacacggaagtggccagcaaccggatttactggtcagacctgtcgcagcgcatgatctgctcgacccagctcgaccgggcgcatggagtgtcgtcatatgacaccgtcatctcgcgcgatattcaagcaccggacgggctcgcggtggattggatccattccaatatctactggactgacagcgtcctgggcaccgtgtccgtggccgacacgaaaggagtgaaacgcaagacgctctttagagaaaacgggtcaaagccacgggctatcgtggtggacccagtgcacggctttatgtattggaccgactggggaacgcccgcaaaaatcaagaagggtggactcaatggagtggacatctacagtcttgtgactgagaacatccagtggccgaacggcatcaccttggatcttctgtcagggcgcctctactgggtggactctaaacttcatagcatctcaagcatcgacgttaatggaggaaacagaaagactatcctggaggacgaaaagcggctggcacacccgttctccctcgcggtgttcgaagataaagtgttctggactgacatcattaatgaggctatcttttccgcgaatcgcttgactggatcagatgtgaacctccttgccgaaaacttgctgagcccggaggacatggtgctgttccacaacctcacccaaccgcggggagtgaattggtgcgagagaaccaccctgtcaaatggcggatgtcagtacctgtgtctgccagcgccgcagatcaatccgcattcgcccaagtttacctgtgcatgcccggacggaatgcttctcgcacgggatatgcggtcctgcctcactgaagcggaggccgccgtggccacccaagagacgtcaaccgtcagacttaaagtgtcatcaactgcagtccggacccagcataccacgaccagaccagtcccagatacctcgcgcctcccgggcgcaactccaggactgaccaccgttgagatcgtcactatgtcacaccaggccctgggagatgtggctggccgcggaaacgaaaagaagccatcgtcggtgcgagcactctccatcgttctgccgatcgtgctccttgttttcttgtgcctgggcgtctttctgctgtggaaaaactggcgccttaagaacatcaactcaattaacttcgacaatccagtgtaccagaaaactacggaagatgaagtccatatctgccataaccaggatggatactcgtacccatcccggcagatggtatcgctcgaggatgacgtggcc

SEQ ID NO: 11443 - DNA, 2580 bp, Artificial Sequence
  derived and/or modified sequence
atgggcccttggggctggaaactgagatggaccgtggcactcctgctggcagcagccggaaccgccgtaggagatcggtgcgaaagaaatgaattccaatgtcaagacggtaagtgtatatcatacaagtgggtgtgtgatggctccgcagagtgtcaggatggatcggatgaatcacaggaaacctgtctgtccgtgacttgtaagtccggggacttttcgtgtgggggacgtgtgaacaggtgtattcctcagttctggcgctgcgacggtcaagtggactgtgataacggcagcgatgagcaaggatgtccccctaaaacgtgctctcaagatgaattcagatgccatgacggaaagtgtatctccagacagtttgtgtgtgacagcgaccgggattgtctggatggttcggatgaggcatcatgccctgtcctcacctgtggccctgctagtttccaatgtaattcgtcaacctgcatcccgcaactgtgggcatgtgataatgaccctgactgcgaagatggatcagatgaatggccccaaagatgtagaggactgtacgtgtttcagggagattcgtcgccgtgcagcgccttcgagttccattgtctgtctggtgaatgtattcattcctcgtggcgatgtgatgggggtccagattgtaaagacaagtcagatgaggagaattgcgcggtggccacttgtcggccagatgaatttcagtgttccgatggcaactgtattcatggatccagacaatgtgatagggaatacgattgtaaggatatgtctgacgaagtgggttgtgtgaacgttaccctgtgtgagggtcccaacaaattcaagtgccatagtggtgagtgcatcacccttgataaagtgtgtaacatggcaagagattgccgtgattggtcggacgaaccaatcaaggaatgtggtactaacgagtgtctcgataacaatgggggctgttcccatgtgtgcaatgacttgaaaatcggagcggaatgtctgtgccccgatggcttccagctcgtggctcagagacggtgtgaagatatagacgaatgccaagaccctgatacttgcagccagctgtgcgtgaaccttgagggtgggtacaagtgtcagtgtgaagaaggcttccaacttgatcctcacactaaggcgtgtaaggcagtgggatcgatcgcctacctgttctttacgaacagacacgaagtcagaaaaatgaccctggatagaagcgaatacacttccctcattcccaatctgcgcaacgtcgtcgcactcgacaccgaagtggcttcgaatcgcatttactggagcgacctgtcccaaagaatgatttgttcaacccaactggacagagcgcatggagtgagcagctatgataccgtgatctctagggatattcaagcacctgatggactggcagtggactggatacacagtaacatttactggactgactcggtgctgggcaccgtcagcgtggctgatactaaaggtgtgaagagaaagactctgtttcgagagaacggctcgaaaccacgagcaattgtcgtcgatccggtgcacggatttatgtactggaccgactgggggactccagcaaagatcaaaaagggtggtctgaatggtgtggacatctattctttggtgactgagaatatacagtggcctaacgggattaccctggatttgctctctggaaggctttactgggtggactctaagttgcactcgatttcgagcattgatgtcaacggcgggaaccgtaagacgattcttgaggacgaaaagcgccttgcacatccatttagccttgccgtctttgaagataaggtattctggactgacataatcaacgaggcaattttctccgcaaaccgcttgacgggatcagacgttaatctgcttgcagagaacctgctttcgcccgaggacatggtgctttttcataacttgactcagcctagaggagtgaactggtgtgaacgcaccacgctttctaatggagggtgtcagtacttgtgcctgcctgcacctcagatcaatccacactcacctaagtttacgtgtgcgtgtccagatggaatgcttctggctcgggacatgagatcgtgtctcaccgaggccgaagcagccgttgcaactcaggaaacctcaactgtgcggcttaaagtctccagcaccgctgtgcggactcagcacacgaccaccagaccagtgccagatacctccagactgcccggagctactcccgggctgactaccgtggagattgtgaccatgtcacatcaagcacttggcgacgtggcaggacgagggaatgaaaagaaaccgtcctcagtccgcgcacttagcatcgtgctcccaattgtgcttctggtctttctgtgtctcggtgtgtttctcctttggaaaaactggcgcctcaagaacataaactcgattaacttcgacaaccctgtgtaccaaaagaccacggaagatgaggtccatatttgccataatcaagatggctactcgtacccatcgagacaaatggtgtccttggaagatgacgtcgca

SEQ ID NO: 11444 - DNA, 2580 bp, Artificial Sequence
  derived and/or modified sequence
atgggcccttgggggtggaaattgagatggacggtggctctattattagccgcagctgggaccgcagtgggtgatagatgcgagcggaatgaattccaatgtcaagatggaaaatgtatttcgtataaatgggtctgcgacggatctgcggaatgtcaggatgggtccgatgaatcgcaagaaacttgccttagtgtcacctgtaaaagtggtgacttttcctgtggcggccgggttaatcgctgcatcccgcagttttggcgatgtgatggacaagttgattgtgacaatggtagtgatgaacagggctgccctccgaaaacctgtagtcaggacgagtttagatgtcatgacggaaagtgcatttcgcggcagtttgtttgcgatagcgatcgggattgtcttgatggctcagatgaggcttcttgccctgtcttgacatgtgggccggcctcttttcaatgtaatagctctacgtgtattccgcagctctgggcctgtgataatgaccctgattgcgaagacggctctgatgagtggccacagagatgtagaggtctatatgtatttcaaggtgattcatctccatgcagtgcctttgagtttcactgtctcagcggagaatgtattcacagcagctggcgatgcgatgggggcccggactgtaaagataaatcagacgaagagaactgcgctgtcgctacatgtcgtccggatgaatttcaatgcagcgatggtaactgcattcatggttctagacaatgtgacagggaatatgattgcaaggatatgtccgacgaagtcggatgcgtaaatgtgacgctttgcgaaggccctaacaaatttaaatgtcactcaggcgaatgcatcacacttgacaaggtttgcaatatggcacgtgactgtcgtgactggtctgacgaaccaatcaaagaatgtggtacaaatgagtgtttggacaacaatggcggatgctctcatgtatgtaacgatcttaaaattggggccgaatgtctttgtccggacggatttcagcttgttgcacaaaggcgctgcgaggatattgatgaatgtcaggacccggatacttgcagccagttatgtgtcaatctagaaggcggatataaatgtcagtgcgaagaggggtttcaattagatccgcacacgaaggcttgcaaagcggtgggttcaattgcctatctgttcttcacgaataggcatgaagtgcggaaaatgacattagatagatcagaatatacaagtttgatcccgaatttgagaaacgtggtagctttagatactgaagtcgcatccaatcgtatttactggagcgacttgagccaaagaatgatctgtagtacgcaactagatcgtgcccatggagtgagcagctacgatacagtgattagcagggatattcaagcgccggacgggttagcggttgattggatccattctaacatttattggaccgatagtgtccttggaacagttagcgtggcggacaccaaaggggtcaaacggaaaacactgtttagagagaatggatcaaagcctagggcgatcgttgtggatccagtacacggttttatgtactggacggattggggaacgcccgcgaaaatcaagaaaggaggccttaatggagtcgatatctactctctcgtgacagagaatattcaatggccgaatggtatcacccttgaccttttgtccggaagactgtattgggtcgacagtaagctgcactcaatttcgagcattgatgtcaatggaggaaacagaaagacgatacttgaggacgaaaagcggttagctcatccttttagcctcgccgtgtttgaggacaaagtattctggacagatatcattaacgaagccattttcagcgcgaatcggctcactggctcggacgtaaacctgttagctgagaatttactgagtcctgaagatatggtcttgtttcacaacttaacgcagccgcgcggtgtcaactggtgtgagcgcacaacacttagtaacggaggatgccaatatctgtgtcttccagctccacagattaaccctcattctccaaaatttacgtgtgcttgtccggatggaatgttgctggcaagagatatgcgcagctgcttgactgaggctgaagcagccgttgcaacccaggaaactagtactgtgagacttaaagtatcttccacagccgtccggacacaacatacaacaactcgaccggtgccggatacaagcagactgccaggcgcaactccaggcttaacgacagttgaaattgtaacgatgtcacatcaggcgttgggggatgtggcgggacgtggcaatgagaaaaaaccaagctccgtacgcgcgcttagcattgtactcccaattgtccttttggtctttctgtgcctgggcgtgttcttactgtggaaaaactggcgcctgaagaacataaactcaattaattttgacaacccggtatatcagaaaacgacggaggacgaagtacatatttgccataatcaggatggttacagttatcccagcagacaaatggtaagtcttgaggacgatgtcgct

SEQ ID NO: 11445 - DNA, 2580 bp, Artificial Sequence
  derived and/or modified sequence
atgggcccgtgggggtggaagctcagatggaccgttgcccttttgctggctgctgctggcacagctgtgggagacagatgtgagagaaacgaattccagtgtcaggacgggaaatgcatttcttataagtgggtgtgtgatgggtccgccgagtgccaggacggatcagatgagtcccaggaaacctgtctatctgtcacttgcaagagcggcgatttttcgtgtggcggaagggttaacagatgtatcccacagttttggagatgcgacgggcaggtcgactgcgacaatgggtcggacgagcagggctgtcctccgaagacttgttctcaggatgagtttaggtgccatgacggtaaatgcatttcccgccagttcgtgtgcgattcagatcgtgattgcctcgatggctcagacgaagccagctgccccgttctgacctgcggtccagcttccttccagtgcaattcatccacctgtatcccccagttgtgggcttgtgacaatgatcccgattgcgaggacggaagcgacgagtggccccagcgatgccgtggcctatatgtgtttcagggcgactcctctccctgtagtgcttttgagttccattgtctgtcaggggaatgtatccactcaagctggaggtgcgatggcggacctgattgcaaggacaagtctgacgaagaaaattgtgcggtagctacctgcaggcccgacgagtttcagtgctcagatgggaactgtatccatggatcccggcaatgcgatagggagtacgactgcaaggatatgagcgatgaggtgggctgcgtaaacgtgacattgtgcgaagggcccaataagtttaagtgccacagtggggagtgcatcacgcttgacaaagtgtgtaacatggcacgcgactgtcgcgactggagcgatgagcctataaaagaatgcggtacaaacgagtgcctggacaacaatggaggctgctcccatgtgtgtaacgatctgaaaatcggagcagagtgcctgtgccccgacgggtttcagctggtggcacagcgtcggtgtgaggacatagatgagtgccaggaccccgatacctgtagtcaactgtgtgtgaatctggaaggcggctacaagtgtcaatgcgaagaaggatttcagttggatccccacaccaaagcgtgtaaagcagttggctcaattgcctacctgttcttcacaaatcggcacgaggtccgtaagatgacactggatagatctgaatacacatctctgatccctaatctcagaaacgtggtggccctcgacaccgaggttgcaagcaaccgaatttattggagcgacctgtctcagcggatgatttgctcaacacagttggatcgcgctcatggcgtgtccagctacgacaccgtgatttcccgagacatccaggcccccgatggccttgccgtcgattggatccacagtaacatctactggaccgacagtgtgctgggcactgtgtccgtagctgacacaaaaggagtgaaacgcaagactctttttagagagaatgggtcgaagccgagagcaatcgtggttgaccctgtacacgggtttatgtattggactgactggggaacaccggctaagatcaaaaaggggggtttaaatggtgtcgacatatatagcctcgtcactgaaaatatccagtggcccaacgggattacacttgatctgttgagcggaagactctactgggtcgacagtaagctccactccattagttctatcgatgtaaacgggggcaatcggaaaacaatcctggaagacgaaaaacgtcttgcccatcctttctcattggctgtatttgaggacaaggtgttctggaccgatataatcaacgaggcgatcttcagcgcaaacaggctcaccggaagtgacgtgaacctcttagcagagaatctgttaagtcctgaggacatggtgctattccataatctaacacaaccccgcggtgtcaactggtgtgagcggaccacactgagtaacggcggctgccaatatctgtgcctgcccgcaccccagatcaatcctcattctcctaaattcacatgcgcttgtcctgacgggatgttgctcgcgagggacatgagatcgtgcttaacagaggcagaggccgccgtggctacccaggagaccagtactgtaagactgaaagtgtcttcgacggcggtgcgtacccaacataccacgacacggcctgtgccggatacaagcagacttcctggggcgacgccgggattaaccaccgtggaaatcgtgaccatgtcccaccaagcactaggtgacgtggctggcagaggaaatgagaagaagccatccagcgtacgggcgctaagtatcgtcctgcccatcgtgctcctagtattcctttgtctgggtgttttcttgctttggaaaaactggaggctcaagaacataaattctattaattttgacaatccagtatatcagaagaccaccgaggacgaggtgcacatctgccacaatcaagacggctactcctacccaagccgccagatggtgtcactcgaagatgacgtggct

SEQ ID NO: 11446 - DNA, 2580 bp, Artificial Sequence
  derived and/or modified sequence
atgggcccctgggggtggaagctccggtggacagtcgctctccttctcgcggcagccggaacggcggttggagatcgatgtgagagaaatgaattccaatgccaggacggcaagtgtatttcgtacaaatgggtgtgtgatggctctgccgaatgccaagatggctctgacgagtcacaagagacctgtctctccgtcacatgcaagagcggcgacttctcctgcgggggaagagttaataggtgtatcccacaattctggcggtgcgacggccaggtcgattgcgataacgggtccgacgagcagggctgcccccccaaaacgtgcagccaggatgaattccggtgccacgatggcaagtgtatctctcgccagttcgtgtgtgatagtgatagggattgcctggacggctctgatgaagcatcctgtcctgttctgacatgcgggcctgcctcatttcagtgtaacagttcgacatgtataccccagctctgggcgtgcgataatgaccctgactgcgaggatggaagcgacgaatggccccagagatgtagaggactgtatgtcttccagggagactctagtccctgttctgcctttgaattccactgcctgtctggtgagtgtatccattcttcttggaggtgtgatggcggccccgactgcaaggataaatccgacgaagagaactgtgcggttgcgacgtgcagaccagacgagttccagtgcagcgacggaaactgcatccacggttcacggcaatgcgacagggagtacgattgtaaggatatgagcgacgaggttgggtgtgtgaatgtgactctgtgtgagggacccaataagtttaagtgccattccggagagtgtatcactcttgataaggtgtgtaacatggcccgcgattgcagagattggagcgatgagccaataaaggagtgtggtactgcagcatgtctggataataatggaggttgcagtcacgtgtgtaacgcattgaaaatcggcgcagaatgtctctgtcctgatggatttcaactggtcgcccagcggcggtgcgaggacatagacgagtgtcaagacccagacacatgctctcagctttgtgtgaatttggagggtgggtacaagtgccagtgcgaagaaggttttcagctggatccccacactaaagcctgcaaagctgtcggctccattgcctacctgtttttcactaaccggcacgaggtccggaagatgacgttggacagaagcgaatacaccagtttaatcccaaacttgcgtaatgtagttgcacttgacacagaggtcgcttccaaccggatatattggtcagacctgagtcagagaatgatctgttcaactcagttggaccgagcacatggtgtcagctcttacgacacagtcatctccagggacattcaggccccggatggcctagccgtggactggatccatagcaatatttattggacggactccgtcctggggaccgtgagtgtcgccgacaccaagggggttaagcggaaaacactgttccgcgagaacggctcaaaaccccgcgcaattgtcgtagaccctgtgcacggcttcatgtattggacagactggggcactccagctaaaattaagaagggaggcctgaacggagtggatatctactcgctcgtgaccgagaacatccagtggccgaatggcatcaccctggatttgttgtcaggccgcctctattgggttgatagcaaactgcatagtataagttccatagacgtgaatggcggaaataggaaaactatcctcgaagatgagaagaggcttgcccacccatttagtttggctgtgttcgaagacaaggtgttttggacggatataatcaacgaggcaatctttagcgccaaccggttgacaggttcagacgttaacttgttggccgaaaacctacttagtcccgaggacatggtactgtttcacaatctaactcagccacggggggttaactggtgcgagcgaacgaccttatcaaacggtggctgccagtatttgtgtctgcctgccccacagataaacccacactcaccaaaatttacctgtgcgtgtccagacggaatgcttctggctcgagatatgaggagttgtctcactgaagccgaagccgctgttgccacgcaggagacctcaactgtccggctcaaagtctcatcaacagcggtgcgcacacagcatacaacaacccggcctgtgcctgacaccagcagactccccggggcgacaccagggctcaccaccgttgagatagtgacaatgagtcatcaggctctgggcgacgtggcgggaagaggcaatgagaaaaagcctagctctgtgagagctctctctattgtcctgccgattgtgctactggtctttctctgtttgggtgtcttcctgttgtggaaaaactggcggctcaaaaatattaactctattaactttgacaacccagtctatcaaaagacaactgaggacgaggtgcacatctgtcacaaccaggacgggtactcctacccctctaggcaaatggtgtctttagaagatgacgtggct

SEQ ID NO: 11447 - DNA, 2580 bp, Artificial Sequence
  derived and/or modified sequence
atggggccatggggctggaaacttcggtggaccgtggcactgctgcttgcagcagcaggaactgcagtgggcgatcgctgcgagcggaatgagtttcagtgccaggatggcaagtgcatttcatacaagtgggtctgtgacggctctgccgaatgccaggacggatccgatgagtcccaggaaacgtgccttagcgttacctgtaagagtggggatttctcctgcggagggcgcgtcaaccgatgcataccccaattctggaggtgtgatggtcaggttgattgtgataacggatcagacgagcagggctgtcccccaaagacttgttctcaagatgaattccgctgtcacgacggcaaatgtattagccgacagtttgtgtgcgacagcgaccgggattgcctcgatggaagtgatgaagcttcatgccccgtacttacctgcgggccagcctccttccaatgtaactctagcacttgcatcccacaactgtgggcctgcgacaacgatccagattgtgaggatggaagtgatgagtggccacagaggtgccgcggcctctatgtctttcagggggacagctctccctgctcagcgtttgagtttcactgtctgtctggtgagtgtattcattcctcctggaggtgcgatggcggccccgactgcaaagacaaaagcgatgaagaaaattgcgcagtcgccacttgccggcctgacgaattccaatgtagtgacggtaactgcatccacgggagccggcaatgtgatcgcgagtacgattgtaaggacatgtcagatgaggtgggatgcgttaatgtcacactgtgtgaaggcccaaacaagttcaaatgccattcaggtgagtgcattacgctggataaggtgtgcaacatggcccgcgactgtagagactggtcagacgaacccatcaaggaatgtggaacagccgcctgccttgataataatggaggatgctctcatgtgtgtaatgctctgaaaatcggagcagagtgtttgtgtcctgatggatttcagctggtggcccagagacggtgcgaggatatcgatgagtgtcaggatccggacacttgctcccagctctgcgtgaacttggagggcggctacaaatgccagtgcgaggaggggtttcagctggatcctcatactaaggcctgtaaggccgtggggtccattgcctacctgttcttcacaaatcggcacgaagtgcggaagatgacactggatcgctccgagtacacctcccttattccaaacctgaggaacgtggtggctctggatactgaggttgccagtaacagaatctactggagtgacctcagtcagaggatgatctgtagcactcaactcgatcgggcccatggcgtgtcatcatacgatactgtgatctctcgagatattcaggctcctgatggattggcggtggactggattcattctaacatttattggaccgattccgtactcggcactgtctccgtcgcagatacaaagggggtaaaacggaagacactgttccgcgaaaacggttccaagccccgagcaatcgtagtcgatcctgtacatgggttcatgtactggaccgactggggcactcccgcaaaaattaaaaaaggcggcctgaatggcgtggacatatacagcctggtcacagagaatattcagtggcccaacggcatcacactggatctgctgtctggccgactctactgggtcgacagtaagttgcactccatcagcagcatcgacgtgaacggtgggaatagaaagactatcctggaggacgaaaagagactggcccacccattcagtctggctgtcttcgaggacaaggtgttctggactgacatcatcaacgaagctattttcagcgctaacagattgactggatcagacgtaaatctgttggctgaaaatttgctctcacctgaggatatggtgctttttcacaacttgactcagccacgaggagttaactggtgcgagcgcactactctgagtaatgggggctgccagtacctttgtctccccgcacctcagattaacccccattcccccaaattcacatgtgcctgccccgacggcatgcttctggccagggatatgaggagctgtcttaccgaggcagaagccgcggtagccacccaggaaacctctacagtacgcctcaaggtctcatctaccgccgtgcggacccagcatacaacaaccaggcccgttcccgacaccagcaggctgccaggcgctacaccaggccttacaaccgtggagatagtcacaatgtctcatcaggccctgggggatgtggccggcaggggcaacgagaaaaagcccagcagcgttagggccttgtccattgtgctgcctattgtcctgctggtgttcctttgcctgggcgtatttttgctgtggaaaaattggcgactgaaaaacatcaactcaatcaatttcgataatcccgtgtaccagaaaacgaccgaagacgaggtgcacatttgccacaaccaagacggctatagctaccccagtagacagatggttagtcttgaagacgacgtagct

SEQ ID NO: 11448 - DNA, 2580 bp, Artificial Sequence
  derived and/or modified sequence
atggggccatgggggtggaagctcaggtggactgtggccctcctgctagccgcggccggaacggccgttggagataggtgcgagcggaatgagtttcagtgccaggatggcaaatgcatctcctacaaatgggtctgcgatggctccgcggagtgtcaggatggctccgacgaatctcaagagacttgcctaagcgttacgtgtaagtctggagacttttcctgcggtggtcgcgtcaatcggtgtataccccagttctggcggtgcgacggtcaggttgattgcgataatggatccgacgagcaggggtgtccacctaaaacctgcagccaggacgaatttcgttgtcatgacggtaaatgtatctcccgacagttcgtgtgcgattcagatcgggattgccttgatggcagcgacgaagcttcctgcccagtcctgacctgtggaccggccagcttccagtgcaactctagtacttgcatccctcagctctgggcgtgcgataacgatcctgattgcgaggatggttcagatgaatggcctcaaaggtgtcgaggcctctatgtattccaaggtgacagttccccctgcagcgcctttgagtttcattgcctttctggagaatgtattcactcaagttggaggtgcgatgggggcccagactgtaaagacaaatccgacgaagagaattgcgcggtcgccacgtgtcgccctgacgagtttcagtgctctgatggcaactgcatccatggttcccggcagtgcgatcgcgagtatgactgcaaagatatgtccgacgaggtaggctgcgttaatgttactctatgtgaaggtcccaacaagtttaaatgtcattcgggtgaatgtatcactctggacaaggtttgtaatatggctagggactgcagagactggtctgacgagccaatcaaagaatgtggcacagcggcctgcctcgacaataatggtggctgtagccatgtctgcaacgctcttaaaattggcgctgagtgcctttgccccgatggctttcaactcgtggcacaaagacgctgcgaggatattgacgagtgccaggatcccgatacctgcagtcagctctgtgtgaatctggagggcggctacaagtgccagtgcgaggaggggtttcagctggatccacacacaaaagcctgcaaggcggtgggaagcattgcttatttgtttttcaccaacagacacgaagtcaggaagatgaccctggatcggagcgagtatacgtctctgatcccgaacctgaggaacgtggtcgcactggacaccgaggtggcttcaaaccggatttactggagcgatctgagccaacgcatgatatgctcgacccagcttgatagggcacacggagtctctagttacgatacggtcatcagtcgagacattcaggcccctgacggtctggccgttgattggatacattccaacatttactggactgacagcgtcctcgggactgtttcagttgctgatacaaaaggcgtgaagcgtaaaaccctttttcgcgagaacggatcaaagccccgcgccattgtggtagatcctgtgcacggattcatgtactggacagattggggtacccctgcaaagatcaaaaagggagggcttaacggagtcgatatctacagccttgtcacggaaaatattcagtggccaaatgggattaccctagacctgttgagtgggcgcctgtattgggtcgactctaaactccacagcatctcgtccatcgacgtcaatggcggaaatagaaagacaatactagaggatgaaaaacgactggcccatcccttttcgttagccgttttcgaggataaggtgttctggaccgacattatcaatgaggccatctttagcgccaatcggctcaccgggagcgatgttaatttactcgccgagaacctgctgtcacctgaggacatggttctcttccacaaccttacacagccccgcggggttaactggtgcgagcgaacaacactgtccaatggagggtgccaatacctttgtcttccagctccacagatcaatccacattctcctaaatttacatgtgcatgcccggatggcatgcttttggctcgcgacatgcgaagctgcctgacagaggcagaagccgccgtggccacacaagaaacctccaccgtgcgcctaaaggttagttccacagctgtacgcacacagcatacaacgactcgccccgtgccggatacatcccgcctgcctggcgctacacccggattgaccacagtcgaaatcgtcacaatgtctcaccaggcccttggagacgtagcgggccgcggcaacgaaaagaaaccgtcctcagtgcgagccctgtcaattgtgctgcccattgtactgcttgtcttcctgtgcctcggtgttttcttgctgtggaaaaactggcggttgaagaacattaattcaattaattttgacaatccagtttaccagaaaaccaccgaggacgaggtgcacatttgccataaccaggacggctactcctatccatctcgacagatggtcagcctggaagacgacgttgca

SEQ ID NO: 11449 - DNA, 2580 bp, Artificial Sequence
  derived and/or modified sequence
atggggccgtggggatggaagctccggtggaccgtggccctgctgcttgccgctgcaggtacagccgtgggggaccgctgcgagagaaatgagttccagtgtcaggacggcaagtgcatttcttacaaatgggtgtgcgacggatcagccgagtgccaggacggctcagatgagtcccaggagacttgtctgtctgtaacttgtaagagtggcgactttagttgtggagggcgggtgaatcggtgcatcccgcaattctggagatgtgatggccaggtagattgcgataacggatcagacgagcaagggtgccctcccaagacttgctctcaggacgagtttcggtgtcatgacgggaagtgcatttcccgccagttcgtttgtgactctgatagggattgccttgacgggtcagacgaggctagctgtcccgtgctgacatgcgggcccgcttccttccagtgcaattcttcaacctgcattccccagttgtgggcctgcgacaatgatccagactgcgaagatgggtctgacgagtggccgcagagatgccgcggactctatgtatttcagggtgactcaagcccctgcagcgccttcgaattccactgcctgtctggagaatgtattcacagttcctggaggtgcgacgggggcccagactgtaaggataagagcgatgaggagaattgtgcagtcgcaacctgcaggcccgatgaattccagtgcagtgacgggaattgtattcatgggtccaggcagtgtgatcgggagtacgactgtaaagacatgtctgacgaagtcgggtgcgtgaacgtaaccttatgtgagggccccaataagttcaaatgccatagcggggagtgtatcaccctggataaggtgtgtaatatggcccgggattgtcgagattggtccgacgagcctattaaggagtgcgggaccgcagcttgtttagacaacaatgggggatgtagtcatgtgtgcaacgccctgaagatcggggcagagtgcttatgtcctgatggatttcagttggtggcacagaggcgttgtgaggatattgatgagtgccaggatcctgacacctgttcgcaactgtgtgtgaacctggaagggggctacaagtgccagtgtgaagagggctttcagctcgacccacacacaaaggcctgtaaggctgtcggctctattgcctacctgttcttcactaaccgccatgaagtgaggaagatgacccttgacaggtccgaatatacatcacttattccaaaccttcgaaatgtcgtggcccttgacaccgaagttgcatcaaatagaatttattggtccgacctcagtcaacgaatgatatgtagtacacaacttgatcgggcacacggcgtctcttcttacgatactgtgatttccagggatatccaagcacctgacggactagctgtggactggattcattccaatatatactggactgactcggtccttgggaccgtctccgtggccgacaccaaaggtgtcaagaggaaaacacttttcagagagaacggatccaagcctagagccattgtggtagaccccgtgcatggcttcatgtattggacagactggggtactcccgcaaaaatcaagaagggtggcttgaacggcgtggacatctacagcctcgtcacggaaaatatccagtggcctaacggcattactctcgacttgcttagtgggcgcctgtactgggtcgactccaaactccatagcatctctagcatagatgtgaacggcgggaatagaaaaactattctcgaggacgaaaaaaggctggctcatcctttcagtttggcggtgttcgaagacaaggtgttctggacagatattatcaacgaggctattttttccgccaaccgactcacaggttctgacgtcaatcttctggctgaaaatttgctatctccagaggacatggtactttttcacaatctgactcagcctagaggcgtgaattggtgcgagaggactaccctatcaaatggcggctgtcagtatttatgtctccccgcccctcagatcaatccccacagccccaagttcacctgcgcatgtcccgacgggatgctgctggcacgggacatgcgcagttgcctgaccgaggctgaggctgctgtagccacccaagagactagcacagtgcggctaaaagtgtcctcgaccgctgtgcggacgcagcacaccacaacgcgccccgtacctgacactagtagattgccaggagccaccccaggcctgacaaccgtcgagatcgttacaatgtcacatcaggccttgggagatgtcgcaggaaggggcaacgaaaaaaagccctcaagcgtgcgcgcgctctcaatcgtccttccaatcgtgctgctggtcttcctgtgcctaggcgtgttcttgctgtggaaaaattggcggctgaaaaacatcaattctatcaacttcgacaaccccgtataccagaagaccactgaagatgaagtgcatatatgccacaaccaggacggctattcatatccctcaaggcagatggtcagtctggaggacgatgttgcc

SEQ ID NO: 11450 - DNA, 2580 bp, Artificial Sequence
  derived and/or modified sequence
atgggcccctggggatggaagctgcggtggaccgtcgcactgctactagccgccgctggaaccgccgtgggagacaggtgtgagagaaatgaattccagtgtcaggacggcaaatgcatcagttataagtgggtgtgcgatggctccgccgagtgccaggacggctcagacgagtctcaggaaacatgcttgtcggttacttgcaagtccggcgatttctcgtgtggaggccgagtgaacaggtgcataccccagttctggaggtgtgacggacaggtcgactgcgacaatggcagcgacgaacaggggtgcccaccaaagacttgctctcaggatgagttccggtgtcacgacggcaagtgcatttcccggcaattcgtgtgcgatagcgaccgggactgtttagacggctccgacgaggcttcctgtccagttcttacatgcgggccagccagctttcagtgcaatagctcaacctgtattccccaactgtgggcatgtgataacgatccggattgtgaagacggcagcgatgagtggccccaaaggtgtcggggcctttatgttttccagggggacagttcaccttgcagcgcgtttgagttccactgcttgtcaggagaatgtattcacagcagctggcgctgcgatggaggccctgattgcaaagataaatcggacgaagaaaattgtgcagttgctacgtgtagaccggacgaattccaatgctccgacgggaattgcattcatggcagtagacagtgtgatagggagtacgactgcaaggacatgtccgatgaggttggctgcgttaatgttacactgtgcgaaggtccaaataaattcaagtgtcactcgggggaatgcatcaccttggacaaggtgtgtaacatggccagggactgtcgggactggagtgacgagccgattaaggagtgcgggacagctgcgtgcttggataataatgggggatgctcccatgtctgcaacgctctaaagatcggcgctgagtgcctatgccctgacgggtttcagctagttgcacaaaggcggtgtgaggacatcgatgagtgccaagatcccgatacatgctcccaattatgcgtgaacctggagggaggatacaagtgtcaatgtgaggaaggatttcagctcgacccccatacaaaggcctgtaaggccgtcggcagtatcgcatatttattttttacaaacagacacgaagtgagaaagatgaccttggatagatctgagtacaccagcctgattcctaacctgaggaatgttgtcgcccttgacaccgaagtggcctccaaccgaatctactggagcgacttgagtcagcgtatgatttgtagcacacagctggaccgggcacatggcgtgtcgtcatatgacaccgttatttcacgtgacatccaggcacccgacggcctcgctgtggactggatccactctaacatttactggacggatagcgttcttggtacggtgagcgtagccgacaccaagggcgtgaagcggaaaacattgtttagggagaatggcagtaaaccaagggctattgtggtggacccagtccacggtttcatgtactggaccgattgggggactcctgccaagatcaaaaagggcgggctcaacggcgtggacatctactctttagtgactgaaaacatccagtggccgaatgggatcacactggacctcctctcagggcgcctgtactgggttgatagcaagctgcactctatcagttccatcgatgtaaacggcggtaataggaaaaccatccttgaagatgagaagcgcctggcacatcccttttctctggccgtgtttgaagataaggtattctggacagacatcatcaacgaagccattttttcagctaaccgattgactggaagcgacgtcaatcttttggccgagaatcttctgagccctgaggacatggtgctgtttcacaacctgactcagccccgcggagttaattggtgcgagagaacaacactgagtaacgggggttgtcagtatctctgtctgcccgccccacagataaatccgcactcacccaaatttacctgtgcctgccccgatggcatgttactggctagggacatgagatcttgtctgaccgaggctgaagctgccgtggctacacaagaaacgtcgacggtacgcctgaaggtgagttcaactgccgtccgcacccagcacacgacaacgcggcctgtccccgacacctcccgcctccctggagcaacccccggattgactacggtagaaattgtgaccatgtctcaccaggcactaggagacgtggccggaaggggaaacgaaaagaagccgtcttccgtgcgcgcgctatctatcgtcctgccaatcgtcttgctagtatttttgtgccttggagtattcttactctggaagaattggagactcaaaaacatcaactccataaactttgataatcccgtgtatcaaaaaaccactgaggatgaagtgcacatttgccataatcaggatggatactcctatccctcgcgccagatggtcagcctggaggacgatgtggct

SEQ ID NO: 11451 - DNA, 2580 bp, Artificial Sequence
  derived and/or modified sequence
atgggtccctggggatggaaactgcgctggaccgtcgccctcctcctggccgctgctggcactgccgtcggggatcgctgcgaacggaacgagttccaatgccaagacggtaagtgtataagctataaatgggtgtgcgatggttccgcagaatgccaagacggatctgacgagtcgcaagaaacttgtttgtccgtgacatgtaagtcaggagattttagttgtggtgggagagtgaaccgatgtataccacaattctggaggtgcgatggccaggtcgattgcgataacggatcggatgagcaaggttgccctcccaaaacttgcagccaggacgagtttcggtgtcatgatgggaagtgcattagccgtcagtttgtgtgtgactccgaccgtgattgtctggatgggagcgacgaagcttcctgccctgtgttgacttgtggaccagcaagttttcagtgtaacagctccacctgcattccacagctgtgggcctgcgataatgatcctgattgtgaagacgggtctgatgagtggccacagagatgccgggggctctacgtatttcagggcgattccagcccgtgctcagcatttgagttccactgcttgagtggcgagtgtatccactcatcctggaggtgcgacggtggccccgactgcaaggacaaatcagacgaagagaactgcgcagtagccacgtgtcggcctgatgaattccagtgtagcgatggaaattgcattcacggtagtagacaatgcgatcgtgagtacgactgtaaggatatgtctgacgaggtgggatgtgtcaatgtgaccctgtgcgagggcccgaataagtttaaatgtcactccggcgaatgcatcactctcgacaaggtgtgtaacatggcccgcgattgccgagattggtccgacgaaccaatcaaagagtgtgggacagccgcctgtctcgacaataacggtggctgtagccacgtgtgcaatgccctgaaaataggcgccgagtgtctttgccctgacgggttccagctggtagcacagcgaaggtgcgaggatatcgatgagtgccaggatcccgatacctgtagccagctctgtgtcaatttggaaggcggatataaatgccaatgcgaagagggttttcagctggatccgcatacgaaggcgtgtaaggcggttggatccattgcctaccttttctttaccaatcgtcatgaggtgcgcaaaatgacacttgatagatcggagtacacatcattaattcccaaccttcgaaatgttgtggcacttgacactgaggtggcttcgaaccgcatttactggtccgatctgtctcagcggatgatttgttcaactcagcttgatagagctcacggggtttcatcttacgacactgtgatttcaagagatatccaggcccccgacggcctggccgtggattggatacacagcaatatctactggaccgactccgtccttggaaccgtctcagtcgccgacaccaagggtgtgaaacggaaaaccctgttcagggagaatggcagtaagcctcgggccatcgtagttgatccagtacatggctttatgtattggaccgactggggcacacctgcaaagattaagaaaggcgggctgaacggggtcgacatctattcgctggtgacagagaatatccagtggcccaatggcattactttggacttgttgagcgggcggctgtactgggtggacagcaagctgcatagcataagtagcattgatgtgaatggggggaaccgcaaaacaatcctcgaagatgaaaaacgtctagcacaccccttcagtttggcagtattcgaggacaaagtgttttggacggatattatcaacgaggccatcttttccgcgaatcggctgaccggcagtgacgtgaatttgctagccgagaacctgctgagtcctgaggacatggttttgttccataacttaacccagccaagaggcgtcaattggtgcgagagaacaactttatcgaacggaggatgccaatacctgtgcttacccgcaccccagattaacccccattccccgaaatttacctgcgcctgtcctgatggcatgctactcgctcgagacatgaggtcttgtcttactgaggctgaggccgccgtcgccactcaggaaacctcaacagtgaggctcaaagttagcagtaccgcagtaaggacacagcacaccacgactcgcccagtgccagacacttcacgtctgccaggcgccaccccggggctgaccaccgttgagattgtgactatgtctcaccaagcattaggtgacgtcgccggaagagggaacgaaaagaagccatccagtgttagggcacttagcattgtcttaccgatagtgctgttagtgttcctttgccttggggtcttcttactgtggaagaactggagactgaagaacatcaatagcatcaactttgacaacccagtgtatcagaagactactgaagatgaagtccacatctgtcacaaccaggatggttactcatacccctctcgacaaatggtgtcactggaagatgacgtcgca

SEQ ID NO: 11452 - DNA, 2580 bp, Artificial Sequence
  derived and/or modified sequence
atgggaccgtggggatggaaactgaggtggactgtggccctcctcctggcggcagctggcacggccgtgggcgatagatgtgagcggaatgagttccaatgtcaggacggtaagtgcatctcctacaagtgggtctgtgacggatcggcagaatgccaagacggatcagatgagagccaagagacttgcctgagcgtgacttgcaaatcgggagatttctcctgtggaggacgcgtgaaccggtgcatccctcagttctggcgctgcgacggccaggtggattgtgacaatggatcggacgagcagggctgcccgccaaagacctgctctcaggatgaatttaggtgccacgacggaaagtgtatctcgcgccagttcgtgtgcgacagcgacagagactgcttggatggctccgatgaggcgtcgtgcccagtgctgacttgcggaccggcatcattccaatgcaatagctcgacttgcatcccacaactctgggcgtgcgacaacgatcccgactgtgaagatggatctgatgaatggcctcagaggtgccgcggactctatgtctttcagggcgactcgtccccatgctcagccttcgaattccactgcctcagcggagaatgtattcattccagctggcgttgcgacggaggcccggattgcaaggacaagtcggacgaggaaaactgcgccgtggccacttgccggcctgacgagttccagtgcagcgacggaaactgtatccacggcagcaggcagtgcgaccgggagtacgattgcaaagacatgtccgatgaagtgggttgtgtgaacgtcaccctctgtgaaggaccgaacaagttcaagtgccactcaggagaatgcattactctcgataaggtgtgcaatatggcccgagactgccgcgattggtcggatgaacccatcaaagaatgtggaactgccgcctgcctggacaacaatggagggtgctcgcacgtctgcaacgccctgaaaattggagctgagtgcctgtgcccggacgggttccagcttgttgcccagagacgttgcgaggacattgatgagtgtcaggaccccgatacttgcagccagctctgcgtcaatttggagggaggctacaagtgtcaatgcgaggagggattccagctggacccacataccaaggcctgcaaggctgtgggatccatcgcgtatttgtttttcacgaatcgccacgaggtgcgcaaaatgacgcttgatcggtcggagtacacttctctgatacctaatcttagaaatgtggtggccctcgacacggaagtggctagcaaccggatctattggtccgacctcagccagaggatgatctgttcgacccagttggaccgggcccacggcgtgagcagctatgataccgtgatctccagagatatccaggccccagacggactcgcggtggactggatccattccaacatctactggaccgattccgtgcttggtaccgtctcggtcgcagatactaagggagtgaagaggaaaaccctgttccgcgaaaatggatccaaaccgcgggctatcgtggtggaccccgtccatggattcatgtactggaccgactggggaaccccggcaaagatcaagaagggaggacttaacggcgtcgacatctactcactcgtgaccgagaacatccagtggcctaacggaatcaccctggatctgctcagcggtcggctgtactgggtggatagcaaattgcattcgatctcctcaatcgacgtcaacggcgggaaccgcaaaaccatcctggaggacgaaaagcgccttgcccacccgttttcacttgccgtgtttgaagataaggtgttctggaccgatatcattaacgaagccatcttctcagctaatcggttgactggatcggacgtgaacctgctggccgaaaatctcctgagcccggaggatatggtgctgttccacaacctgacccaaccgcggggagtgaattggtgcgagcgcaccacgctctcgaatggaggctgtcagtacctgtgcttgcctgctcctcagatcaatccgcactcgccaaagttcacgtgtgcctgcccggacggaatgctgctcgccagagacatgcgctcctgcctgaccgaggccgaagcggcggtggcaacccaggagacgtctaccgtgcgcctgaaagtctcgtcaaccgcagtccggactcagcataccaccaccagaccggtgccggatacttcacgcctgccgggagccaccccgggactcactactgtggagatcgtgactatgagccaccaagctctgggagacgtcgctggacggggtaacgaaaagaagccgtcatcagtgcgcgcgctgagcatcgtgctgccgatcgtgctcctggtctttctgtgcctgggagtgttcctgctctggaaaaactggaggcttaagaacatcaactcgatcaatttcgacaacccggtctaccaaaagactaccgaggatgaggtccacatctgccataatcaagacggttacagctacccctcacggcagatggtgagcctggaagatgatgtggca

SEQ ID NO: 11453 - DNA, 2580 bp, Artificial Sequence
  derived and/or modified sequence
atggggccatgggggtggaagttgcggtggactgtggctctgctgctggcggcggcgggcactgcagtcggagacagatgcgaacggaacgaattccagtgccaagacgggaaatgcatcagctacaagtgggtgtgcgatggaagcgcggagtgccaggatggaagcgacgaatcccaagagacttgcctctcagtgacctgtaagtctggtgactttagctgtggcggtagggtcaacagatgcattccacaattctggaggtgcgatggtcaagtcgattgcgacaacgggtcagacgaacaggggtgtccgccaaagacttgctctcaggatgagtttagatgccacgacggcaagtgcatttcaagacaattcgtgtgtgactccgaccgcgactgcctggacggctccgatgaggcttcgtgcccggtgctgacctgcggccccgcgtcgtttcaatgcaacagttcgacctgtattccccagctctgggcatgcgataacgacccggactgcgaagatggtagcgacgaatggccccagcggtgccgcggcctctacgttttccaaggagattcctccccttgctcggcctttgagttccattgcctctcgggggaatgcatacatagctcgtggcgctgcgatggaggacctgactgcaaggataaatcagatgaggagaactgcgccgtggctacctgccgaccagacgagttccagtgctccgacggaaactgtatccacggcagccgccagtgcgatcgcgaatacgattgcaaggacatgtcagatgaagtggggtgcgtgaacgtcactctgtgcgagggacccaataagttcaaatgccattcgggcgagtgtatcacccttgataaggtgtgcaacatggcacgggactgccgcgactggtcagacgagcctatcaaagagtgcggcaccgcagcctgcctggacaacaatggaggttgctcccatgtttgcaatgctctcaaaatcggcgccgaatgtctgtgcccggacggatttcagctggtggcccagagacgctgcgaagatatcgacgaatgccaggatcctgacacctgcagccagctgtgtgttaatctcgagggaggatacaagtgccagtgcgaggagggatttcagctcgacccacacaccaaggcctgtaaggcagtgggaagcatcgcttacttgttcttcactaaccggcatgaagtgaggaagatgaccttggaccgcagcgaatatacttccctgattccaaacttgcggaacgtggtcgcgctggacaccgaagtcgcttccaaccgcatctactggtcagacctgagccaacgcatgatctgctccacccagctggaccgcgcccacggggtgtccagctacgatactgtcatctcccgggatattcaggcaccggacgggctcgcggtggattggattcattccaacatctattggacggacagcgtcctcggcaccgtgtcagtggccgacaccaagggagtgaagagaaaaaccttgtttagagaaaacggttcgaagccgcgggcgatcgtcgtggaccccgtgcatggattcatgtactggaccgactggggcaccccggccaaaatcaaaaaaggcggcctgaatggagtggatatctactcactggtcaccgagaatatccagtggccaaacggaatcactctggaccttttgtcagggaggctctactgggtggattccaagctccactcgatttcctcgatcgacgtaaacggaggaaaccgaaaaactatcctggaagatgagaagcgcctcgcgcacccgttctcgctggccgtctttgaggataaagtgttctggacggacatcatcaacgaagcgatcttcagcgcgaatcgcctgactggttcagacgtcaacctcctggccgagaatctcttgtcgccagaggacatggtgttgttccacaatttgactcagccgcgaggagtgaattggtgcgagcgtaccaccctctcgaatggaggatgccaatacctgtgcctgccagctccacaaatcaacccgcactccccgaaattcacttgcgcctgccctgatggtatgctgttggcccgcgacatgagatcgtgccttaccgaagccgaggcggcagtggcgacccaggagacttccacggtcagactgaaggtgtcctcgactgccgttaggactcaacataccactactcggccagtgccggacaccagccgtctccccggagcgaccccgggcctcacgactgtcgagatcgtgactatgtcgcaccaggcgctcggcgacgtggcgggacggggaaacgagaagaaaccaagctccgtgcgagcgcttagcattgtcctgccgatcgtccttctcgtgttcctctgcctcggagtgtttctcttgtggaagaattggcggcttaagaacattaactctatcaacttcgacaatccagtgtatcaaaagaccactgaggatgaggtccacatctgtcacaatcaggatggatacagctacccgagccgccagatggtgtcgttggaggatgacgtagcg

SEQ ID NO: 11454 - DNA, 2580 bp, Artificial Sequence
  derived and/or modified sequence
atgggcccctgggggtggaaacttcgctggacggtggcactgctccttgcggccgcggggaccgcagtgggcgatagatgcgaacgtaatgagtttcaatgtcaagacggaaaatgtatatcgtacaagtgggtgtgtgatgggtcagcggagtgccaagacggatcagatgaatcgcaagaaacctgtctgtcggtgacctgcaaatccggagacttctcctgtggtggtcgcgtgaatcggtgtattccacagttctggcgttgtgatggccaagtcgattgtgacaacggctccgacgagcaagggtgtcctcctaagacttgttcgcaagacgaattccggtgtcacgatggaaagtgcatctcacgacagtttgtctgtgattccgaccgcgattgtcttgacggttcggacgaagcctcgtgtcctgtgcttacgtgtgggccagccagcttccaatgtaattcctcgacgtgtatacctcaactttgggcgtgtgataatgatcctgattgtgaagatgggtcggacgagtggccccaaagatgccgtggtctgtacgtgtttcaaggcgattcatcaccatgttcagccttcgagtttcattgtctgtctggcgaatgtattcattcgtcctggagatgtgatggcggacctgattgcaaggataagtccgatgaggagaattgcgctgtggcaacttgcaggcctgatgagttccaatgttcggatggaaactgtatccatggaagcagacagtgtgatcgggaatacgactgtaaggatatgtcggatgaggtcggctgtgtgaacgtgaccttgtgtgagggtccgaacaagtttaagtgtcacagcggtgagtgtattaccctggataaagtctgtaacatggcccgtgattgccgagactggtccgatgaaccgattaaggagtgtgggactgcagcgtgcctggacaataacgggggatgtagccacgtctgcaacgcgctgaagatcggcgcggaatgtctctgtcccgacggttttcaacttgtggcacaaagacggtgtgaagatattgatgaatgccaggatcctgatacctgttcccaactgtgcgtgaacttggaaggtggttacaagtgtcaatgcgaagaaggcttccaactggacccgcataccaaggcatgtaaggcggtgggttcaatcgcatatctcttctttaccaatagacacgaggtccgcaagatgactctcgatcgctcagaatacacctcgctgatacctaatctgcgcaacgtggtggcactggataccgaagtggcaagcaatcgaatttactggagcgacttgagccagcgaatgatatgctcaacccagctggaccgggctcatggggtcagctcgtacgataccgtgatttccagggatattcaagcacctgacggtctggcagtggattggatccatagcaacatatactggactgacagcgttctcgggaccgtgtcagtggcggatactaagggtgtgaaacgaaagactctgtttagagaaaacggatcgaagccaagagccattgtcgtggatccagtgcatggatttatgtactggacggattggggcaccccggcaaaaatcaagaaggggggacttaatggggtggatatctactcgcttgtcactgagaatatccaatggcctaacggaataactctcgatcttctgagcggtcggctctactgggtcgactcgaaacttcattcaatttcatcgattgatgtgaatgggggaaaccgaaaaactattttggaagatgaaaagaggctggcacatcctttttcgctcgctgtgttcgaagataaagtgttttggactgacattatcaatgaagcgattttctctgcaaatcgacttaccggttcggatgtgaatcttcttgccgaaaacctgctttccccagaagatatggtgctctttcataaccttactcaacctaggggcgtcaattggtgcgaaagaaccacccttagcaacggtggatgtcaatacctctgccttccagctcctcagattaacccacactcacccaagtttacttgtgcctgtcccgatggaatgctccttgcccgcgacatgagatcctgcctgaccgaagcggaagccgcagtggctacccaagaaacttcaaccgtccgactgaaagtctcctctaccgcagtccgcacgcaacatactaccaccagaccagttccagataccagccgtctgccgggagcaacccctggtctgaccactgtcgaaattgtgaccatgagccatcaagctcttggtgacgtcgcaggaagaggtaacgagaagaaaccgtcctcagtgcgggcgctgtcaattgtgctgccaatagtgctcctcgtgtttctgtgtctgggagtctttctgctttggaaaaactggcggcttaagaacattaactcaattaactttgataacccagtctaccaaaagaccactgaagatgaagtccacatctgtcataaccaagacggctactcctatccctcgcgacagatggtgagcctggaggatgacgtggct

SEQ ID NO: 11455 - DNA, 2580 bp, Artificial Sequence
  derived and/or modified sequence
atgggcccatggggatggaaactcaggtggacagtcgccttgctgctggctgccgctggtactgctgtgggcgaccgttgtgagaggaatgagttccaatgccaggatggcaaatgcatctcttataaatgggtatgtgacggctcagcagaatgtcaggacggctcggacgaaagtcaggagacttgtctttcagtcacgtgtaaaagtggtgatttctcatgtggaggtcgcgtgaatcggtgcatcccccagttttggcgctgtgatggccaggttgattgcgacaacggatctgatgaacagggttgtcctccgaagacatgcagtcaggacgagtttcgctgccacgatggcaaatgcatttccagacagttcgtttgcgactcagatcgagattgtttagacgggagtgatgaggcctcatgcccggtgctcacttgcgggccagcaagctttcagtgtaactcctccacctgcatccctcagttgtgggcctgcgacaatgacccagactgcgaggatgggtctgatgagtggccccagagatgccgggggctgtacgtgttccaaggagattctagtccgtgttcagcatttgagtttcattgtctctccggcgagtgcatccattcttcctggcgctgtgatggaggcccagattgcaaggacaagtctgatgaggagaattgcgcagtcgccacctgcaggcctgacgagttccagtgcagtgacggaaattgtatccacggctctaggcagtgtgatcgcgagtacgactgcaaagacatgagtgatgaagtaggctgcgtgaacgtgaccttgtgcgaagggcccaacaagtttaagtgtcattcgggggagtgcattactttagataaggtgtgcaatatggctcgggactgccgcgattggagcgatgaacccatcaaagaatgtggcacagcagcctgtctagacaataacggaggatgttcccacgtctgtaacgcactcaagattggggctgagtgtctgtgccccgacggattccaattggttgctcaacggcggtgcgaggatattgacgagtgccaggatccagacacgtgttcgcagttgtgtgttaatcttgaaggaggttataagtgccagtgtgaggagggcttccagctcgacccccacaccaaggcgtgcaaggccgttgggtctattgcatacttgttttttactaatcggcatgaagtgaggaagatgactctggatcggagcgagtacacatctctaatacccaacctgcggaacgtggtggccctcgataccgaagtagcatccaatagaatatactggagtgatttaagccagcgcatgatctgctccactcaacttgatagggctcatggggtctcgtcctatgacactgtgatcagtagggatatccaagcccccgacgggcttgccgtggactggattcattcaaacatttattggaccgactcggtgctggggactgttagcgtggcagacaccaagggcgtaaaacgcaaaacactgtttagagaaaacggtagtaaacctagggccatcgtagtcgatccagtgcacggcttcatgtattggaccgactggggcacccccgctaaaattaagaaaggggggttgaatggcgtggacatctattcgctggtgactgaaaacatacagtggcctaatggaattactctggatctgctcagcggaaggctgtattgggtggatagtaagctgcattctatttcgagcattgacgtaaacgggggaaatagaaagacaattctagaggatgagaagagactggcccatccattttctttagccgtttttgaagacaaagtgttttggacagatattatcaacgaggccatttttagcgcgaaccgactcaccggaagtgacgtgaacctgcttgctgagaacttgttaagtccagaggatatggtgctgttccataacttgacacagccacggggtgtcaattggtgcgagcgaaccacattgagtaacggagggtgccagtatttgtgtctccccgctccccagataaacccccattcaccaaagttcacatgtgcctgcccagacggaatgctactggcacgggacatgcgttcatgcctgactgaggctgaggccgcggtggccacccaggagacatccaccgttcgcttaaaagtgagttctactgcagtgcggactcaacatacaacgactcgacccgtgcctgacacttcccgtcttcctggggctacaccaggactcaccactgttgaaatcgtaacaatgagtcatcaggccctgggggatgtggctggccgggggaacgaaaaaaaaccttccagcgtgcgcgccttatctatcgtgctccctatcgtgttgctggtgtttttgtgcctgggtgtgttccttctctggaaaaattggcgcctgaagaacattaactctatcaattttgataaccctgtctatcagaaaactacagaagatgaagtgcacatctgtcacaatcaggatggctatagttatcctagccgccagatggtgtccctggaagatgacgtagcc

SEQ ID NO: 11456 - DNA, 2580 bp, Artificial Sequence
  derived and/or modified sequence
atggggccatgggggtggaagctccgctggaccgtcgcattgctgctggccgccgccggtaccgccgtgggagatcgctgcgaaagaaacgaatttcaatgtcaagacggaaaatgcatatcctacaaatgggtgtgtgacggatcggctgaatgtcaggatggatcggacgagtcgcaagaaacctgtctgagcgtcacctgtaagtcgggagatttcagctgcggaggaagagtgaaccgctgcattccgcaattttggcgctgtgacgggcaagtggactgcgacaacggttccgacgaacagggatgcccaccaaagacttgttcacaagatgaattcaggtgtcatgacggaaagtgcatttctcgccagttcgtctgcgattcggaccgcgattgcctcgatggatctgacgaggcctcctgcccagtgctgacctgcggccctgctagcttccaatgcaactcctcgacttgcatcccgcagctgtgggcttgcgataatgatcctgactgcgaggacgggtcagatgagtggccgcaaaggtgtcggggactctacgtgtttcagggagattcttcgccgtgctcagcgttcgaattccactgcctgtcgggggaatgcatccacagctcttggagatgcgacggggggcctgattgcaaagacaaatctgatgaggagaactgcgcagtggcaacttgccgccctgacgagttccaatgttcggatggaaactgcatccacggcagccggcagtgtgacagagaatacgactgcaaagacatgtccgatgaggtgggatgtgtgaatgtgaccctgtgcgaggggccgaacaagttcaaatgtcacagcggcgaatgcatcaccctggacaaggtctgtaatatggccagagattgccgcgattggtcggacgaacctatcaaggagtgcggcaccgcggcctgccttgataacaatggaggctgttcgcacgtgtgcaacgcactgaaaatcggagctgaatgcctctgcccggacggattccagctcgtggcgcagagacgctgcgaagatatcgacgagtgtcaagacccagatacttgctcccagctctgcgtgaacctggaggggggatacaagtgtcagtgcgaagaaggtttccaacttgacccccataccaaggcgtgtaaggcggtgggttcgattgcatacctgtttttcactaatagacacgaagtgaggaagatgaccctggatcgcagcgaatacacctcgctgatccccaatctccgaaacgtcgtcgcccttgataccgaggtcgcatcgaaccggatctactggtcggacctgagccagagaatgatatgctcgacccagcttgaccgcgctcatggggtgtcgtcctacgataccgtcatctcacgtgatatccaggcaccggacggactggcagtcgactggatccattcgaacatctactggactgattcagtgctcggaactgtttcagtggctgacactaaaggagtcaagcggaaaactctgttccgcgaaaacggatcgaaaccgcgggcgatcgtggtggacccggtccatggtttcatgtactggaccgactggggcactccagcgaagattaagaaaggtggattgaacggagtggatatctactccttggtgacggagaatatccagtggccgaatggaatcactcttgatctgctgtcaggacggctctactgggtcgattcgaagttgcacagcatctcatccatcgacgtgaatggaggaaaccgcaagactatcctcgaagatgaaaagagattggcccacccgttcagcctggccgtgttcgaggacaaggtgttctggaccgatatcatcaacgaagctatcttctccgctaaccgtctgactggctccgacgtgaacctgctggcggagaacctgctgtcgccagaggatatggtcctcttccacaacctgacccagcctcggggcgtgaactggtgcgagagaaccactctttccaatggtgggtgtcaatacctgtgccttcctgccccgcagatcaatccccattcgcctaagttcacctgcgcctgtccggatggaatgctgttggcgcgggatatgcggtcgtgcctgaccgaagccgaggcggcagtcgccactcaagaaacgtccaccgtgagactgaaagtgtcctcgactgctgtgaggacccagcacaccactaccaggccggtcccagatacttcccggcttccgggagctactccgggactgactaccgtcgagatcgtgaccatgtcgcaccaggcactgggagacgtggcgggacggggcaacgagaagaaaccttcatcagtccgcgcactgtcgatcgtgctgccgattgtgctgctggtctttctttgcctgggagtctttctgctgtggaagaactggcggctcaaaaacatcaactccatcaattttgacaatccggtgtaccaaaagaccaccgaggacgaggttcacatctgccataaccaggacggatactcctatccgtcacggcaaatggtgtcattggaggacgacgtggcc

SEQ ID NO: 11457 - DNA, 2580 bp, Artificial Sequence
  derived and/or modified sequence
atgggtccgtggggttggaaactacgttggacggttgcgttattattagcggcggcgggtacggcggtaggtgatcgatgtgaacgtaatgaatttcaatgtcaagatggtaaatgtatatcgtataaatgggtttgtgatggttcggcggaatgtcaagatggttcggatgaatcgcaagaaacgtgtttatcggtaacgtgtaaatcgggtgatttttcgtgtggtggtcgtgtaaatcgatgtataccgcaattttggcgatgtgatggtcaagtagattgtgataatggttcggatgaacaaggttgtccgccgaaaacgtgttcgcaagatgaatttcgatgtcatgatggtaaatgtatatcgcgtcaatttgtttgtgattcggatcgagattgtttagatggttcggatgaagcgtcgtgtccggtattaacgtgtggtccggcgtcgtttcaatgtaattcgtcgacgtgtataccgcaactatgggcgtgtgataatgatccggattgtgaagatggttcggatgaatggccgcaacgttgtcgtggtctatatgtatttcaaggtgattcgtcgccgtgttcggcgtttgaatttcattgtctatcgggtgaatgtatacattcgtcgtggcgatgtgatggtggtccggattgtaaagataaatcggatgaagaaaattgtgcggttgcgacgtgtcgaccggatgaatttcaatgttcggatggtaattgtatacatggttcgcgtcaatgtgatcgtgaatatgattgtaaagatatgtcggatgaagttggttgtgtaaatgtaacgttatgtgaaggtccgaataaatttaaatgtcattcgggtgaatgtataacgttagataaagtatgtaatatggcgcgagattgtcgagattggtcggatgaaccgataaaagaatgtggtacggcggcgtgtttagataataatggtggttgttcgcatgtttgtaatgcgctaaaaataggtgcggaatgtttatgtccggatggttttcaattagttgcgcaacgacgttgtgaagatatagatgaatgtcaagatccggatacgtgttcgcaactatgtgttaatctagaaggtggttataaatgtcaatgtgaagaaggttttcaactagatccgcatacgaaagcgtgtaaagcggtaggttcgatagcgtatttattttttacgaatcgacatgaagttcgtaaaatgacgttagatcgatcggaatatacgtcgttaataccgaatctacgaaatgttgttgcgctagatacggaagttgcgtcgaatcgtatatattggtcggatctatcgcaacgaatgatatgttcgacgcaattagatcgagcgcatggtgtttcgtcgtatgatacggtaatatcgcgagatatacaagcgccggatggtctagcggttgattggatacattcgaatatatattggacggattcggttctaggtacggtttcggtagcggatacgaaaggtgtaaaacgtaaaacgttatttcgagaaaatggttcgaaaccgcgagcgatagtagtagatccggtacatggttttatgtattggacggattggggtacgccggcgaaaataaaaaaaggtggtttaaatggtgtagatatatattcgttagtaacggaaaatatacaatggccgaatggtataacgctagatttattatcgggtcgtctatattgggttgattcgaaactacattcgatatcgtcgatagatgttaatggtggtaatcgaaaaacgatactagaagatgaaaaacgtctagcgcatccgttttcgttagcggtatttgaagataaagtattttggacggatataataaatgaagcgatattttcggcgaatcgattaacgggttcggatgtaaatttattagcggaaaatctactatcgccggaagatatggtactatttcataatttaacgcaaccgcgtggtgtaaattggtgtgaacgtacgacgttatcgaatggtggttgtcaatatttatgtctaccggcgccgcaaataaatccgcattcgccgaaatttacgtgtgcgtgtccggatggtatgttactagcgcgagatatgcgatcgtgtctaacggaagcggaagcggcggtagcgacgcaagaaacgtcgacggtacgtttaaaagtttcgtcgacggcggttcgtacgcaacatacgacgacgcgaccggtaccggatacgtcgcgactaccgggtgcgacgccgggtctaacgacggtagaaatagtaacgatgtcgcatcaagcgttaggtgatgtagcgggtcgtggtaatgaaaaaaaaccgtcgtcggtacgagcgctatcgatagtactaccgatagttttattagtttttttatgtctaggtgtttttctattatggaaaaattggcgattaaaaaatataaattcgataaattttgataatccggtatatcaaaaaacgacggaagatgaagtacatatatgtcataatcaagatggttattcgtatccgtcgcgtcaaatggtatcgctagaagatgatgttgcg

SEQ ID NO: 11458 - DNA, 2580 bp, Artificial Sequence
  derived and/or modified sequence
atgggaccctggggatggaagctcagatggactgtcgccctgctcctggccgcagccggcaccgctgtcggtgatcggtgcgaacggaacgaattccaatgtcaagacggaaagtgtataagctacaaatgggtctgcgatggttcagccgaatgtcaagatgggtcggacgaatcacaggagacgtgtttgtcagtgacctgtaagagcggagattttagctgtggcgggcgagtgaaccgctgtatcccacaattttggaggtgtgatgggcaagtggattgtgacaacggttccgatgaacaaggttgccccccaaaaacctgctctcaagatgagttcaggtgtcatgatggcaagtgtattagcagacaatttgtctgtgattcagacagggattgcctcgacggtagtgacgaagcatcgtgccctgtgcttacgtgtggtcccgcatcatttcaatgcaactcttctacttgtatccctcaactgtgggcgtgcgacaacgatccagattgtgaggacgggtcggacgagtggccacaaaggtgtcgtgggctttacgtttttcagggggactctagcccctgctcggccttcgaattccactgtctgtcgggcgagtgcatacattcctcctggcggtgtgatggtggacctgactgtaaggataagtccgatgaggaaaattgtgccgtcgcgacttgtaggcctgatgagtttcaatgctcagacggaaactgcattcacgggagcagacagtgtgaccgggaatacgattgcaaggacatgagcgatgaagtgggatgtgtcaacgtgaccctttgcgaaggaccgaacaagtttaagtgtcattcaggagaatgcattacccttgacaaggtgtgtaacatggcgcgggactgcagagactggtccgacgaacctatcaaggagtgtggaacggcggcctgtttggataacaacggaggctgctcacatgtgtgcaacgcattgaaaataggggcagaatgtctgtgtcccgatggtttccaacttgtggcacaaagacgctgtgaagatattgatgaatgtcaggatccagacacctgttcgcaactgtgtgtcaaccttgaggggggttacaaatgtcaatgtgaagaaggatttcagctggatccgcatacgaaggcgtgtaaggcagtcggttcgatagcatacctgttctttactaaccgccacgaagtgcgaaaaatgactctggaccgttcggaatacacttcccttattcccaatcttcggaatgtggtcgcgctggatactgaggtggcatcaaaccgcatttactggtcggatctctcccaaagaatgatttgttccacccagctggaccgggcacatggcgtgtcaagctatgatactgtcatttcaagagacatacaagccccagatggacttgctgtggactggatccattcaaacatttactggactgatagcgtgctcggtaccgtgtccgtggcagacactaagggagtcaagaggaaaaccctctttagggagaacggatccaaaccccgcgctatcgtggttgatccagtccatgggttcatgtactggactgactggggcactcctgcaaagattaagaaaggtggtcttaatggggtggacatttactcgctggtcaccgaaaacatccaatggcctaatggaattaccctcgatttgctttcggggcggctgtactgggtcgattccaaacttcattccattagttctatcgatgttaacggaggcaatcgcaaaactatactggaggacgagaagcgactcgcccatccgtttagcctggcagtctttgaggacaaggttttttggaccgacattatcaacgaagcaatcttctcagcaaatcggcttaccggatccgatgtgaatctcctggcagagaacctgctgtcacctgaagatatggtgttgttccataacctcactcaacctaggggtgtcaattggtgtgaacgcactacgctgtcaaacgggggctgtcaatacctttgcctgcctgcaccacaaatcaatcctcactccccaaagttcacctgcgcctgtcctgacgggatgctcctggcgcgcgatatgaggagctgcctgactgaagcagaagctgcagtggcaactcaggaaaccagcactgtccgtctgaaggtcagctcaaccgctgttcgtacccaacacaccaccactcgaccagttccggacacctcgcgcctccccggagccacccccggcctcaccaccgtggaaattgtgaccatgagccatcaggcattgggagatgtcgcaggaaggggaaatgagaagaagccttccagcgtgagggcgctctcaattgttcttccaatcgtcctgcttgtgtttctgtgtctgggtgtgtttctgctgtggaagaattggcggcttaagaacattaactcaatcaattttgataatccagtgtaccaaaagactactgaagatgaagtgcatatctgccataatcaagatgggtactcctacccttcaagacaaatggtgtcacttgaagatgatgtggcg

SEQ ID NO: 11459 - DNA, 2580 bp, Artificial Sequence
  derived and/or modified sequence
atggggccgtgggggtggaaacttcggtggaccgttgctttattgctggccgctgcaggtaccgccgttggcgaccgctgcgagagaaatgagttccaatgtcaggatgggaaatgtatctcatacaagtgggtctgtgatggaagtgccgaatgtcaggacggttccgacgagagtcaggaaacctgtctgagtgttacttgtaaatccggggatttcagctgtgggggaagggttaacaggtgcattccacagttttggcggtgtgatgggcaagtggactgtgacaatgggagtgatgagcagggctgccccccgaagacctgtagtcaggacgagttccgctgccacgacggtaaatgcatttcaagacaatttgtctgtgattctgaccgcgactgcctggacggatcagacgaggcttcttgtcctgtcttgacgtgtggaccagccagtttccagtgcaatagtagcacttgcatcccacagctttgggcttgtgataacgaccccgactgtgaagacggatctgacgagtggccccagcgctgtaggggactgtacgtgtttcagggcgactcttctccttgctctgccttcgaattccactgtttaagtggagagtgtatccacagctcgtggcgctgcgacggaggcccagattgtaaggacaagtctgacgaagagaactgtgcagttgctacctgtcggcctgacgagtttcaatgctccgacggaaattgtatccatggtagcagacagtgtgatagagagtatgactgcaaggacatgtccgacgaagtgggctgtgtcaacgtgactctgtgcgagggtcctaacaaatttaaatgccatagtggtgagtgcatcactctcgataaggtgtgcaacatggcccgggattgtagagattggtctgatgagcctatcaaggagtgtggcacagccgcatgtctggataataatggaggttgctcccatgtctgtaatgcgttgaagataggagcggagtgcctctgccccgacgggttccagttggtagcccagcgacgctgtgaggacatagatgaatgccaggatccggacacatgcagtcagctttgtgtgaacctcgagggaggatacaagtgccagtgcgaggagggctttcagctggatccacacacgaaagcatgcaaggcggtaggctctattgcctatttattctttacgaaccggcatgaagtgagaaagatgaccctagatcgcagcgagtacacttccctgatccccaacctgcggaacgtggtggctctcgataccgaggtggcgagtaataggatttactggagcgacttgtcccaacggatgatatgcagcactcagctcgacagggcacacggcgtgtcatcctatgacactgtgataagccgggacatacaggcaccagacgggctcgccgtcgactggatccactcaaacatctactggacagactccgtcctggggaccgtttccgtcgcggacactaagggggttaaacgcaagacactgtttagagagaacggctcgaagccaagagcaattgtggtggaccccgtgcatggatttatgtactggactgattggggaacccctgcgaagatcaagaaaggcggtttgaacggggtggacatttacagcttggtgaccgagaatatccagtggccaaacggaataactttggatctcctttcaggaaggctctactgggtggattcaaagcttcactccatcagctctatcgacgtcaatggcgggaaccgtaaaaccatcctcgaggacgaaaaacgactggcccacccattcagccttgccgtgttcgaggataaggtgttctggacagatatcataaatgaagcaatttttagcgctaacagactaactggctcggatgttaacctcctggcggagaatctgttgtctccagaggacatggtgttgttccacaacttgacccagccgagaggggtgaattggtgcgaaagaactaccttgtctaatggagggtgccaatatctgtgcttgccggcacctcagataaatccgcattccccaaagtttacctgcgcctgtcctgatggtatgctcttggcgagggacatgaggtcttgtctgaccgaggccgaggcggcggtagctacacaggaaacctccactgtgaggctaaaggtctcttcaacagccgtcaggacacagcacaccacaacaagacccgtgcccgatacctcgcgtcttcccggagccacgcccggcttgaccacagtggagatagtcactatgagtcatcaggcactcggtgacgtggctggcaggggtaacgaaaagaagcccagctccgtacgcgcactttcaatcgtcctgcctatcgttctcctggtgttcctatgcttgggcgtgttccttctgtggaagaactggcgactgaagaacattaactccattaacttcgacaaccctgtgtatcaaaaaactaccgaggatgaagttcatatctgtcataatcaggatggatattcataccccagcagacaaatggtgtctctggaagatgatgtggcc

SEQ ID NO: 11460 - DNA, 2580 bp, Artificial Sequence
  derived and/or modified sequence
atgggtccctgggggtggaagctgcgatggacggtcgctttgctattggcggccgcgggtacagcagtgggtgataggtgcgagcgcaatgagttccaatgccaggacggcaaatgtatatcatataagtgggtgtgcgatggttcggcggagtgtcaggacggaagcgacgagagtcaggagacgtgcctgtccgtgacctgcaaatccggggacttctcgtgtggtggccgcgtgaataggtgtattccacaattctggcggtgcgacggccaggttgactgtgacaatggaagcgacgagcagggctgtccgccaaagacgtgcagccaggacgagtttaggtgccacgatggaaagtgtatcagtcgtcagtttgtctgtgatagcgaccgggattgcctagacggatcagatgaggcaagttgtccagtgctgacttgcggccccgccagttttcagtgcaattcttcgacttgtatcccacagctttgggcttgcgacaatgatcccgattgcgaggatggatccgatgagtggccgcaacgctgccgaggtctatacgtgtttcagggtgacagttcgccttgtagcgccttcgaatttcattgcctgagcggcgaatgcatccacagtagctggcgctgtgacggtggaccagattgcaaagataagagcgatgaggaaaactgcgctgtggcaacttgtagacccgacgagtttcagtgcagcgatggaaattgcattcacggctcccgccagtgcgatcgtgaatacgactgcaaggatatgagtgatgaagtcggctgtgtgaatgttacgttatgtgaaggtccgaacaagttcaagtgccattcgggagaatgtataaccctggataaggtgtgcaacatggctcgggactgccgcgactggagcgatgaacccattaaggagtgcggaacagcggcttgtctagacaataatggtggttgcagccacgtttgtaacgcgctgaagatcggcgcagagtgtttatgcccagatggattccagctggtggcacagcgcagatgtgaggacatagacgaatgccaggaccccgatacatgctcccaactctgcgtgaacctggagggcggctacaaatgtcagtgcgaagaggggtttcaattggatcctcacacaaaagcttgcaaagccgtgggttcgatcgcctatctcttctttaccaatcgtcacgaggtgagaaagatgaccttggatcgttccgaatatacgagcctgattcccaacctgcgaaatgtggtggccctggatacagaggtggcctcgaaccgcatttactggagtgacttgagtcaacggatgatttgcagcacccagctggaccgcgctcacggcgtgtcgagctacgatactgtcatctcgcgggatatacaggcccccgatggtctagccgtcgattggattcattcgaacatatattggaccgattcagtgctgggaacggtgtcggtcgctgacactaaaggcgtgaagcgcaagacactcttccgggaaaatggcagcaagccccgcgctatcgtggtggatcccgtgcacggctttatgtactggactgattggggcactccagccaagatcaagaagggtggactgaatggtgtggacatctattccctggtgactgaaaatatacagtggccaaacgggataactctggacctgctgtcaggccgactttactgggtggacagtaagttgcactcgatctcatccattgatgtcaacggtggcaaccgcaagactatcctggaggatgaaaaacgtttggcccaccccttttcgctggcagtcttcgaggataaggtgttctggacagatattatcaacgaagccatattctccgccaatcggctaaccggtagcgacgtgaatctgttagccgagaacctgctgtcgccagaggatatggtattatttcacaatctgactcagccccgaggagttaactggtgcgagcgtacgaccttgtccaacgggggctgccagtacctgtgccttccagccccccagataaatccgcattcgcctaaattcacctgcgcttgccccgacggcatgctcctggcacgcgatatgcgctcgtgtctgactgaggcagaagctgcggtagcaacccaggagacaagcactgtgcgcctgaaagtgtctagcaccgcagttcgtacccagcatacaaccacccgtccagtacccgatacgagtcggctgcccggtgcgacccccggattgaccaccgtagaaatcgtgaccatgagccatcaagctctcggagacgtggcggggagaggtaacgagaagaagccatcgagtgtgcgggctctttcaatcgtactgccaatagtgctcctggtgtttctatgtctgggtgtcttcctgctgtggaagaattggcgtctgaaaaatatcaattccatcaattttgacaatcccgtgtatcagaaaacgacggaggacgaggtgcacatctgtcataatcaggacggttactcatatccgtctagacagatggtctctctggaggatgacgtcgcg

SEQ ID NO: 11461 - DNA, 2580 bp, Artificial Sequence
  derived and/or modified sequence
atgggcccctggggctggaaactccgatggaccgtggcccttttgcttgccgctgctgggaccgcagtgggcgataggtgtgaacgcaacgagtttcaatgtcaagacggaaaatgtatcagttataagtgggtctgtgatggcagcgccgagtgtcaggatggaagtgatgaaagccaagagacttgcctgtctgtcacatgcaagtccggcgacttcagttgcggcggacgggttaacaggtgcataccgcagttctggaggtgtgatggacaggttgattgcgacaatggctcagacgagcagggatgccctccaaagacttgttcccaggacgaattcagatgtcacgacggtaaatgtatttcacgccagtttgtatgtgactctgacagggattgcctggacgggtctgacgaggcaagttgcccagtcctcacctgtggcccagcctcgtttcagtgtaactcatcaacttgtatcccacagttgtgggcctgtgacaatgatcccgactgcgaagacggctctgacgagtggccccaacggtgccggggcttatacgtgtttcagggcgatagctctccctgctcagcctttgagtttcactgccttagcggtgaatgtatccacagttcttggcgatgtgatgggggaccagactgtaaagacaaatctgacgaggagaactgcgcggtggcaacatgtcggcccgacgagtttcagtgctccgatggaaactgcattcatgggagccggcagtgcgaccgggagtacgattgcaaagacatgagtgacgaggtggggtgcgtcaacgtgaccctgtgtgaaggaccgaataagtttaagtgtcactccggagagtgtatcacactggataaggtctgtaatatggcaagggactgtagggactggagcgacgagccaatcaaagagtgcgggacagctgcttgtctggataataatggggggtgtagccacgtgtgtaatgctttgaaaatcggagccgagtgcctgtgcccggacggcttccagctcgtagctcagcggagatgcgaggatatcgatgaatgtcaagatcccgatacatgcagtcaactgtgtgtaaatcttgaaggcggctacaaatgccaatgtgaggaagggtttcagctcgacccccacacgaaggcatgtaaggctgttggaagtattgcttatctttttttcaccaacaggcatgaggtgaggaaaatgactcttgaccgaagtgagtacacctcactcatccccaacctgcgaaacgttgttgccctggacactgaagttgcttcgaatcgaatctactggtccgacctcagccagagaatgatatgctcgactcagctggacagggcccatggagtgagtagctacgatacagtaatctccagggacattcaagcccctgacggcctcgccgtcgactggattcatagtaacatctactggactgattctgtgctcggtacagtgtctgtggccgatactaaaggggtcaaacgaaagacactcttccgcgagaacggttccaaacctagggctatagttgtagatccggtgcacggattcatgtattggaccgactgggggacacctgcgaagatcaagaagggagggctgaacggagtggacatctactccctagtcaccgagaacatacagtggcctaatggaatcacgctggatctgttgtccggccggctctactgggtggactccaagctgcactccatatcttccatcgatgtcaatggtggcaacaggaagaccatcctggaagatgagaagcgcctcgcccacccattcagcttggccgtgttcgaggacaaggtgttttggactgacattataaacgaagccatcttctctgctaaccggcttacggggagcgacgtcaatctgctcgcagagaatctgctttcccctgaggacatggtactctttcacaacttaacacaacctcgcggcgtcaactggtgcgagcgaacaactctgagcaacggaggctgccagtatctatgcctgccagccccacagataaacccgcattcccccaagtttacctgcgcttgcccagacgggatgcttctggcaagagatatgagaagttgcctgacagaagcggaggctgccgttgctacccaggagacctccaccgtgcgattgaaggtttcatccacagccgtgaggacgcagcacacaactacacgtcctgtccccgatacaagcaggctccccggcgcaacaccggggttgacaaccgtggaaatcgtgaccatgagccaccaggcactgggggatgttgcaggtagaggaaacgagaagaagccttctagcgttcgtgcgttgtcaattgtgcttccaatagtgctgttggtctttctgtgcctcggggttttcctgctctggaagaattggagattgaagaacattaactctataaatttcgataatcctgtgtatcagaaaacaacagaggacgaggtgcacatttgtcataatcaagacggttattcctatccaagtaggcagatggtaagcctggaggatgatgtggcc

SEQ ID NO: 11462 - DNA, 2580 bp, Artificial Sequence
  derived and/or modified sequence
atgggaccttggggctggaagctcagatggactgtggccctcctgctggctgccgcgggtaccgccgtgggtgatcgctgtgagagaaacgaattccaatgtcaggatgggaaatgtatttcgtacaagtgggtgtgtgacgggagcgcggaatgccaagacggttcagatgagtcccaagaaacttgtctgtccgtgacctgtaagtctggagatttctcctgtggtggtagggtgaaccggtgtattccgcaattctggaggtgtgatggtcaagttgattgtgacaacggatcggacgagcagggatgtccacctaaaacgtgctcccaggatgaattccgctgtcacgatggtaagtgcatttcacggcagtttgtctgtgattcggacagagactgtctggatgggtcagatgaggctagctgcccagtgctcacctgcggtcctgcatcatttcaatgtaattcctccacctgcatcccacaactgtgggcgtgtgataacgatccggactgcgaagatggcagcgatgagtggccgcagagatgtcgtggcctttacgtgtttcaaggtgattcctcgccctgttcggcattcgagtttcactgcctgagcggcgaatgtattcactcatcctggcggtgcgatggaggacctgactgcaaagacaaatcagatgaggaaaattgtgcagtagcgacctgtaggcccgatgagtttcagtgctcggacggtaactgtattcatggttccagacaatgcgatagggaatacgactgcaaagatatgtcagatgaagtgggctgtgttaacgtcactctttgtgaaggaccaaacaagttcaagtgtcattcgggtgagtgtataacccttgataaggtttgtaatatggcccgggattgtcgtgattggtcggatgagcctatcaaagaatgtggcaccgcggcatgtctggataacaacggaggctgcagccatgtgtgtaatgcacttaagattggggcagaatgtttgtgcccagatggtttccagctcgtggcacaacggagatgcgaagatatagacgaatgtcaagatccagatacttgctcgcaactttgtgtcaacctggaaggaggatacaagtgtcagtgtgaggaagggtttcagcttgacccccatactaaggcctgtaaggcagtggggtcgatagcatacctcttctttaccaacaggcacgaggtcaggaagatgacccttgatcgatccgaatacaccagcctgatccctaatctgcggaatgtggtcgcacttgacaccgaagtggcatcgaatagaatttactggtcggaccttagccaacggatgatttgttccacccaactcgaccgggcacacggggtgtcctcgtacgacactgtgatctccagagacatccaagccccagatggactcgcagtggattggattcattctaacatttactggactgattcggtgctgggaactgtgtcggtcgctgataccaagggagtgaagcggaaaactctgtttcgtgaaaacggttccaagccacgagcaattgtggtcgatcccgtgcacggtttcatgtactggaccgattggggaactccggcaaagattaagaaagggggtcttaacggtgtggacatttactctctggtgaccgagaacattcagtggcccaacggtataactctggatctcctgtccggcagactctactgggtggattcgaagctccattcgatttcatccatcgacgtgaacggagggaatagaaagactatactggaagatgaaaagagacttgcacacccatttagccttgcagtgttcgaggacaaggtgttttggactgacataatcaacgaagctatattctcggccaaccgtctgaccggaagcgatgtcaaccttctggccgaaaatcttttgagccctgaggacatggtgctgtttcataacctgacccagcctcgcggagtgaactggtgtgaacgcactactctttccaatggtggttgccagtacctttgcctgcctgctcctcagattaacccccattccccaaagttcacttgtgcatgtcctgacggaatgttgctggcccgtgatatgcgttcatgcctcactgaggcagaggccgcggtggcgactcaggaaacttcgaccgtgcggctgaaggtcagctccaccgcggtcagaactcagcatacgacgactagaccagtgcccgatacctcgcgacttccaggtgcaacccccggtctgaccactgtggaaattgtgactatgtctcatcaagctctgggggacgtggcaggtagaggcaacgaaaagaagccatcgagcgtcagagcactgtcgatagtcttgcctatagtgctccttgtgttcctgtgtcttggcgtgttcctgctgtggaagaactggaggctcaaaaacataaactccatcaattttgacaaccctgtttaccaaaagaccactgaggatgaagtgcacatttgtcacaaccaagatggttactcgtacccttcccggcagatggtgagcctggaagatgacgtggca

SEQ ID NO: 11463 - DNA, 2580 bp, Artificial Sequence
  derived and/or modified sequence
atgggcccttgggggtggaagctgcggtggactgtcgccctgctgctggctgctgccggcactgcggtaggcgaccgttgtgagcgtaacgaatttcagtgtcaggacggcaagtgtattagttataaatgggtctgtgatgggtccgctgaatgccaagatggatcggatgagagccaggagacatgtctgagcgtgacctgtaagtcaggggacttcagctgcggcggccgggtgaaccgttgcataccccagttctggcgctgtgatggccaggtggattgtgataatgggagcgatgaacagggatgtccaccaaaaacgtgctctcaggacgagtttaggtgtcacgacggaaaatgtatctccaggcagttcgtgtgtgattccgatcgtgactgcctggatggttctgacgaggccagctgccctgtgcttacttgtggacccgcctcttttcaatgcaacagttctacttgtattcctcagctgtgggcttgcgacaacgaccccgactgtgaggacggtagtgacgagtggccccagcgctgcaggggtctttatgtttttcagggagacagctccccttgctctgccttcgaatttcactgtctcagtggcgagtgcattcactccagttggcgctgtgacggaggcccggactgtaaagacaaaagtgatgaagagaactgcgccgtggcaacatgccgcccagatgaatttcagtgcagtgatggcaactgtatccatggctctcgccagtgcgacagagagtacgattgtaaggatatgtccgacgaggtcggttgtgtcaacgtgactctatgcgaggggcctaacaaatttaagtgccactctggtgagtgcatcactctagataaagtatgcaacatggcaagagattgccgcgactggagcgatgaacccatcaaggagtgcggcacggccgcttgtctggacaataatgggggatgctcacatgtttgtaacgctttgaagattggggcagaatgtctgtgtcccgatggctttcagctcgtggcccagaggcgctgcgaagatattgacgaatgtcaggacccagacacctgttcacaactgtgcgtcaacctagagggcggatacaaatgccagtgtgaagagggtttccagttggatccccacaccaaggcgtgtaaagcagttgggagcatcgcatacctcttcttcacaaatcggcacgaagtcagaaagatgacgctggaccggagtgaatacacctctctgattccgaaccttaggaatgtcgtggctcttgatacagaggtcgctagcaacaggatttactggtcagatctgtcccaacggatgatttgctccacgcaactcgatcgggcccatggggtgtcctcctatgacactgtgatctccagggacatccaagccccagatggcctcgcagtagactggattcactcgaacatttactggacggattctgtcctgggaaccgtgtcagtagccgatactaagggagtaaaaagaaagactttgttcagagagaacggaagcaagccgcgcgcaattgtggtggacccagtgcacggattcatgtactggactgactgggggacacccgctaagatcaaaaaggggggactcaacggggtagatatttatagccttgtgactgaaaacattcagtggcccaacggaatcacccttgatttgctttcaggcaggctgtactgggtggacagcaaactccacagcatctcctccatcgacgtgaacgggggaaatagaaaaactattttggaggacgagaaacgtctggcccatcctttttctctggccgtgtttgaggataaggtgttctggactgacataataaacgaagctatcttttccgcgaatcggctcaccggatcagatgtgaacctattggccgagaacctcctgtcccctgaggacatggtcctattccataaccttacacagcctaggggagttaactggtgtgagcggacgactctctccaatgggggttgtcagtacctgtgtctgcctgctccccagatcaatccccactctcctaagtttacctgtgcgtgtccagatggcatgctgttggcgagggacatgcggtcatgtctcacggaggctgaggctgccgtggcaactcaggaaactagcacggtccgcctaaaggtgtcctctactgcagtgagaacacaacacactactactcgccctgtgcccgacacttctagacttccaggtgctacccctggacttacaacggtggagatcgtgaccatgtcccatcaggctctaggggacgtggcaggcagggggaacgaaaaaaagcctagttctgtccgcgcattgtccatagtgctgccaattgttctcctggtgtttctgtgcctcggggttttcctcctatggaagaactggagattaaagaatattaacagtatcaactttgataatccagtgtaccagaagactacagaagatgaggttcacatctgccataaccaagacggctacagctatccctcccgccagatggtcagcctggaagacgatgttgca

SEQ ID NO: 11464 - DNA, 2580 bp, Artificial Sequence
  derived and/or modified sequence
atgggaccatgggggtggaagctccgctggaccgtggcgttgctccttgcagccgccgggactgctgtgggagatcggtgcgaaaggaacgagttccagtgccaggacggcaaatgcatcagttacaagtgggtctgtgatggatcggcagagtgtcaagacggaagcgatgaatcgcaagaaacctgtctgtcggtgacctgtaagtctggggatttctcgtgcgggggcagagtgaaccgctgcattccacagttttggagatgcgatggacaggtcgattgtgacaatgggtctgatgaacaaggatgtcctcctaagacgtgcagccaagatgaattccgctgccatgacggtaaatgtataagccgacaatttgtgtgtgactcggatcgggattgcctggatggaagcgacgaagcgtcatgccccgtgctcacgtgcggtccagcatcgtttcagtgcaactcgtccacctgtatcccccagttgtgggcgtgtgataatgatccagactgtgaggacggatcagatgaatggcctcagaggtgccgaggactctacgttttccaaggggattcatcgccatgttccgcatttgaattccactgtcttagcggagaatgtattcactcaagctggcgttgcgatggtggccctgattgtaaggataagagcgatgaagaaaactgtgccgtggcaacttgtagacccgatgaatttcagtgctcggatggcaactgtattcatgggtcaaggcagtgtgacagagaatacgattgtaaggacatgtccgacgaggtcggatgtgtgaatgtgaccctgtgtgagggacccaataagttcaagtgtcattccggagagtgtattactcttgataaggtttgtaatatggctagagattgtagagattggagcgacgaaccaattaaggaatgtggtactgcggcatgtctggacaacaacggcggctgctcacatgtgtgtaatgctctcaagatcggcgcagaatgtttgtgtcctgatggatttcaactcgtcgcacaacggagatgcgaggatatcgatgaatgccaagatcccgatacttgtagccaactttgtgtgaacctggaaggtggatacaagtgtcagtgtgaagagggattccaactggatcctcacaccaaagcctgcaaggcggtgggatccatcgcctacttgttctttaccaacagacacgaagtgcgaaagatgacccttgacagatcggagtacacgtcgcttatacctaatctgcgaaacgtggtggcgctggataccgaggtggcgtccaaccgaatctactggagcgatctttcgcaacgcatgatatgctcgacgcaattggaccgagcacatggtgtgtcgtcctacgacactgtgatctcgcgggatattcaagctccggatggcctggcagtggattggattcactcgaacatttactggactgactcagtgcttggcaccgtgtcagtggcagatactaaaggggtgaagagaaagactctctttcgagaaaatggcagcaagccgcgagcaattgtcgtggatccagtccacggctttatgtactggactgattggggaactccagccaagatcaagaaaggcggacttaacggcgtggatatctactcccttgtcacggagaacattcagtggcctaatggaattaccctggatctcctgtccggtagactgtactgggtcgactcaaagctccattcaatatccagcattgatgtcaacggaggaaaccgtaagactatacttgaggacgaaaaaaggcttgctcaccctttttcccttgcggtgtttgaagataaggtgttttggaccgacattatcaacgaggcaattttctctgcaaataggttgaccggctcagacgtcaaccttctcgccgaaaatcttctttctcctgaagatatggtcctgttccacaaccttactcagcccagaggcgtgaactggtgcgagcggactactctgagtaatggaggttgtcagtacctgtgccttcctgcaccacaaatcaatccacattctcccaaattcacgtgtgcctgccccgatggtatgcttctcgcacgagacatgcggagctgcctcactgaagccgaggctgcagtggccacccaggaaacctcgaccgtccgtctgaaagtcagctcgaccgccgtccgcacccaacataccaccacgcgacctgtgcccgatacctccagactgccgggagcaactcctgggcttaccaccgtcgaaatagttaccatgtcacaccaggcgcttggagacgtcgccggcagagggaatgagaagaagccatcctcagtgcgagcgctcagcatcgtgttgccaatcgtgcttctcgttttcctctgccttggcgtgtttctgctgtggaaaaactggcgtctcaagaacatcaactccatcaacttcgataaccctgtgtaccaaaaaaccactgaggacgaagtccatatttgccacaatcaggatgggtactcctacccatcgcgccaaatggttagcttggaggacgatgtggca

SEQ ID NO: 11465 - DNA, 2580 bp, Artificial Sequence
  derived and/or modified sequence
atgggaccatggggatggaagttgaggtggaccgtggcactcttgcttgcggctgccggcactgccgtcggcgataggtgtgaaaggaacgaattccagtgccaagacggaaagtgcatctcctacaagtgggtttgtgatgggtcagcggagtgtcaggatggcagtgacgagtcacaggaaacctgtctgtctgtgacctgtaagagtggggactttagctgtggcggcagagtaaacaggtgtatcccccagttttggcgctgcgacggacaggtggactgtgacaacggctcagacgagcaggggtgcccgcctaagacatgttcacaagatgaattcagatgtcatgacggaaagtgcattagtagacaattcgtgtgtgatagtgatcgcgattgccttgatggcagcgatgaagctagctgtccagtgctaacctgcggtcctgctagttttcagtgcaactcctccacatgcatacctcagctttgggcgtgtgataacgaccctgactgtgaagatggatctgatgagtggcctcagagatgcagggggctgtatgtgttccaaggagacagttctccctgctctgcatttgagttccattgtctatctggggaatgcatccactcgtcttggcgctgtgatggaggtccagattgtaaggacaagtccgacgaggagaattgcgcggtggcgacttgcaggccggacgagtttcaatgttccgacggaaactgtattcatggctcacgacagtgcgatagagaatatgattgcaaagacatgagtgacgaagtgggctgcgtgaatgtgaccttgtgtgagggtcccaataagttcaagtgccactcaggagagtgcatcaccttagataaggtctgtaacatggcccgagactgtcgagactggtctgatgaacccatcaaagagtgcggcaccgctgcctgcctagacaacaatggcggctgcagccatgtctgcaatgctttgaaaatcggggccgaatgcttatgtcctgatgggtttcagctggtcgcccagagaaggtgtgaagacatcgatgagtgccaggatcctgatacctgttcccagctgtgtgtcaacctggagggaggatataaatgccagtgcgaggagggattccagctcgaccctcataccaaagcctgcaaggcagtgggctctatcgcctacttgtttttcaccaatagacacgaagtgcgcaagatgacgctggacagatcggagtatacatcccttatccccaatttaagaaatgtggtggccctcgacactgaagtggcaagtaaccgaatttactggtcagatctgagtcagaggatgatctgtagtacccaattggatagggcacatggcgtgagctcttatgatacagttatcagcagagatatccaggcaccagacggattggccgtagactggattcactccaatatctattggacagacagtgtactcgggacagtgtctgtagcagacaccaagggtgttaagaggaagacgctcttcagagaaaacggatctaagcctagggcaatagtagttgaccctgtgcacggcttcatgtattggacggactggggaaccccggccaagatcaagaagggcggattaaatggagtggatatctactccttagtgactgaaaatatccaatggccgaatgggataacgctggatctcctgtctggaagactgtattgggtggatagcaagttgcactctattagcagcattgatgttaacggcggaaatcgaaagactattttagaggatgaaaagagactggctcaccctttttccctcgctgtgtttgaggataaggtgttttggaccgacattataaacgaggcaatcttttccgctaatagactgacgggcagtgacgtcaacctgcttgccgagaacctcctgtcgccggaggacatggttctcttccacaacctgacccaaccaagaggagtaaattggtgtgagaggactacactcagcaatggggggtgtcagtacctctgcctgccagcacctcagataaatcctcattccccaaaatttacatgtgcatgtccagatgggatgcttctggcaagagatatgaggagctgtctgaccgaggctgaggctgccgtggctacccaagagacaagcactgtgcgactcaaggttagcagtaccgcagtgcgaacccagcatactacaactcggcccgtgcctgacaccagtagattgccgggggcgactccaggcctgaccaccgtggaaattgtgacaatgtctcaccaggccttgggtgacgttgcggggcggggtaatgagaagaaaccttccagcgtgagagccttgagcatcgttttaccaatcgtgctgctggtctttctctgtctgggcgtattccttctgtggaaaaattggaggttgaagaatatcaactcaataaattttgataaccctgtgtatcaaaagaccaccgaggacgaggtccacatatgtcacaaccaggacggttactcgtatccaagcagacagatggtgtccctcgaggacgacgtcgcc

SEQ ID NO: 11466 - DNA, 2580 bp, Artificial Sequence
  derived and/or modified sequence
atgggtccgtggggttggaaacttcgctggactgtggcgcttttattagctgcggccggcaccgcggtcggggacagatgcgaaaggaatgaatttcagtgtcaagatggcaagtgtatttcatacaaatgggtgtgtgatggctcagcagagtgtcaagacggctcggatgaatctcaagagacttgcctgtcagttacctgcaaaagcggtgacttttcttgcggcggcagagtcaaccggtgtatcccgcaattttggcgttgcgatgggcaagtcgattgcgacaatggaagtgatgaacaggggtgtccgcctaaaacttgttcacaagatgagttcagatgtcatgatggaaaatgcatttctaggcaatttgtgtgcgactcagatagagattgcctagacggatctgatgaggcgtcctgtccggtgttgacatgcggtccggccagctttcaatgcaactcaagcacgtgtataccgcagctttgggcctgcgataatgaccctgattgtgaagacgggtcagatgagtggccgcagagatgtcggggcctttatgtgtttcaaggcgactcatccccttgttcagcttttgaattccactgtctcagcggggaatgtatacattctagctggagatgcgacggcgggccggattgcaaagataaatccgacgaagaaaattgtgcagtagcgacatgtcgtccggacgaatttcagtgctccgacggaaactgcattcatggatcacgtcaatgtgatagagaatacgattgcaaagatatgagtgatgaagtcggctgtgttaatgtgacgttgtgcgaaggacctaataaatttaaatgccatagcggagagtgcatcacattggataaggtatgcaacatggcgagagattgccgcgactggtcagatgaaccaatcaaggaatgcggcactgcggcgtgcttagataataacggggggtgttctcacgtgtgtaacgctttaaaaatcggggctgaatgtttatgccccgatggctttcaactggttgctcaaagaagatgtgaagacattgatgaatgtcaggacccggatacctgttcgcaactttgtgtgaatcttgagggaggatataagtgccaatgtgaagaagggtttcagctggatccgcatacaaaagcgtgtaaagcagtgggcagcattgcttatttattcttcacaaacagacatgaggtcagaaaaatgacactggaccgttctgaatacacaagccttatcccgaatcttcgcaatgtggtggcgcttgacactgaggttgcatcaaaccgcatttattggtcagatttatctcagcgtatgatttgttccacacagcttgatcgagcacatggagtgtccagctatgatactgttatcagtcgagatattcaggcgccggacggtttagccgttgattggatccatagcaacatctattggacagattcagtattgggcacggtgtcagttgctgatacaaagggggtgaagcgtaagacattattccgggaaaacggctcaaagccaagggctatcgttgttgatccggttcatgggtttatgtactggacggattgggggacgcccgcaaaaataaaaaagggagggttaaacggtgtcgatatttattcattagtgacagagaacattcaatggcctaacggaatcacgctcgatttacttagtggcagattgtactgggttgatagcaaacttcactcaattagcagtattgacgtcaacgggggtaacaggaaaacaatactggaagacgagaagcgcttagcccatccattcagtttagctgtctttgaagacaaagtgttctggactgatattattaacgaagccattttctcagcgaatcgccttacgggatcagatgttaatctgctggcagaaaatcttctcagtccggaagatatggttctgtttcataacctgacacaacctcgcggcgtcaattggtgcgaacgaactacactgtcaaacggaggatgtcagtatctttgtcttcctgcgccgcaaatcaaccctcattctcctaaatttacatgtgcgtgcccagatggaatgcttcttgcgcgtgatatgagaagctgtttaactgaggcggaagcggctgtcgctacgcaggaaacaagtacggtaaggttgaaggtttcatccactgctgttagaacgcagcatactaccacaagacctgtaccggatacctcccgcctgcccggagctacgccaggtttaactactgtggaaattgtcaccatgtcccatcaggctttaggagacgtcgccggacgcggcaatgaaaaaaaaccgtcttctgtcagggccttgtcaattgttctgcctatcgtgttgttagtttttctttgtctcggagtctttctgctgtggaaaaattggcgccttaaaaacattaattctataaattttgataatccggtgtatcaaaaaacgacggaagatgaagtccatatttgccacaatcaggacggatactcttatccgtctagacaaatggtgtccctggaagacgatgtagct

SEQ ID NO: 11467 - DNA, 2580 bp, Artificial Sequence
  derived and/or modified sequence
atgggaccatggggttggaagctgcggtggactgtcgcccttctcttggcagctgctggtactgcagtgggggatagatgtgagagaaacgaatttcagtgccaagacggcaaatgtatatcctacaaatgggtgtgcgacggctctgcggaatgccaggatggttcggatgaatcgcaagaaacttgtctctcggtgacgtgtaaaagcggggacttttcctgtggcggacgggtgaatagatgcataccccaattctggcgctgcgatggtcaggtcgactgcgataacggatcagacgaacaggggtgtcctcctaagacttgctcccaagacgaattccgctgtcacgatggaaaatgcatttcgaggcagtttgtgtgcgactccgaccgggactgcctcgacggctccgatgaggcatcctgtcctgtccttacctgcggacctgcatcgtttcaatgcaactcgtccacctgtatcccgcaactgtgggcatgtgacaacgatcccgattgtgaagatggatccgatgaatggcctcagagatgtcggggtctttacgtgtttcagggagacagttcgccatgctccgcattcgaatttcactgtctctccggagaatgtatacactcttcctggcgatgcgatggtggtccagattgcaaggacaagtcagatgaagagaactgtgcagtggccacttgtcgacctgacgagtttcagtgttcggatggtaactgcattcacggcagccgacaatgcgatcgtgaatacgactgtaaagacatgtctgacgaagtgggttgtgtgaatgttacgctgtgtgaaggcccgaataagtttaagtgtcattcaggagaatgtatcacgcttgataaggtgtgtaatatggctcgggactgccgagattggtcggatgaacccattaaggagtgtggtactgcggcatgtctcgacaataacggaggatgttcacatgtctgtaacgcgctcaaaattggagcagaatgtttgtgtcccgatggatttcagctggtggcccaacgccggtgcgaagatatcgacgagtgtcaggatccggacacctgttcacaactgtgtgtcaaccttgaaggaggctacaagtgccaatgtgaggaaggattccaacttgacccgcacacgaaggcatgtaaggcagtgggctcgatagcatacctgttctttactaatagacacgaagtgagaaagatgactctggatcgttcagaatacacctcgcttattcccaatctgaggaacgtcgtggctttggataccgaagtggccagcaatcgaatttactggagcgatctttcgcaaaggatgatttgttccacgcagcttgacagggcacatggtgtgtcatcgtacgataccgtaatctcccgcgatattcaagcacctgatggactcgccgtcgattggatccatagtaacatttactggacggacagcgtgcttggtacggtgtcagtggccgataccaaaggggtgaagagaaagaccctttttagagagaacggatccaagccccgggccatagtcgtggatcccgtgcatggttttatgtactggaccgattggggtactcccgccaagattaagaaggggggcctgaacggtgtggacatttactcccttgtcaccgagaacattcaatggccaaacggcatcactctcgacttgctgtcaggaaggctttactgggttgactcgaaacttcattccattagctcaatcgatgtgaacgggggaaataggaaaaccatcttggaagatgaaaagcgtctggcgcatcctttttcgcttgcagtgtttgaggataaggtgttttggacggatatcattaatgaagccatcttttcagcaaacagactcactggttccgatgtcaatcttctggcagaaaacttgctttcgcctgaagatatggtgctcttccacaacctgactcaaccacggggcgtgaactggtgtgaaagaactactctcagcaacggaggttgtcagtatctgtgtctgccagcaccccaaatcaacccccactcgcctaaattcacttgtgcctgtccggatgggatgctgctggcccgagatatgagatcatgcctgactgaggcagaagccgcggtggcgactcaagagacttccactgtcagacttaaggtcagctccactgctgtcagaacccagcataccactactagaccggtcccggacacctccagacttcccggagcaacccctggtcttactactgtcgagatcgtcactatgtcccatcaggcacttggcgacgtggcaggtcgagggaacgaaaagaagccgtccagcgtgcgagcactctctattgtgctgcctattgtgcttctcgtgtttctgtgtctgggagtgtttcttctttggaagaactggagattgaagaacatcaattcgatcaattttgacaaccctgtgtaccagaaaaccaccgaggatgaagtacatatctgccataaccaagacggctactcgtatccttcgcgacaaatggtgtcgctggaagatgatgtggct

SEQ ID NO: 11468 - DNA, 2580 bp, Artificial Sequence
  derived and/or modified sequence
atgggaccttggggttggaagttacgctggactgtggccctgttactggcagcagcgggaactgctgtcggcgacagatgcgagcggaatgaatttcagtgccaagatggcaagtgtatttcgtacaaatgggtctgtgacggttctgctgagtgtcaagacgggtctgacgaatctcaggaaacatgcctctctgtcacgtgtaagtccggagatttcagctgcggcgggagggtgaacaggtgcatcccacaattttggaggtgtgacgggcaagttgattgtgacaacggctctgacgaacagggttgcccgccgaaaacctgttcacaggacgaattccgatgtcatgacgggaaatgcatctctcgacaattcgtttgcgacagtgaccgggattgcttggatggctcagacgaggcctcctgtcccgtactaacctgtggacctgcttcttttcagtgtaactcatcaacctgcataccacagttgtgggcctgtgataacgatccggactgtgaggatggctctgatgagtggcctcaaagatgtagagggctgtatgtcttccagggggactcctctccctgttcagcattcgagtttcactgtctgagcggggagtgtattcatagtagctggcggtgtgatggtggacccgattgcaaagataagtctgacgaagaaaattgtgccgtagccacttgtagaccggacgaattccagtgttcggacggaaactgcattcacggcagtaggcagtgcgacagagagtatgactgtaaggatatgtctgacgaggtgggatgcgtgaacgttactctgtgcgaaggcccaaacaaatttaagtgtcattcaggagagtgcattactctggacaaagtgtgcaacatggctcgagactgccgggattggagcgatgagccaatcaaagaatgcggaacagccgcttgcctcgacaacaatggcggatgttcgcacgtgtgcaacgcgcttaagatcggggccgagtgcttgtgccctgatgggtttcagctcgtggctcaaagacgatgtgaggatattgatgaatgccaggatccagacacctgcagccagctgtgcgtcaacctggaagggggctataagtgccagtgtgaggaagggttccagctcgacccgcacactaaagcttgcaaggcagtcggcagcatcgcatacctgttttttacaaatcggcacgaagtgagaaaaatgacgctcgacagatctgaatatactagtcttatcccaaatctcagaaacgtggttgccctggacacagaggtcgcttctaaccgaatctactggagcgacctgtcccagcgtatgatttgttcgacccagctcgacagagctcacggagtgagttcatatgataccgtgataagcagggatatccaggcccctgacggactggctgtggattggatccactccaacatatattggactgatagtgtgctgggaacagtctcagtcgccgataccaagggcgtgaagcgtaagacgctcttcagagagaatggttcaaagcccagagcgatcgtggtagatcccgttcatggtttcatgtattggacagattggggtacccccgcaaaaattaaaaagggggggctgaatggcgtcgacatctattccttggttactgagaatatccagtggccaaatggtattacgttggatctgctgtcaggtcgcctctattgggttgacagtaaactacattctatcagcagcattgacgtcaacgggggcaaccgaaaaacgattctcgaggatgagaaacggctggctcatcctttttccttggccgtgttcgaggacaaggtcttttggaccgacatcatcaacgaagccattttctcggccaataggttgacgggctctgatgtgaaccttctggccgagaatttgctctctcccgaagacatggtgttgttccacaatcttacccagcctcgcggagttaattggtgcgagaggactaccctgtcaaatggtggatgtcagtacctctgcctccctgcaccccagatcaacccccactcgcctaagtttacttgtgcctgccccgacggaatgctcctggcacgggatatgcgaagttgcttaaccgaggcggaagccgccgtggctacacaagagacatccacagtgagactaaaggtgtccagcaccgccgtaaggacccagcatacgacaactcgccccgtgcctgataccagccggctgcccggcgccacacccggcttgacgaccgtggagatcgtcaccatgagccaccaggcactgggcgatgtggcaggcagagggaatgaaaaaaagccttccagcgtgcgggccctgagtatcgtgctgcctattgtcctactggttttcctgtgtttgggagtcttcctcttgtggaaaaactggaggctgaagaacattaattccattaactttgacaatccagtgtatcagaaaaccacagaagacgaagtgcatatttgtcacaatcaggacggttactcttacccctcccgccagatggtgtctttggaagacgatgtggct

SEQ ID NO: 11469 - DNA, 2580 bp, Artificial Sequence
  derived and/or modified sequence
atgggtccttggggatggaagctgagatggacagttgcactgcttctggctgcagccggtacagctgttggcgataggtgtgaacgtaacgaattccagtgccaagatggtaagtgtatatcttataaatgggtgtgtgacggaagcgctgagtgccaggatggttccgatgaatcacaagaaacatgtctgtctgttacatgcaagagtggcgacttttcctgtggtggcagagtcaacaggtgcataccccagttctggaggtgcgatggccaggtggattgcgacaacggtagcgacgaacagggttgccctcctaagacatgctctcaggatgagttcaggtgtcatgatggtaagtgcatcagtaggcagttcgtgtgcgacagcgaccgcgactgcttggacggatctgatgaagcttcctgcccagtcctgacatgtggacctgcatcttttcaatgcaactctagtacttgtattcctcagttgtgggcttgtgacaacgaccctgattgcgaggacggatcagacgagtggcctcagagatgcaggggcctctatgtttttcagggagattcttctccctgttccgcctttgagtttcattgtctttctggagagtgtattcatagcagctggagatgtgacggcggtccagactgcaaggacaagtccgacgaagagaactgtgcagttgccacttgccgtcccgacgaattccagtgctccgacggcaactgtatccatggttccaggcaatgcgacagggagtacgactgtaaggatatgtccgacgaggtaggctgtgttaacgtgactctttgtgagggaccaaacaaattcaagtgccacagcggtgagtgtattacactcgacaaggtctgcaacatggcccgtgactgtagggattggagcgacgagcctattaaggagtgtggaaccgcagcttgtctggataacaatggaggttgctctcacgtgtgtaacgccttgaagatcggtgccgagtgcctgtgccccgatggtttccagttggttgctcaaaggagatgcgaggacatcgacgagtgtcaggacccagacacctgctcacaactgtgtgtcaaccttgaaggcggctacaaatgccaatgtgaggagggttttcaactggaccctcacactaaggcttgcaaggccgtcggatccatagcctacctgttttttacaaaccgtcatgaggttaggaagatgactttggatcgctccgaatatacttccctgattcctaatttgcgcaatgtagttgctttggatacagaagtggcttctaaccgtatttattggagcgatctctctcaaaggatgatttgttcaacccagctcgacagggcccacggtgtctctagctacgacaccgtaatatccagggacatccaagccccagacggactcgccgttgactggatccactcaaatatctattggactgactcagtacttggaaccgtctccgtcgctgacacaaagggtgtaaagaggaagactcttttcagggagaatggtagcaaaccaagagcaattgttgttgatccagttcatggtttcatgtactggacagactggggaacccccgctaagattaagaagggtggactgaacggcgtggatatctattcactggtgaccgaaaacatccaatggcccaatggaataaccctcgatctcttgtctggaagactgtattgggtggattctaaactccacagtatttcaagcattgacgtaaatggaggaaataggaagaccattctggaggacgagaagaggttggctcatccattctcactcgccgtctttgaagacaaggtgttctggaccgacatcatcaatgaggccatcttctcagcaaacagactgactggatctgatgtcaacctgttggcagaaaatttgctttctcccgaggatatggtcctgtttcacaatcttactcagccacgtggagtgaactggtgcgaacgtacaactctgagtaatggaggatgccagtacctgtgtctgcctgccccacagattaacccccattcccctaagtttacctgcgcttgtcctgatggtatgctgctggctcgcgatatgcgttcctgcctgaccgaggccgaggccgctgtggcaactcaggaaacctctacagtcagattgaaagtcagttcaaccgccgtaagaacccagcatactactacacgccccgtgcccgacacatctcgcctgcccggtgctacaccaggactcacaactgttgaaatcgtaacaatgagtcaccaagcccttggtgatgttgcaggcagaggcaatgagaagaagccatcctctgtcagagcattgtctattgtcttgccaattgtgctcctggtgtttctttgcctgggagtgtttctcctctggaagaactggagactgaagaacattaactctatcaacttcgacaaccctgtttaccagaaaacaaccgaggacgaagtccacatatgtcacaaccaggatggctatagctacccttcccgccagatggtctctctcgaagacgatgtagcc

SEQ ID NO: 11470 - DNA, 2580 bp, Artificial Sequence
  derived and/or modified sequence
atgggaccttggggatggaaacttcgctggactgtcgccctgctgctggcagctgccggcaccgccgtcggagatcgctgcgagcggaacgagttccaatgccaggatgggaaatgcatcagctacaagtgggtgtgcgacggatcggcagagtgccaggacggttctgacgaaagccaagaaacctgtctgtcggtgacctgcaaatcgggggacttttcctgcggcggacgcgtgaatcggtgtattccacagttttggcgctgcgatggacaggttgattgcgataacggttcagacgaacagggatgccctcccaagacttgcagccaggacgaattcagatgccacgacggaaaatgcatctcacgccagttcgtgtgtgactccgaccgggactgcttggacggatcagacgaagcctcatgtccggtgctgacttgcggaccggccagctttcagtgtaatagctcaacctgtatcccacagctctgggcctgcgacaacgacccggactgcgaggacggatcggacgagtggccgcagcgctgcagaggactctacgtgttccaaggagattcctccccctgctccgcgtttgaattccattgtctctcgggtgaatgtatccacagtagctggaggtgcgacggaggtccagactgcaaggacaaatcagatgaggagaactgcgcagtggcgacctgtcggccagacgaattccagtgtagtgacggcaactgcatccatggctcgcgtcaatgcgacagagaatacgactgcaaggatatgtcggatgaggtcggatgcgtgaatgtcaccttgtgcgaaggccctaacaaattcaagtgccattcaggcgagtgcatcactctggacaaggtctgtaacatggcacgggactgccgggactggtcagatgaaccaatcaaggaatgcggaactgccgcttgtctggataacaatggtggttgttcccacgtgtgtaacgccttgaaaataggtgcggagtgcctgtgcccggacggtttccaattggtggcccaacgccggtgcgaagatatcgacgagtgtcaggatccggatacctgctcgcagttgtgcgtgaatctggaaggcgggtacaagtgccaatgcgaagaaggattccagctggacccgcacaccaaagcctgcaaagccgtggggtccatcgcctacctgttcttcaccaatcggcacgaggtgcgcaaaatgactttggacaggtcggaatacacttcattgatccccaatctccggaatgtggtggcacttgacactgaagtcgctagcaatcggatttactggtcagacctgtcgcagcggatgatctgctcgactcagcttgaccgcgcacatggggttagctcctacgacaccgtgatcagccgggatattcaggcccccgacggtctggccgtggactggatccactctaacatctactggacggacagcgtgctcggtactgtgagcgtcgctgacaccaagggagtgaagcgcaagaccctgtttcgcgaaaacggatccaagccgcgggcaatcgtggtggaccctgtgcacggattcatgtactggaccgattggggaaccccagccaagatcaaaaagggcggcctgaacggcgtggacatatactccctggtgaccgagaacatccaatggcccaacggaatcactttggacctgctcagcggacgcctctactgggtcgactcaaaactccactcgatttcatccattgatgttaatggtggaaacaggaaaactatcctcgaagatgagaagcggctggcccacccgttctcgctcgctgtgttcgaggacaaggtattttggaccgacatcattaacgaagcgattttctccgccaaccggctgaccggaagcgatgtgaaccttctggcggaaaacctgctcagcccggaagatatggtgctcttccataacttgactcagccgaggggggtgaactggtgtgaaagaaccactttgtccaacggaggctgccagtatctgtgcctgccggccccccagatcaacccgcactccccgaagttcacgtgcgcctgccctgatggcatgctcctcgcccgcgacatgcgctcgtgtcttactgaggccgaagccgccgtggcgacccaggagactagcactgtgaggctgaaagtgtccagcactgcggtccggactcaacataccaccacccgccctgtccccgataccagccgcctgcccggagccacgcccggactgaccactgttgagatcgtcactatgtcgcaccaggctctcggagacgtggcgggacgcggcaacgaaaagaagcctagctccgtgcgcgctctgagcattgtgctgccaattgtgctgctggttttcctgtgccttggagtctttctgctctggaagaattggcggctgaagaacatcaattcgatcaatttcgacaaccccgtgtaccagaaaaccacggaagatgaggtccatatctgtcataatcaggacggctactcctacccgtcccggcagatggtcagcctggaagatgatgtcgcc

SEQ ID NO: 11471 - DNA, 2580 bp, Artificial Sequence
  derived and/or modified sequence
atgggtccttggggttggaagctccggtggactgtggcactgctgctcgccgccgcgggcactgccgtgggtgacaggtgtgaacgcaacgagttccaatgtcaggatggtaaatgcatttcctacaagtgggtctgcgatgggagcgctgagtgtcaagacggatccgacgagtctcaagagacttgtctttctgtgacttgtaagtccggtgatttttcgtgtggcggccgtgtgaatcgctgtatccctcaattctggcgatgtgacggacaggtcgactgtgataatggatcggatgaacaaggatgcccccctaagacctgttcgcaggacgagtttcgatgccatgatggtaagtgcatctcccgccagtttgtgtgtgacagcgaccgggattgtcttgacggttccgatgaggcatcctgcccagtgctcacctgcggccctgcctcgtttcagtgtaactcaagcacctgtatcccacagctctgggcatgcgataacgaccccgattgtgaggacggaagcgatgagtggccgcagaggtgtagaggtctttacgtgttccaaggagattccagcccgtgttcggcatttgaattccactgtctctcgggggaatgtattcattcgtcctggaggtgcgatggcggtcctgattgcaaagataagtcagatgaagagaactgcgcagtggcaacttgtcggccagatgaattccaatgttccgatggaaattgtatccatggctcccggcagtgtgaccgtgaatacgattgtaaggatatgtccgacgaagttggatgcgtcaacgtgactctttgtgaaggtccgaacaagtttaagtgtcatagcggggagtgcattaccctcgataaggtctgtaatatggcacgcgattgtagagattggtcggatgaacctattaaggagtgcggaaccgctgcttgcctcgataacaatggtggttgtagccatgtctgcaacgcccttaagatcggagccgaatgcctgtgcccagacggattccagctggtggcccagcggcgctgcgaagatatcgatgaatgtcaagatccagatacttgttcgcagctgtgtgtcaaccttgagggagggtacaagtgtcagtgtgaggaaggctttcaactggatccgcacaccaaagcctgcaaagccgtgggctcaatagcatacctgtttttcactaaccgccacgaggtgcggaaaatgaccctggatcggagcgagtacacttcgctgatccctaacctgcggaatgtcgtcgcccttgatactgaggtcgcaagcaacaggatttactggtctgatctctctcagcgtatgatatgttccactcaactcgatcgagcacatggagtgtcctcctacgatactgtcataagccgcgatatccaagcacccgatgggctggcagtagactggatccattcgaacatatactggaccgacagcgtgcttgggaccgtctcagttgccgatactaagggcgtcaagcggaaaactctttttagagaaaatggctcaaagccacgcgcaatcgtggtggatcctgtgcatgggttcatgtactggacggactggggcactccagctaagattaagaaaggcgggctcaacggagttgacatctatagccttgtcactgaaaacattcagtggccaaacgggattacgctcgacctgctcagcggtcggctgtactgggtggatagcaaactccactcgatttcctcgattgatgtgaacggtggcaaccgcaagacgattctggaggacgaaaagcggctggcccaccctttttccctcgcagtgtttgaggacaaggtgttctggaccgatatcataaacgaagcgatattctcggcgaacagattgactggctccgacgtgaatctcttggccgagaatctcctttcaccagaggacatggtgctgtttcataaccttacccaaccaaggggagtgaattggtgtgaacgaactactctttccaacggtggttgccagtatttgtgccttccagcccctcagataaatcctcattcgccaaagtttacttgcgcatgccctgacggaatgctgctggcaagagatatgcggagctgtcttaccgaagccgaagctgcagtggcaacccaagaaacctcaaccgtgcgcctgaaagtctcaagcaccgcggtcaggacgcaacataccaccactcgacctgtcccagataccagcagactgccgggcgcaactcctggcctcaccaccgtcgagattgttaccatgtctcatcaagccctcggcgatgtcgcaggtcggggcaacgagaagaaaccatcctcggtccgcgccctttccattgtcctgcccatcgtgctgctggtgtttttgtgtttgggtgtgtttctgctttggaagaattggcgtctgaagaacattaactcgatcaattttgataaccccgtgtaccaaaagaccacggaagatgaagttcacatctgccataaccaagacggttactcgtacccgagccgtcaaatggtcagcttggaagatgatgtggca

SEQ ID NO: 11472 - DNA, 2580 bp, Artificial Sequence
  derived and/or modified sequence
atgggcccgtggggttggaagctacggtggaccgtagcgctgctcctggcagcggctggaacagctgtgggggatagatgcgagcgaaatgaatttcagtgtcaagacgggaagtgcattagctacaagtgggtgtgcgacggctcagcggagtgccaggacgggtcggatgaaagtcaggagacatgcctatccgttacatgtaaaagcggtgatttctcatgcggcgggcgcgtgaatagatgtatccctcagttttggcgctgtgacggccaggttgactgtgacaatggatccgacgagcaggggtgtcccccaaaaacgtgcagtcaggatgaatttcggtgccatgacggcaaatgcattagtcgccagtttgtttgtgactcagatagagactgtcttgacggctcagacgaggcatcttgccctgtactgacttgtggcccagcgagtttccagtgtaattcctcaacttgtatcccgcagctgtgggcctgtgataatgatccagactgcgaggacggatccgatgagtggccacagagatgtcgtgggctgtacgtttttcaaggagacagttcaccttgcagcgcctttgagttccactgcctgtcaggcgaatgcattcactcctcctggagatgcgacgggggtccggactgcaaagataagagcgacgaggaaaattgcgctgtggccacttgccggcccgacgagtttcagtgctcagatggaaattgcatccacgggtcccgccagtgtgatagagaatatgattgcaaggacatgtccgacgaggtaggatgtgttaacgttaccctgtgcgaaggcccaaacaaatttaagtgccacagtggggagtgtattactctggacaaagtgtgcaatatggcgcgggactgccgagattggtccgatgagccaattaaggagtgtggaaccgcggcttgcctggataataatgggggatgctcccatgtctgtaatgctctgaaaatcggagctgaatgcttgtgcccagacggctttcagcttgtggcccagcggaggtgtgaggatatcgatgaatgtcaggaccctgatacctgttctcaactctgcgttaacttagaagggggctataagtgccagtgtgaagagggcttccagttagatccacacactaaagcctgcaaggccgtgggctccatcgcttatttgttcttcacaaacagacacgaagtgcgcaaaatgacattagatcggtctgaatacacttctctgattcccaatctgagaaatgtcgtggctctcgatacagaggtggcctctaatcggatatactggagcgatcttagccagagaatgatatgttccacacagctcgatagagcccacggcgtgagcagctatgatactgtaatctctcgcgatatccaagctcccgacggacttgctgttgactggatccactctaatatatactggactgatagcgtcctgggaaccgtaagcgtggccgatactaagggcgtcaagcgtaagacactctttcgcgaaaatggctctaaaccacgggcaatcgtggtagatcctgtacacggcttcatgtactggactgactgggggaccccagcaaagatcaagaagggggggctgaacggtgtagacatctatagtcttgtgacagaaaatattcagtggccgaacggcatcacattggacttgctgtctggtcgcctgtattgggtggatagcaagctgcactctatctcctcgattgacgtcaacggaggtaatcgcaagacgatcctggaggatgaaaagaggttagcgcatcccttctccctggcagtcttcgaagacaaggtcttttggacagacatcatcaacgaagcgattttctctgctaacagacttaccggctcagacgtgaacctgctggccgagaacctgctgtcacccgaggatatggtgctatttcacaatctgacgcagccaagaggcgttaactggtgcgaacgaaccacgttgtctaatggcggctgccagtacttatgcctccctgccccacagattaatcctcatagcccaaaatttacatgcgcctgccccgatggcatgctgctcgctcgggacatgaggtcatgcctaacagaagccgaagctgcggtcgccactcaagagacttctaccgttaggcttaaggtctcctcaacggcagtacgaacacagcacactactactcgccctgtccctgacaccagtaggttgcccggcgccacgccgggactgactacggtggaaatcgttaccatgtcacaccaggccctgggcgacgtggccgggaggggaaatgagaaaaagccatcctccgtgcgtgcactgtcaatagtgttgccaattgtgctcctggtgtttctttgcctgggcgtatttctgctctggaaaaattggagactcaagaacatcaactcaattaactttgacaacccggtctaccagaagaccaccgaagatgaggtccatatctgtcacaatcaggacgggtactcctatccttcaagacagatggtgtcactcgaggacgatgtagcc

SEQ ID NO: 11473 - DNA, 2580 bp, Artificial Sequence
  derived and/or modified sequence
atgggaccttggggatggaaacttagatggacagtcgcactacttttggctgcagctggaacagcagttggagacaggtgcgagagaaacgagttccagtgtcaggacggaaaatgtatcagctacaaatgggtatgcgacggatccgctgaatgccaagacggatccgacgaatcccaagagacatgtctaagtgtaacatgcaaatccggagatttttcatgtggaggacgtgtaaatagatgtatccctcaattctggagatgtgatgggcaagtggattgtgataatggctccgatgaacagggttgtccacccaaaacctgttctcaagatgaattcaggtgtcacgacggcaagtgtatttcaaggcagttcgtttgcgactcagatagggattgcttggatggctctgatgaggcttcttgtcctgttttgacttgcggtcctgcctcatttcaatgtaactcttcgacctgcatcccacagctttgggcgtgcgacaacgacccagattgcgaggacggctctgatgaatggcctcaaagatgcaggggcttgtacgtttttcaaggggatagttctccttgcagcgctttcgagtttcattgccttagtggggaatgcatacattcctcctggagatgcgatggagggccggactgtaaagacaagtcagatgaagaaaactgcgccgttgccacttgccgacctgatgagttccagtgttcggacggaaactgcattcatggttcacgccagtgcgatagagagtacgattgcaaggatatgtccgacgaggtgggatgcgtcaacgttaccttgtgtgaggggccaaataaattcaagtgtcactctggcgagtgtataaccctcgataaggtgtgcaatatggcgcgtgattgtagggattggtcggatgaacccatcaaggaatgtggaacagctgcatgtcttgacaacaacggagggtgctcccatgtgtgtaacgcactaaagattggagcagaatgcttgtgccctgatggtttccaattggtggcacagagacgatgcgaagacatcgatgaatgtcaggatcctgacacatgctcccaactctgcgtgaatttggaaggaggttacaagtgtcaatgcgaagaaggtttccaactagatcctcatactaaggcatgtaaggctgtaggctcgatcgcatatttgtttttcactaacaggcatgaagtgcggaaaatgacattggataggtctgagtataccagtctgattcctaacttaagaaatgttgttgctcttgacacggaggttgctagtaatagaatttattggtcagatctttcacaaaggatgatatgttctacacaattggatagagcacatggtgtctcctcctatgacactgtgattagtagggacatccaagcgccagatggattagctgttgactggatccattccaatatatattggacagacagcgtattgggtacagtttcggttgcagacaccaagggtgtcaaacgtaaaactctcttcagagagaatggctccaaaccaagagcgatcgtggtagatcctgtccatgggtttatgtattggacggattggggaacacctgcgaaaattaaaaagggaggtctaaatggagttgatatctatagtctcgtcactgagaacattcaatggccgaacggaattactttggacttgttgtccggcagattatattgggtcgattctaagttgcatagcatttcatctatcgatgtgaacggaggaaaccgaaagaccatattggaagatgagaagagactggctcaccctttttctttggcagtcttcgaggacaaggtcttttggactgatataatcaatgaagcaattttctcagcaaatcgtttaacaggaagcgacgttaatctccttgcagagaaccttctctctcctgaagacatggttcttttccataatttgacgcagcctcgtggtgttaattggtgtgagcgaactactttgtcaaacggagggtgtcaatatttgtgtctacccgctcctcaaattaaccctcactctcccaagttcacctgtgcctgtcccgatggcatgttgcttgctagagatatgaggtcatgcttgactgaagctgaagctgctgtcgctactcaggaaacttcaacggtgcgcttgaaggtgagttcgacagccgttaggacgcaacatactactaccagaccggtgcctgatacctcgagattgccgggagctacaccaggactgaccactgttgaaatcgttacaatgagtcatcaagcactcggtgatgttgcaggtaggggtaacgagaagaaaccatcctcagtgcgcgctttgagtatcgtgctaccgattgttttgctggtgtttctctgcctaggagttttccttctctggaaaaattggaggcttaagaacataaattctataaatttcgataatcctgtctaccaaaaaactaccgaggatgaggtgcatatctgccacaaccaagacggttacagctatccgtcccgacagatggtttctttggaggacgacgtggct

SEQ ID NO: 11474 - DNA, 2580 bp, Artificial Sequence
  derived and/or modified sequence
atggggccttggggctggaagctgcgatggactgtggctctcctcctcgccgctgctggcacggctgtgggagataggtgtgaacgaaatgagtttcaatgtcaagacggaaagtgtatctcctacaagtgggtttgcgacggctcagccgaatgccaagacggctccgacgagagccaggaaacctgcctgtcagtgacgtgcaaaagtggcgatttttcctgtggtgggcgggtgaataggtgtatccctcagttttggcgctgtgacggccaggtggattgcgacaacggtagcgacgaacagggatgcccccccaagacatgtagtcaagacgaatttcgatgtcacgacggaaaatgtatctcaagacagtttgtttgtgattcagaccgcgactgtttggatggatctgacgaggccagttgtcccgttctgacctgcgggcctgcgagttttcagtgtaatagctctacttgtatccctcagctttgggcttgcgacaacgatcctgattgtgaagacggaagtgacgagtggccgcaaagatgtcggggcctctatgtgttccaaggagatagcagtccctgttccgcctttgaattccattgcctgtccggcgagtgcatccatagctcatggcggtgtgatggtggccctgactgcaaagacaaaagcgacgaggagaattgcgctgtggccacctgcagaccagacgagttccaatgctctgatggcaactgcatccatgggtctagacagtgtgatagagaatacgattgcaaggatatgtcagacgaggtggggtgtgtgaatgtaacactgtgtgaaggaccaaataagtttaaatgtcactctggtgaatgtattaccctggacaaagtgtgtaacatggctagggactgccgtgactggagtgatgaacccataaaggagtgtgggacggcagcttgtcttgacaacaacgggggctgctctcacgtctgcaacgcgctcaaaatcggagccgaatgtctgtgccctgatggcttccagctggtggcgcaacggcgttgtgaagacatcgatgagtgtcaggatcccgatacttgttcacagctttgtgtgaacctcgaggggggctacaagtgccagtgtgaagaaggtttccagctggacccccatactaaggcttgcaaggccgtgggctccatcgcatacctctttttcaccaatcgccacgaggtgaggaagatgaccctggaccgaagcgagtacacttcactcataccgaacctgaggaacgtagtggcgctggatacggaggttgctagtaaccgcatttactggagcgaccttagccagaggatgatatgttccacgcaactggacagagcacacggggtgtcctcctacgataccgtgataagccgagacatccaagctcctgacggtctggccgtcgactggatccattctaatatttattggaccgattcagttctggggacagtctcagtggcagatacaaagggtgttaagcggaagaccctatttcgcgaaaatggatctaagccccgggcgatagttgttgacccggtgcatgggtttatgtattggacggattgggggaccccagcaaagatcaagaaaggcgggctgaatggtgtggacatttactccctggttacagagaacattcagtggcccaacggaataaccctagacttactgtccgggcggctgtattgggtggattctaagctacacagcatcagtagcatcgacgttaatggaggcaacaggaagactatactggaagatgaaaagcgactcgcgcaccctttctccctcgccgtctttgaggacaaagtgttttggaccgatattatcaacgaagctatcttcagtgcaaatcgtctgacgggatctgacgtgaatctgttagctgagaacctactgtctcccgaggacatggtgctgttccacaatctcacacaacctagaggagtgaactggtgtgagcgcactactctttcgaatggcggttgtcagtacctgtgcctgccggctccccagattaaccctcattcgccgaagtttacgtgtgcctgcccagatggaatgttgttagcgagggatatgcggagctgcttgacagaagctgaggctgccgtggctacccaggaaacatccacagtacggctgaaagtaagctcaacggccgtgaggactcaacacaccaccactcggcctgttcctgacacatccaggcttccgggcgccactcctgggttgaccacagtggagatagtcactatgagccatcaggccctgggcgatgtggcaggaagaggtaacgagaaaaagccatccagcgtcagagctcttagcatcgttctcccaatagtgctcctagtgttcctctgcttgggcgtgttccttctgtggaaaaactggaggctcaagaatattaacagcattaattttgacaatccagtgtaccagaagacaacagaggatgaggtccatatctgccacaatcaggacggctacagttatccttccaggcagatggtctctttagaggatgatgtcgcg

SEQ ID NO: 11475 - DNA, 2580 bp, Artificial Sequence
  derived and/or modified sequence
atgggaccttgggggtggaaactcaggtggaccgtggcactcctactggcagcggctggtacggctgtcggggacaggtgtgagcgcaacgagttccagtgccaggatgggaagtgtatttcatacaagtgggtctgcgacggtagcgcagaatgccaagacggctctgacgagtctcaggagacctgtcttagtgtcacttgcaagtcaggcgatttttcctgcggaggaagagtgaacaggtgcattccacaattctggagatgtgacggccaagtagactgcgacaatggcagcgacgaacagggctgccccccaaagacctgttcgcaggatgagttccgctgccacgacggaaagtgtatctcccggcagttcgtgtgcgattccgatagggattgtttggatggtagcgacgaggctagctgccccgtgttgacctgcggacccgcctcatttcaatgtaactcatccacttgcattccgcagttgtgggcctgtgacaacgacccagactgcgaggacggttcagacgagtggcctcaaaggtgcagagggctgtatgtgttccagggcgatagcagtccttgttccgcattcgaattccattgcctcagcggcgaatgtatccattcgagctggcggtgtgacgggggtccggattgcaaggataaatctgacgaagagaactgtgcggtggctacttgtcgtcctgatgaatttcaatgcagtgatgggaactgtatccacgggtctcgccagtgtgaccgagaatacgactgcaaggacatgtccgacgaggtgggatgcgtaaatgtgacactctgtgagggccctaacaagtttaagtgccacagcggagagtgtatcaccttagacaaggtatgtaacatggccagagattgcagagattggtccgacgaacctattaaggagtgcggtacggctgcctgcctcgacaacaacggcgggtgttcccatgtctgcaacgccctcaagataggagccgagtgcctgtgccccgacggatttcagttagtggcccagcgtcgatgtgaggacatcgatgagtgccaggaccctgatacctgttcccagctctgtgttaacctggagggtggctataaatgccagtgtgaagagggcttccagctggatccacatacgaaggcctgcaaggccgtgggatcaatcgcgtacctgttctttaccaaccgacacgaggtccgtaagatgactctcgatagaagtgaatacacttctctgattcctaacctgaggaatgtggtggcactcgataccgaggtcgcatctaacagaatctactggagcgacctgtctcagcgtatgatttgttcaacccagttggaccgagcccatggcgttagtagttacgacactgtgatctccagagacatccaggcccctgacgggctcgccgtagattggattcattctaatatttattggaccgactctgtgctggggactgtgagcgtagctgataccaagggggtgaagagaaaaaccctgtttcgagagaatggctccaaaccccgggccattgtagtggacccagtgcacggctttatgtactggactgactggggaacaccagccaaaatcaaaaaaggtggattgaacggagttgatatctattccctcgtcacggagaacatccagtggccgaacggcatcacactcgatctgctgagcggtcggctctactgggtggacagtaagctgcatagcatcagtagtattgatgtgaacggtgggaacaggaagactattttagaggacgagaagaggttggcacatcccttctcccttgcagtgttcgaagataaagtcttttggacagacatcatcaacgaggccattttctccgccaaccggttgaccgggtccgatgtgaacctcctcgccgaaaatctactcagtcccgaggacatggtactgttccacaatctgacccagcctagaggggtgaactggtgcgagaggactacgctgtccaatgggggctgccagtacctgtgcctgcccgctccccagattaatcctcattccccaaagttcacctgtgcgtgcccagatggcatgctactcgccagagacatgagatcttgtttgactgaagcagaagccgccgtggccacgcaggaaaccagcacagtgcgcctgaaagtctcaagtactgccgtgaggactcagcataccacgacccggccggtgccagatacaagtcgtttgcctggtgccacccctgggctcacgaccgtcgaaatcgttaccatgagtcaccaggcactgggagatgtcgcaggaagagggaacgagaagaagcccagtagtgtccgggctttgtcgatcgtgcttccgatcgtattattggttttcctgtgtcttggagtcttcctcctgtggaagaactggcggttaaagaacatcaactccatcaattttgataaccctgtgtatcagaaaactactgaagatgaggtgcacatatgccataaccaagacggatatagctatccctctcggcaaatggtctcccttgaagatgatgtcgcc

SEQ ID NO: 11476 - DNA, 2580 bp, Artificial Sequence
  derived and/or modified sequence
atgggcccttggggctggaaactgcgctggactgttgccctgctgctcgccgcggctggtaccgccgttggcgatagatgtgaaaggaacgaatttcaatgccaggatggcaaatgtatttcttacaagtgggtgtgcgatggatcagcggagtgtcaggacggctcagatgagtctcaggagacgtgtctgtcagtgacctgcaagtccggagatttcagttgcggaggaagagtcaatagatgtatcccgcaattttggaggtgtgatggtcaggtagattgcgataacggctctgacgagcaaggatgtccccctaagacgtgtagccaggacgagtttagatgccatgacggaaagtgcattagcagacaatttgtgtgcgattccgatagggactgtctcgacggatcagatgaagcgtcttgccccgtcctgacgtgtggtccggctagcttccaatgcaacagtagtacatgcatcccccaactctgggcttgcgataacgatcctgactgcgaagacggctccgacgaatggccacagaggtgcagaggactgtatgtattccagggagactcaagcccgtgcagcgcatttgagtttcactgcctgtccggtgagtgcatccacagtagctggcgctgtgatggaggtcctgactgtaaggacaagagcgatgaagagaactgcgcggtcgccacctgtagacctgatgaattccaatgctctgacggcaactgtatccatggttctcgccagtgcgatcgcgaatatgactgtaaagatatgagcgatgaagttggctgcgtaaacgtcactctctgtgaaggtcctaacaagttcaaatgccacagcggtgagtgcattactctcgataaggtatgtaatatggcaagggattgcagagactggtcagatgagcccataaaggaatgtggaaccgcagcttgtcttgataacaacggcggatgctcacatgtttgcaacgctctgaagatcggcgctgagtgcctttgccccgatggattccagctcgtagcacagaggagatgcgaagacatagacgagtgtcaagaccctgatacctgtagtcaactgtgtgtaaacctcgaaggtggttacaaatgccaatgcgaggagggcttccaactggacccacacaccaaagcgtgtaaagctgtcggatctatcgcttacctgttcttcaccaatagacatgaagtaaggaaaatgacactggacagaagtgagtacacctcccttataccaaatctccgcaacgtcgtagcccttgacaccgaagtggcgtctaatagaatctattggtccgacctgagccaacgcatgatctgctccacccaactggatcgcgcccacggagtttcctcctacgatactgtgatctctagggacatacaggctcctgacggccttgcagtcgactggatccactccaacatctattggactgactctgtattgggcacagtgtctgtggcggatacgaagggagtcaagagaaaaaccttgttccgcgagaacggatccaagccccgcgctattgtggtggatcccgtgcacggtttcatgtattggactgattggggcacacccgccaaaataaaaaaaggaggccttaatggtgtggacatctatagcttggtgacggaaaacatccaatggcctaacggaataactctggatctcctgagcggcagactgtattgggtggattctaaactgcactcaatatcttccatcgatgtgaacggaggcaaccgcaagactatcttggaggacgaaaaaagactggcacatccttttagcttggccgtgttcgaagacaaagttttctggaccgatatcatcaacgaggcaatcttctctgcaaacaggttgaccggatccgatgtgaatctcttggctgagaaccttcttagtccagaagacatggtattgtttcacaatctcacccagcccagaggtgtcaactggtgtgagaggacgacactctctaatggtggttgccagtacctgtgtcttcccgcgccacagattaacccccattcccccaagttcacgtgtgcttgccccgatggtatgctccttgctagggatatgcgctcctgcttgacagaggccgaggctgccgtggctacccaggaaacatccacggttcgcctcaaggtgtcctctacagctgtgaggacccaacacaccaccacgcgccctgtacccgacacatcaagattgccaggtgcgactcccggactcaccaccgtggagatagtgaccatgtcacaccaggcccttggagacgttgccggtaggggaaacgagaagaaaccatcctctgttagggccctctcaatagtgctgcccatagttcttcttgtcttcctgtgtctcggcgtgttcctgctgtggaagaactggaggcttaagaacattaactccatcaattttgacaaccccgtgtaccaaaagaccaccgaagacgaagtgcacatctgccataaccaggacggatattcttatccctccaggcaaatggtttctctggaggatgacgtggcg

SEQ ID NO: 11477 - DNA, 2580 bp, Artificial Sequence
  derived and/or modified sequence
atgggtccatggggctggaagctgagatggaccgtggcccttctcctcgccgccgctggtacagctgtcggagaccggtgtgagcgaaatgagttccagtgccaagacggcaagtgtattagttacaagtgggtgtgtgacggatcagcagagtgtcaagatgggtctgatgagtcacaggagacctgtctgtccgtcacatgtaaatccggggacttctcatgcggagggcgcgttaatcggtgtatcccacagttctggaggtgtgacggccaggtcgactgtgataacgggagtgatgagcaggggtgtccccccaagacatgctctcaggacgagtttcggtgtcacgacggtaagtgtatctccaggcagttcgtgtgtgattccgatcgggactgcctggacggttctgatgaggcatcttgcccagttctcacctgtggcccagcttcctttcaatgtaattctagtacttgcatcccgcagctgtgggcatgcgataatgaccctgattgtgaagacggttctgatgagtggccccagaggtgccgcggactgtacgttttccaaggcgatagctcaccttgcagtgcattcgaatttcactgtctcagcggggaatgcatccactcctcctggcgctgcgacggcgggcccgactgcaaggacaaaagcgatgaagagaactgtgcggtggcaacctgtcggcctgatgagttccagtgcagcgatggtaattgcattcacggcagccgccagtgcgatcgcgaatatgattgtaaggatatgagcgacgaggtcgggtgtgtgaacgttacactgtgtgaggggcctaacaaattcaaatgtcacagcggagaatgcattacactggacaaagtgtgtaacatggcacgggattgtcgggactggtccgacgaacctatcaaggagtgcgggaccgccgcctgtttggacaataacggcggctgcagccatgtttgtaacgccctcaagattggggcggaatgtctttgtcccgacggctttcagttggtggcccaaagacggtgtgaagacatcgatgaatgccaagaccccgacacttgttctcagttgtgtgtgaacctggagggcggctataagtgtcagtgcgaggaaggattccagttggacccacacaccaaggcctgcaaagcagtcgggtctatcgcctacctgttctttaccaacaggcacgaggtcaggaaaatgacccttgaccggtctgagtacacgtctctgatccctaacttgaggaatgtggtggcgctggatacggaagtggcttccaatcggatttactggtccgacctgtcccagaggatgatctgcagtactcaacttgaccgcgcccacggggtcagttcatatgacaccgtaatctctcgggacattcaggctcctgatggacttgccgtagactggatccattctaatatttattggacagactccgtactgggcaccgtcagcgtggctgacaccaagggcgtgaaacggaaaaccctgttccgggaaaatggttcaaagcccagagcaatcgtagttgaccctgtacatgggtttatgtactggaccgactggggaactccggctaagatcaagaaaggaggtctgaatggagtggacatatatagtctggtcacggagaacattcagtggccgaatgggatcacactggaccttctgagcggaaggctgtactgggtcgattcaaagctgcattcaattagctctatcgacgtcaacggcggaaaccggaaaaccatcttggaagacgagaaaaggctggcccacccctttagcctggccgtctttgaggataaggtgttttggactgatatcatcaatgaggctatttttagcgccaaccgcctgacaggcagcgatgtgaaccttcttgcagagaacctgctgtccccagaagacatggtcctcttccataacctgactcagccgcgcggcgtgaactggtgtgaacgaacaaccctgtccaacggcggttgtcaatacctgtgcctgcctgctccacagatcaacccgcacagccctaagtttacctgtgcctgtcctgacggcatgttgctggctcgggatatgcggagctgcttgacagaagcagaagcagccgtggccacccaggagacctctactgttcggttgaaggtgtctagtactgccgtaaggacccaacacacgaccacccgcccagtgcccgatacaagtcggctccctggggccacaccaggactcactacagtcgagattgttaccatgtcccaccaggccctcggcgacgtggcggggaggggtaatgaaaagaaacctagttccgtgagagcactgagcatagtgctccctatcgttctgttggtattcctgtgcctcggtgtgtttcttctctggaagaactggcggctcaagaacatcaacagtatcaatttcgacaaccctgtgtaccagaagacaactgaggacgaggtgcacatctgccacaatcaggacgggtacagttatccaagtcgccagatggtctcactcgaagacgacgtagcc

SEQ ID NO: 11478 - DNA, 2580 bp, Artificial Sequence
  derived and/or modified sequence
atggggccgtggggttggaagttgaggtggaccgtcgcgcttctgctggctgcggcaggaaccgcagtgggcgacagatgcgagcgcaacgaattccagtgccaggatggaaaatgcatttcatacaaatgggtgtgtgacggctcggcagaatgccaagacggttcagacgagtcacaagaaacctgtctgagcgtcacgtgtaagtccggggatttctcatgcggagggagagtgaaccgctgcattccgcagttctggcgctgcgacggccaggttgattgcgacaatggatcggacgagcaaggatgtccgccaaaaacctgctcacaggatgagttccggtgccatgacggaaagtgcatcagcagacagttcgtctgcgattccgacagagattgcctcgatggttcggatgaagcctcctgcccagtgcttacctgtggacccgcgtccttccagtgcaattcgtccacttgcatccctcagttgtgggcctgtgacaatgatccagactgtgaagatgggtccgacgaatggccgcaacggtgcaggggactgtacgtctttcagggcgattctagcccgtgtagcgcctttgaatttcactgcctgtccggagagtgcatccattcatcatggaggtgtgatgggggtccggactgtaaggataagagcgacgaagagaactgcgccgtggccacttgtcggccggatgagttccaatgttctgatggaaattgcatccatggttctcgccaatgcgatcgggaatacgactgcaaagacatgagcgatgaagtggggtgcgtgaacgtgaccctgtgcgagggcccgaataagtttaagtgccacagtggtgaatgtataactttggataaggtctgcaacatggccagggactgcagagattggtcggatgagccgattaaggagtgcggcactgcagcctgtttggataacaatggcggatgctcacacgtgtgcaacgcgcttaagatcggagccgagtgcctgtgcccagatgggttccagctcgtggcccagcgcaggtgcgaggatattgatgagtgccaggacccggatacttgctcccagctgtgcgtcaacctggaaggcggttacaagtgtcagtgtgaagagggatttcagctggaccctcacactaaagcctgcaaggccgtcggttcaatagcttacctgttcttcaccaaccggcatgaagtgagaaagatgaccctggatagatcagaatataccagcctgatccccaacctgcgaaacgttgtggccctcgacactgaggtggcgagcaaccggatctactggtcagacctgtcgcagagaatgatttgtagcacccaacttgacagagcgcacggagtgtcctcctacgacacggtgatctcgcgggacatccaggcgcccgacggacttgctgtcgactggatccactccaatatctactggactgattccgtgctcggaacggtgtccgtggcagacactaagggcgtgaaacggaaaaccctgttccgggaaaacggaagtaagcctcgggctatcgtggtggacccggtgcacggatttatgtactggactgactggggaactccggccaagatcaagaagggaggccttaacggcgtggacatttactcactggtcactgagaacatccagtggcccaacgggatcactctggacctcctgtccggccggttgtattgggtggattcgaaactgcattcgatctcctcgattgatgtgaacgggggtaatcggaaaaccatcctggaggacgagaaacgccttgcccatcccttctccttggcagtgttcgaggacaaagttttctggaccgatatcatcaacgaggccatcttctccgcaaacagactgaccggttcggacgtgaacttgctcgccgagaatctcctgtccccggaggacatggtgctgtttcataacctgactcagccccgcggagttaattggtgcgaacgcaccaccttgagcaacggaggctgtcagtacctgtgcctgcctgcaccacaaatcaacccgcattcccccaagttcacttgcgcctgcccagatggcatgctgctggctcgcgacatgcgctcgtgcctgacggaggctgaggcggctgttgcaacccaggaaactagcactgtgagattgaaggttagctctacggccgtgcgcacccagcatactactacccgcccagtgccagacacttcccgcctgcctggagcaaccccaggactcactaccgtggaaattgtgactatgtcacaccaagcccttggggacgtggccggcaggggaaacgaaaagaaacccagctccgtcagggcgctgtcgatcgtattgccgatcgtgctgctcgtgttcctctgtcttggtgtgttcctgctctggaagaattggcgcctgaagaatatcaactccattaacttcgacaatccagtgtaccagaaaaccactgaagatgaagttcacatttgtcataaccaagatggatactcgtacccgtcccggcagatggtgtctttggaggacgatgtggct

SEQ ID NO: 11479 - DNA, 2580 bp, Artificial Sequence
  derived and/or modified sequence
atgggaccttggggatggaagctgcggtggaccgtggctctcctgctcgcggcggccggaaccgcagtgggcgaccggtgcgaacggaacgaattccagtgccaggatggaaagtgtatctcctacaaatgggtttgcgatggatccgccgaatgccaggacggcagcgatgaatcccaggaaacttgcctcagcgtcacttgcaagtcgggcgacttttcctgtggtggacgcgtgaaccggtgtattccacagttctggagatgtgatggacaggtggactgtgacaacggatccgacgaacagggatgcccgcctaagacgtgctcccaagacgagttcagatgccacgatgggaagtgtatctctcggcaattcgtttgtgacagcgaccgcgactgcctggatggaagcgatgaggcctcttgccctgtgctcacgtgcggcccggcgtcgttccagtgcaattcttcaacctgtatcccgcaactctgggcatgtgacaacgaccccgactgcgaggacggctcggatgagtggcctcagaggtgccggggactgtacgtttttcaaggtgactcgtccccatgctcagctttcgagttccactgcctctcgggagagtgcatccattcgtcctggcgctgtgatggaggaccggactgcaaagataagtcagatgaggaaaattgcgcagtggctacgtgtagaccggacgagttccaatgcagcgacgggaactgcattcatggctcgcggcagtgcgaccgtgaatacgactgcaaggacatgagcgacgaagtgggatgcgtcaatgttaccctctgcgaaggcccgaacaagttcaagtgtcactctggagaatgcatcaccttggacaaggtgtgcaacatggcacgcgattgcagggactggtccgatgaaccaatcaaagaatgtggtaccgcagcatgtctcgacaataacggaggatgctctcatgtctgcaacgcccttaagatcggagctgagtgcctgtgccccgacggctttcaactggtcgcgcagcggcgctgcgaagatatcgacgagtgccaggatccagacacttgctcccaactgtgcgtgaatctggaaggcggctacaagtgtcagtgtgaggaaggtttccaactggatccgcacaccaaggcatgcaaagcggtgggctctattgcgtacttgttcttcaccaatcggcacgaggtcagaaaaatgaccctggatcggagcgagtacacctccctcatcccgaatctgcggaatgtcgtcgccctggatacggaagtggcgtccaaccgcatctattggtccgacctgtcgcaaaggatgatttgttctactcagctggaccgcgctcatggcgtcagctcctacgacacggtgatcagccgcgatatccaggctcctgacggtttggccgtcgattggatacactcaaacatctactggactgactcagttctgggcactgtgtccgtggccgacactaagggggtgaaaagaaaaactctgtttcgggaaaacggatcgaagccgagggccatcgtggtggacccggtgcacgggttcatgtactggacggattggggtactcctgctaagatcaaaaagggaggtctgaatggagtggatatctactcgctcgtgactgaaaacatccagtggccgaacggaatcaccctcgatcttctcagcggacgcctgtactgggtggactccaaactccattcgatcagctcgattgatgtgaacggagggaaccgcaaaactatactggaggatgaaaagcgcttggcccacccattctcgctggctgtgttcgaggataaggtgttctggaccgacatcatcaacgaggccatattctcagccaaccgcctgaccggctcggacgtcaatctgctggccgaaaatctcctgtccccggaggacatggtgttgtttcacaacctgacccaaccccgtggagtgaattggtgcgagcggactactctgagcaatggtggttgccagtatctgtgcttgcccgcgccccagatcaatcctcattcacccaagttcacttgcgcgtgcccggacggcatgcttcttgccagagacatgcgatcatgtcttactgaggccgaagccgcagtggcaacccaggaaacgtcgactgtgcgccttaaagtctcgagcactgcagtcaggacccaacatactaccactcgaccggtcccggacacctcccgactccccggggccacgccggggctcaccaccgtggagattgtgacgatgtcgcatcaagcccttggggacgtcgccgggcgcgggaacgaaaagaagccatcttcggtccgcgcattgtcaattgtcctcccaatcgtgctgttggtttttctgtgtctgggagtctttctgctgtggaagaactggcgcttgaagaatatcaactcaatcaactttgataaccctgtgtaccaaaagaccactgaagatgaagtccacatttgccacaaccaggacggatacagctacccatccagacagatggtgtcccttgaggatgacgtcgca

SEQ ID NO: 11480 - DNA, 2580 bp, Artificial Sequence
  derived and/or modified sequence
atgggtccgtggggatggaaacttagatggactgtggccttgctgctggccgcagccggcactgcagtgggagacagatgcgaacgcaacgagtttcagtgccaagacggaaagtgcatcagctacaagtgggtgtgtgatgggagcgcagagtgccaggatggctccgacgagtcccaggagacttgtttgtccgttacgtgtaagtccggagacttctcatgcggaggccgggtcaacaggtgtatcccacaattctggcgctgcgatggtcaagtggactgcgataatggatcggatgaacagggatgcccacctaaaacttgcagccaagatgaattccggtgccacgacggcaagtgcatctcgcggcagttcgtgtgtgattcggatagagactgcctggacgggtccgacgaggccagctgtccggtgcttacctgtggccctgcatcatttcagtgcaattcgtctacttgcatcccgcagctctgggcgtgcgataacgatccagactgtgaggacgggtctgacgaatggccccagcgctgccgcggactgtacgtgttccaaggggactcgagcccatgctccgcgttcgagtttcactgcctctccggcgaatgcattcacagctcgtggcgatgcgatggtggacccgactgcaaagacaagtcagacgaggaaaattgtgcagtggccacttgtcgcccagatgaattccagtgctccgacggtaattgcatacatggatcaaggcagtgcgacagggaatacgactgcaaggatatgagcgacgaggtgggatgcgtcaatgtgactctgtgcgaaggaccaaacaagttcaagtgccatagcggcgagtgcattaccctggacaaggtctgcaatatggcccgcgactgtagggactggtcggatgagcctatcaaagaatgcggaaccgccgcttgccttgataacaacggaggctgctcacacgtgtgtaacgcactcaaaatcggagccgaatgcctgtgtccggacggcttccaactcgtggcccagaggcggtgcgaggatatcgacgaatgccaagatccagacacttgttcccagctgtgcgtcaatctcgaaggaggatacaaatgtcagtgcgaagaaggattccagcttgaccctcacactaaggcgtgtaaggccgtcggatcaatagcatacttgttcttcaccaaccggcatgaagtgagaaagatgactctggatagatcagagtacacgtccctgatcccaaatctccgcaacgttgtggcgcttgatactgaagttgcgtcgaaccgcatctactggtccgacttgagccagagaatgatttgtagcacgcaactcgatcgggcccacggtgtgagctcgtacgacactgtgatcagccgcgacatccaggcccctgatggcctggcagtggactggatccatagcaacatttactggacggattccgtgttgggaacggtttcggtggccgatactaagggagttaagagaaagaccctgttcagagagaacgggtccaaaccgcgggcaatcgtggtcgaccctgtgcacggctttatgtactggactgactggggaactccagctaagatcaagaagggtggactcaacggcgtggatatctactcgctggtgaccgaaaacatccaatggcccaatggcatcaccctggatcttctgtccggtcgcctgtattgggtcgatagcaaactccactcaatctcgtccatcgacgtgaacggcggcaaccgtaaaaccattctggaggatgaaaagaggctcgcgcatcctttctccttggccgtgttcgaggacaaggtgttctggaccgacatcatcaatgaggctatcttttcggctaatcgcctgaccggtagcgacgtgaatttgctggccgaaaacctcctctcgcccgaggacatggtgctctttcacaacctgacccagccgcggggagtcaactggtgcgaacggaccaccctgtcgaacggaggatgccagtacctgtgcctgcctgccccacaaatcaatcctcattcgccaaaattcacctgtgcatgcccggatggaatgctgttggcacgcgatatgcgctcctgcctgaccgaagctgaggcggctgtggcaacccaggaaaccagcacggtgagattgaaggtgagcagcactgctgtcagaactcagcatactaccacccgccccgtcccagacacgagccggttgccgggcgcgaccccgggcctgacgactgtggaaattgtgactatgtcgcaccaagccctcggagacgtggcgggaagaggcaatgagaagaagccgtcatcggtcagagcactcagcattgtcctcccaatcgtgctgttggtgtttctctgcctcggagtgttcctgctgtggaaaaactggcggctgaagaatatcaactcaatcaattttgacaacccggtgtatcaaaagacgacggaggacgaagtgcacatctgtcacaatcaggacggatactcatacccctcgcgccagatggtgtcgctggaagatgacgtcgcc

SEQ ID NO: 11481 - DNA, 2580 bp, Artificial Sequence
  derived and/or modified sequence
atgggtccctggggctggaagctccgctggaccgtggcacttttgctagcagcagctggcaccgccgtcggagatcgatgtgaacgcaatgagtttcaatgccaggacgggaaatgtatctcttacaaatgggtctgcgatggtagtgccgagtgccaggatggctccgatgagagtcaggagacatgccttagtgtgacctgcaagtccggtgacttttcatgtggggggcgtgtgaataggtgtatcccacagttttggaggtgtgatggtcaggtggattgtgataatggatcagatgagcagggctgcccacctaaaacatgtagccaagacgaatttagatgtcatgacggaaagtgcatatcccggcagtttgtgtgcgatagtgatcgagactgtctcgatggcagtgacgaagctagctgtccagtgttaacatgtggacctgcctccttccaatgcaactcttctacttgtatccctcagttatgggcttgcgacaacgaccccgattgtgaggatgggtctgatgaatggcctcagaggtgtcgtgggctctacgtgttccagggagactcctcaccatgctcagcattcgaatttcactgcttgagcggagagtgcatacactccagctggcgctgtgatggcggacctgattgtaaagataaatccgatgaggagaactgtgccgtggccacatgcagaccagacgagtttcagtgtagcgacggcaactgcatccacggtagccgacaatgtgatcgtgagtacgactgcaaggatatgtctgacgaggttgggtgtgtgaacgtcacactgtgtgagggaccaaacaaattcaagtgtcatagtggggagtgcatcacgcttgataaggtgtgcaatatggccagagactgccgggactggtctgatgagccaatcaaagagtgcgggacggccgcttgtctcgacaacaacggtgggtgttctcacgtttgcaacgccctgaagattggggcagagtgtttgtgtcctgatgggtttcagctggtagcacagcgtagatgtgaagacatagacgaatgtcaggacccagatacatgttcgcagttgtgcgtgaacctggaaggggggtataaatgtcagtgcgaggaggggtttcaactggatccccataccaaggcgtgcaaggcggtggggtccatcgcttacctcttttttaccaacaggcacgaggtgagaaagatgactctggatcgtagtgaatataccagtttaatacccaatctccggaatgtggtggcactggatacagaagtggcgtcaaatcggatttactggagcgatcttagccagcggatgatctgctccacgcaactggatagggcccacggcgtgtcaagctatgatacagttatttctcgggatatccaggctcccgacggcctagcagtcgattggattcacagcaatatctactggacggactcagtgttgggcacggtaagcgtcgcagataccaaaggagtgaaaagaaaaacactgttccgagagaatggaagtaaacctcgcgcaattgtagtagaccctgtgcatggattcatgtattggaccgactgggggactcccgcgaaaatcaagaaagggggcctgaatggggtggatatttattccttagtcactgaaaatatccagtggcccaatggcattactctggatttgctgtctgggcgcctttactgggtggattccaagctgcactccatctctagcatcgatgtgaacggcgggaacaggaaaacaatcttagaggatgagaagcggcttgcccacccattcagcctggccgtgttcgaagataaggtgttttggaccgacattataaacgaggccatattttcggcgaaccgtctgaccggctcagacgttaacctcttggcagagaatttgctatcgcccgaggacatggtgctgttccataatctcacacagccacgtggggtcaactggtgtgagcggactacattgtcaaacgggggctgccaatacctgtgtctgccagcgccccagatcaatccccattcccctaaatttacgtgcgcctgccccgacggcatgctgctggcaagagacatgaggtcctgcctgactgaggctgaagcagccgtggccacacaagagactagcaccgtgcgcctgaaagtatcttccactgccgtccggactcagcacaccaccacaagacccgtccctgatacttctcgactgccgggggccacgccggggctgacaaccgtggagattgtcaccatgagccaccaagctctcggggatgtggccggcagagggaatgaaaagaagccgtcatcagtgcgggctctgtctattgtgctcccgatcgtgctgctagtgtttctgtgcttaggggttttcctcctctggaagaactggagactcaagaacatcaacagcataaacttcgacaaccccgtatatcagaaaactactgaagatgaggtacatatttgtcataatcaggatggatactcgtacccttcaagacaaatggtgtctctggaagatgacgtcgcc

SEQ ID NO: 11482 - DNA, 2580 bp, Artificial Sequence
  derived and/or modified sequence
atgggcccatggggatggaagctgcgctggactgtggcgctgctgctggcggcggccgggaccgcggtgggtgaccgctgtgaaagaaacgagtttcagtgtcaagacggaaagtgcatctcctacaaatgggtgtgcgatggctccgcggagtgccaagacggctcagatgaaagccaagagacttgcctgtcggtgacttgcaaaagcggagattttagctgcggaggtagagtgaacaggtgcatacctcagttttggaggtgtgatgggcaggtcgattgtgataacgggtcggacgaacagggatgccctcctaaaacttgctcgcaggacgagttccggtgccacgacgggaagtgcatctctcggcagtttgtgtgcgactccgatcgggactgtctcgatggatcagacgaagcctcctgtccagtgctgacttgcgggccggcttcattccagtgtaacagctcgacttgtatcccgcagctctgggcatgcgacaatgaccccgactgtgaagatggctcagatgagtggccgcaacgctgtagaggactgtacgtgttccagggcgattcaagcccatgctcggctttcgagtttcattgtttgagtggagagtgcatccactcctcgtggaggtgcgacgggggaccggattgcaaggataaatcggacgaagagaattgcgcagtggcgacctgtcgccctgatgaattccagtgttccgacggaaattgcatccatggatcccggcaatgtgaccgcgagtacgactgtaaggacatgtccgatgaagttggatgcgtgaatgtcacgctctgcgaaggaccaaacaagttcaaatgtcactcgggcgagtgcatcactctcgacaaggtttgtaacatggcacgggactgcagagactggtcggacgagcccattaaggagtgcggaaccgccgcatgccttgacaacaacggtggctgctcgcacgtctgtaacgctctgaaaatcggcgcggaatgcctctgccccgacggctttcaactggtcgctcagaggcgctgcgaagacatcgacgagtgtcaggacccggatacctgcagccagctctgcgtgaacctggaagggggttacaagtgtcaatgcgaggagggatttcaactggatccgcatactaaggcatgtaaggccgtgggttcgattgcgtacctgttctttaccaatagacacgaagtgaggaagatgactctggaccgctcggaatacacttcgctgatcccgaatctgcgcaacgtggtggccctggacaccgaagtcgcttcgaatcgcatctactggtccgatcttagccagagaatgatctgttcaacccagctcgacagagctcacggtgtctcctcctacgacaccgtgatctcgcgggacatccaggcgccggacggactggcggtggattggatccactctaacatctactggaccgattcggtgcttggaaccgtgagcgtggcagacactaaaggcgttaagcgcaaaaccctcttccgcgaaaacggctcaaagccgcgggcgatcgtcgtggatccggtgcacggcttcatgtattggactgattgggggaccccggccaagatcaaaaagggcggactgaacggagttgacatctacagcctcgtcaccgagaatatccagtggccgaacggaattactctcgatctgctctcgggacgcctttactgggtcgatagcaagctgcattcgatctcttccatcgacgtgaacgggggcaatcgcaagacgatcttggaagacgaaaaacggctcgcccacccgttctcattggccgtcttcgaagataaggtgttctggactgacatcatcaacgaagctattttctcagcaaatagactcactggatcggacgtgaatctcctcgcagaaaatctgttgtcgccggaggacatggtgctgttccacaacctgactcagccacggggagtgaactggtgtgagcgcactaccttgtcgaacggggggtgccaatacctgtgcctgccggccccacagatcaatccacactcacctaagttcacctgcgcctgccctgatggcatgctgctggctagggacatgagaagctgtctgactgaagccgaagcggctgtggcgactcaggaaacgtcgactgtgagacttaaggtgtctagcactgctgtgcgcacccagcacactactactcgaccggttccggacactagcagacttccgggtgcaaccccaggcctcactaccgtggaaattgtgaccatgagccatcaggccttgggcgacgtggcgggtcgcggaaatgaaaagaagccgtcctcagttagagcgctgtcgatcgtgctcccaatcgtgctcctggtgtttttgtgcctgggagtgttcctgctgtggaaaaattggcgcctcaaaaacatcaattcgatcaacttcgataatccggtctaccagaagaccaccgaagatgaagtgcatatctgtcacaatcaggatgggtacagctacccgtcccgccaaatggtgtcactggaggatgacgtggcg

SEQ ID NO: 11483 - DNA, 2580 bp, Artificial Sequence
  derived and/or modified sequence
atgggaccttgggggtggaaactgaggtggactgtcgcccttctcctcgccgccgctgggactgctgtcggggatagatgcgaacgaaatgagtttcagtgccaggacgggaagtgcatctcatacaaatgggtctgcgatgggagtgccgagtgccaggacggttccgatgagagtcaggagacgtgtctgtccgtgacctgcaagtccggtgatttttcctgtggcgggcgggtgaaccgatgcatacctcaattttggcgttgtgatgggcaggtggactgcgacaatggatccgatgaacaggggtgcccccccaagacttgctcacaagatgagtttcgttgccatgacggtaagtgtatatcacgacaattcgtatgcgattctgacagggattgtctggatggaagcgatgaggcatcttgcccagtgctgacgtgcggacccgcaagcttccagtgtaactctagcacctgcattccacaattgtgggcctgcgacaatgaccccgactgtgaggacgggagtgatgagtggcctcagcgctgccgtggtttgtatgtatttcagggagacagttctccatgtagtgcctttgaatttcactgtctgagcggtgagtgtatccactcatcttggagatgtgacggaggacccgactgtaaagacaagtcggacgaggaaaattgtgccgtcgccacctgtcgaccggatgaatttcagtgcagtgacggcaactgtatccacggatcgagacagtgcgacagggagtacgactgtaaagatatgtcagatgaggtggggtgcgttaatgtgacactttgtgagggccccaataagtttaaatgtcatagcggtgagtgcattaccttagataaggtttgtaacatggcgagggactgccgtgactggagtgatgaaccaatcaaagagtgcggcacggccgcgtgcttggataacaacggtggatgttcccacgtttgcaacgccctcaaaatcggcgctgaatgcttatgtcccgatgggtttcagttggtggcccagcggcgctgtgaggacatcgacgaatgccaggatcccgatacctgtagccagctgtgtgtcaatctggagggagggtacaagtgtcagtgtgaggaaggcttccaattagacccccacacaaaggcttgcaaagcggtcggttcaatcgcctacctcttcttcacaaaccgccatgaagttaggaagatgacattggatagatccgaatacactagtctaattcctaacctacggaatgtggtggcattagacacagaagttgcaagtaatcgcatctactggtccgacctgtcacagcgcatgatttgtagcacacaactcgatcgtgcccatggtgtgagtagttacgacacagtgatctctagggatattcaggcacctgatggcttggccgtggattggatacacagtaacatttactggactgacagtgttcttggaactgtttctgtggccgacacgaagggcgtcaaacggaagacgctgtttcgggagaatggcagcaaacctcgcgccattgtggttgatcccgtgcacggattcatgtactggactgactggggcaccccggcaaaaattaagaaaggggggttgaatggagttgacatctactctttggttacggagaatatccaatggcccaatggtattactctagatctgttaagtggacgactgtactgggtggactccaagttgcactctatttcctccatcgacgtgaatggtggcaacaggaagactatactagaggatgagaagagactcgcccatcctttctccctcgccgtattcgaggataaggtcttttggacggacattatcaatgaggctattttctctgctaaccgtctcacaggctccgatgtgaacctgctagctgaaaacctgctgtctccagaggatatggtgcttttccataacctgacgcagcctcgaggggttaactggtgtgaaagaactaccctctcgaacgggggttgtcagtatctctgtctccctgccccgcaaattaatcctcattctcccaagtttacctgcgcttgccctgacggtatgctactcgcccgcgacatgcgttcttgccttactgaggcagaagccgctgttgccacccaggagacctccacagtgcggttgaaggtaagtagcacagcggtgcgaactcagcacaccacaacacggccagtcccagatacatctcgcttacccggcgctacccctggacttaccacagtggagatcgtgactatgagccaccaggccttgggggacgtcgccggcagagggaatgaaaagaagccttcgtctgtccgagccctgtctatagtgctgcccattgtgctgttggtgtttctctgtctgggagtgttcctgttgtggaaaaactggcggctaaaaaacattaattccatcaactttgacaatccagtataccagaagaccaccgaggatgaagtccacatctgccacaatcaggatgggtactcttacccctcccgccagatggtgtctctcgaagacgacgtcgca

SEQ ID NO: 11484 - DNA, 2580 bp, Artificial Sequence
  derived and/or modified sequence
atgggcccctggggctggaaactgcggtggacagtcgccctcttactcgccgctgctggtacagctgtgggtgatagatgtgaacgaaatgagttccagtgtcaggacgggaaatgtatctcctacaagtgggtctgtgacggctctgcagagtgtcaggatggaagcgacgagtcccaagaaacttgcctgagcgtcacatgcaagtccggcgactttagttgcggaggtcgcgttaatcggtgcattcctcagttttggagatgcgacggacaggtggattgcgacaatggctcggatgagcagggctgtcctcccaaaacctgttcccaagacgaattccgctgccacgatggtaagtgcatcagcaggcagtttgtttgcgatagtgaccgcgattgcctcgacggatcagacgaagctagctgtcctgtcctgacatgtggacctgcatcattccagtgtaacagttctacttgcattccccagctctgggcgtgtgataatgacccggactgcgaggatggcagcgatgaatggccacagcgttgccgtggtctttatgtttttcaaggggacagctcgccttgttcagccttcgaattccattgtttatccggagaatgtattcactccagttggcggtgtgacggaggccctgattgtaaagataaaagtgacgaggagaactgcgccgtggccacttgccgccctgacgaattccagtgctctgatgggaattgtatccatggaagtagacagtgcgaccgagagtacgactgtaaagatatgtcagacgaggtggggtgcgtgaatgtgaccttgtgcgaggggcctaataaatttaagtgtcactcaggtgaatgcatcacactggacaaggtctgtaatatggcccgggactgtcgtgactggtccgatgaaccaattaaggaatgcggcaccgccgcctgtttggacaataacggaggatgctcgcatgtctgtaacgcccttaaaataggggccgaatgcctctgtccagatggtttccaactagttgctcagagacgatgtgaagacatagatgagtgtcaggaccccgatacttgttcgcaattgtgtgtcaacttggaaggaggctacaaatgccagtgtgaagaggggtttcagttagatcctcataccaaggcctgtaaagcagtaggatctattgcctatctcttctttacaaatcggcacgaggttcgtaaaatgaccctggataggtcagagtataccagcttaatccctaatctcaggaatgtcgtcgctctggacaccgaagttgcaagcaatcgaatctactggagtgacctgtcgcaaagaatgatctgcagcacccagttggaccgcgcacacggggtttcctcctatgacacggttattagtcgcgacatccaggcaccggacggactggccgtggactggattcattcaaatatctactggacagattcagtgttgggcaccgtgagcgttgccgatacgaagggcgtcaaaaggaaaacgctgttcagagagaacggaagtaaacctcgagctatagtcgttgaccctgtacacggctttatgtactggacagattgggggacccctgctaagatcaagaaggggggacttaatggagtcgacatttactccctggttacagagaacatccagtggcctaatgggatcactttagacctccttagcggtaggctgtattgggtggattctaagctgcattctatctctagcatcgatgtgaacggaggcaacaggaaaaccatcttagaagatgaaaagcgcctggcccaccctttttcactcgcagttttcgaagataaagtgttttggaccgacattataaatgaggctattttttccgctaatcggctgaccggtagtgatgtcaatctcctggccgagaatttactcagccccgaagacatggtcctgttccacaacctcacccagccccggggtgtgaactggtgcgaacggactaccttatcgaacggcggttgccagtacctatgcctgcctgccccccagattaatccccactccccgaagttcacctgcgcctgtccggatgggatgctactggcacgagacatgcggtcgtgtcttactgaggctgaggccgccgtagctactcaggagaccagcaccgtaagacttaaagtctcatcaactgcagttagaacccagcacacaacaactcggccagtaccggacacctcgcgactgccgggcgcaacaccggggctgacaaccgtggaaatagtcacaatgtcccatcaggctctgggagatgttgctgggaggggaaatgagaagaagcccagctctgtaagggctctctccatagtactccctatagtgctgttggtcttcctgtgcctgggcgtctttctgctatggaaaaattggcggttgaagaacatcaactctatcaattttgacaatcccgtttaccagaaaacaacggaggacgaggttcatatatgccacaaccaggacggatacagctacccttctagacagatggttagtctggaggacgatgtggcc

SEQ ID NO: 11485 - DNA, 2580 bp, Artificial Sequence
  derived and/or modified sequence
atggggccgtggggatggaaacttagatggaccgttgcattgttgttggcggcggcaggcacagcagtaggggacaggtgtgagcgcaacgagttccagtgtcaggatggaaagtgtatttcatacaaatgggtgtgcgatggaagcgctgagtgccaggacggaagcgacgaaagccaagagacatgcttgagtgtaacatgtaagtccggcgattttagctgcggggggcgcgttaacaggtgcatcccgcaattctggaggtgtgacggccaggtggactgtgataacggtagcgatgagcagggctgcccgcctaagacatgtagccaagacgagtttcggtgtcacgacggaaagtgtatttcaagacaattcgtctgcgattccgacagggattgtctcgacggatctgatgaagccagttgtcctgtcctgacctgcggcccggctagcttccagtgtaatagttctacttgcattccgcagctgtgggcatgcgataatgatccagactgtgaggacggatctgacgaatggcctcaacggtgtagaggcctctacgtatttcaaggtgattcttcaccgtgtagtgcattcgagtttcactgtctgagcggagaatgtatccactcaagctggcgctgcgacggaggtcccgattgtaaggacaaaagtgatgaagaaaactgcgctgtggcgacttgcaggcccgatgagtttcagtgtagcgacgggaactgcatacacggtagccggcaatgcgacagggaatacgattgtaaggatatgtctgatgaagttgggtgtgttaatgtgaccctttgcgagggccccaacaagtttaaatgtcacagcggtgagtgcataaccctggataaagtgtgtaacatggctcgtgattgcagggattggagcgacgagccaattaaagaatgtggcacagcagcatgccttgacaacaacggggggtgcagccacgtgtgcaacgctctgaagattggggcagagtgcctttgtcctgacggcttccaactggttgctcagagaagatgcgaggacattgatgaatgtcaggatcccgacacttgcagtcaactctgcgtcaacctcgagggtggatacaaatgtcaatgcgaggaaggctttcagcttgacccacataccaaggcgtgcaaagctgtgggcagcattgcttacctgtttttcactaaccgccatgaggtgagaaaaatgactctcgatagaagtgagtatacttccttaattcccaatctgcgcaatgtagtagctcttgacactgaagttgctagcaaccgaatctattggtctgatcttagccagaggatgatatgctctactcagctcgaccgggcacatggcgtgagtagttacgataccgttattagtcgagacatccaagctccggacgggctcgctgtggactggattcactcaaacatttattggacagactctgtgctgggcaccgttagtgtagctgataccaaaggagtgaaacgaaaaaccctcttcagggagaacgggtcaaagccacgggctatcgtcgtggatccagttcacggtttcatgtattggaccgattggggaacaccagctaaaattaagaagggaggtctcaatggggtggacatctacagcctcgtcactgagaacattcagtggcccaatggaatcacattggatcttctgagcggtagactctactgggtcgattctaaactgcattccatcagttctatcgatgtgaacggcgggaacagaaaaaccatcttggaggacgaaaaaagacttgcacacccgtttagtcttgccgtttttgaagataaagttttttggaccgacatcataaacgaggcaatcttcagcgcaaataggctaactggatctgacgttaacctgctcgctgaaaaccttctgagcccagaagacatggtgctgttccataacctgacccagccaagaggagtgaattggtgtgaacgtactacactttccaacggcggctgtcagtacttgtgcctgccagcgccccagatcaacccccactcacctaagtttacatgcgcttgtccagacggcatgcttctcgctagagacatgcgcagctgtcttaccgaagccgaggctgccgtggcaacacaagagacctctaccgtaaggctcaaagtctcaagcaccgctgttaggacacagcataccaccacaagacctgttcctgatacttcaaggttgcctggcgccacccctggcctcacaaccgtagaaatcgttaccatgtcccatcaggccctgggcgacgtggccggccggggcaacgagaagaagccctcaagcgtaagggcactgtctatcgtgctgcccatcgtccttctggttttcttgtgtttgggggtcttcctgctttggaaaaactggaggctcaaaaatattaactctattaactttgacaatcccgtgtaccagaagaccacagaagatgaagtgcacatctgtcacaatcaagacggatactcttacccctcaagacaaatggtttctcttgaagacgatgtcgca

SEQ ID NO: 11486 - DNA, 2580 bp, Artificial Sequence
  derived and/or modified sequence
atgggtccctggggctggaaactgcgatggactgtggccctgttgctcgccgctgctgggaccgcagtcggggatcgctgcgagcgaaacgaattccagtgtcaggatggcaaatgtatcagctacaagtgggtgtgtgacggaagcgctgaatgccaggatggatccgacgaaagccaggaaacatgcctttccgtgacttgcaagtcgggtgatttttcttgcgggggcagagttaatcgctgtattccgcaattctggcgatgcgatggccaagtagactgtgataacggcagtgacgagcaggggtgcccccccaaaacctgttcgcaggatgagtttcgatgccatgacgggaagtgtatctcccgccagtttgtgtgtgactccgacagagactgtttggatgggtccgatgaggcctcttgccctgtgcttacgtgcggacccgcgagctttcagtgcaattcgtcaacatgcatcccacagctgtgggcgtgtgataacgaccctgactgcgaagatggctccgacgagtggccacagcggtgtagggggctttacgtgttccaaggcgattcgtccccttgctccgcatttgaattccactgtctgtccggcgaatgtatccactcttcatggaggtgtgacgggggaccagattgcaaggacaaatccgatgaggagaattgtgcggtcgccacctgtcggccagacgagttccagtgttccgacggcaactgcatacacggatctcgccagtgtgatcgcgaatatgattgcaaagatatgtccgacgaggtcggctgcgtaaatgttaccttatgtgaaggtcctaataagttcaagtgtcattctggcgagtgtataaccctggacaaggtctgtaatatggcgagagactgtcgcgattggagcgatgagccaattaaggaatgcggcacagcagcttgtctggacaataatggcggatgtagtcacgtctgcaacgctcttaagataggcgctgagtgtctgtgtcctgacggctttcagttggtggctcagaggcgctgcgaagacatcgatgaatgccaggatcctgacacttgctctcaactgtgcgtgaatctggaggggggttacaagtgtcagtgtgaagagggattccagctggatcctcatacaaaagcttgcaaggctgtgggcagtatcgcctacctcttcttcacaaacagacacgaagtcaggaagatgacactggacaggtctgagtacaccagcctgattcctaaccttcgcaacgtagttgctcttgatacagaggtggctagtaaccgtatctactggtcggatttgtctcagcggatgatctgtagtacccagctcgacagggctcacggagtatccagttacgacacggtgattagtagggacatccaggcacccgacggactcgcagtagactggatacactccaatatttattggaccgactctgtcttggggacagtttcagtggcagacacaaagggggtcaaacggaaaacacttttccgggaaaacggctcaaagccgcgggctattgttgtcgatcccgtccacggctttatgtactggaccgactggggcacccctgctaaaataaagaagggaggcttaaatggagtagatatatacagccttgtgaccgaaaatatacaatggcccaacggtatcaccctggatttgctgagcggtaggctctactgggtcgactcgaaactccatagtatctctagtattgacgtgaatggcgggaacaggaaaactatcctggaagacgagaagcgcctcgcccatcctttctccctagctgtgttcgaagacaaagtattctggacagacattataaatgaggcaatcttctcggccaatcgccttactggctctgacgtgaaccttctggccgagaacctactgagccctgaagacatggtcctgtttcacaacctcactcagccacggggcgtgaactggtgcgaacgtactaccctgtctaacggaggatgtcagtatctgtgtttgcctgcacctcagattaatccacacagcccaaaattcacatgcgcttgcccagatggcatgcttctggcacgggacatgcgttcttgtcttactgaggctgaagctgccgttgccactcaagagacttctactgtgaggctaaaagtttcctccaccgccgtccggacccaacacacaaccactcgtccagtacctgacactagtcgactcccaggggctacgccaggcctgacaaccgtagaaattgtgacaatgtctcatcaagctcttggcgatgtagctggtcgtggcaacgaaaaaaaaccctcctccgtgcgagctttgtccatcgtactccctattgtcctcctggtgtttctttgtctaggggtctttctgctgtggaagaattggcgtctgaagaacatcaattcaataaactttgacaaccccgtgtatcagaagaccacggaagacgaggtccacatctgtcacaaccaggacggctatagctatccttcccgacagatggtgtcacttgaggacgacgttgct

SEQ ID NO: 11487 - DNA, 2580 bp, Artificial Sequence
  derived and/or modified sequence
atggggccctggggatggaaacttcggtggacagtggctcttctactcgctgccgctgggacagcagtgggagatcgatgtgaacgaaacgaatttcagtgtcaggatgggaagtgtatttcctataaatgggtgtgtgatggatctgccgaatgtcaggacgggtccgacgaatcccaggaaacatgtcttagtgtgacttgtaaaagtggggatttttcctgtggggggagggtgaacaggtgtatccctcagttctggcggtgtgatggacaggttgattgtgataatggatcagacgagcaggggtgtccacccaagacatgcagtcaggatgaatttaggtgtcatgatgggaaatgcatatcccggcagttcgtatgcgactcagatcgggattgtttggacgggtcagatgaggcttcctgcccagtgctgacttgtggacccgcatcatttcagtgtaattcctctacttgtatccctcagctctgggcctgcgataacgaccccgactgcgaagacgggtctgatgaatggcctcagagatgtagggggctctatgtgttccagggggatagttcaccttgtagtgctttcgagttccattgtcttagtggggaatgtatccactccagttggcggtgtgatgggggacctgattgtaaagataaaagtgatgaagaaaattgcgccgttgccacttgccgcccggatgagttccagtgtagtgatggaaattgtattcatggatccaggcaatgcgatcgcgagtatgattgtaaagatatgtccgatgaagtgggatgcgttaacgtcacactgtgtgaagggcccaataagtttaaatgccatagtggggaatgcataactttagacaaagtatgtaacatggcacgggattgccgggactggtccgatgagccaattaaagaatgcggaacagccgcctgtctcgataacaatggggggtgctcccacgtgtgcaatgccctgaaaataggagcagaatgcctctgcccagatggatttcagctagtcgcacagcgaaggtgtgaagatatagatgaatgtcaagaccctgatacttgttctcagctctgcgttaatttggaagggggatataaatgccagtgcgaagaaggatttcaactagatccccacactaaagcatgcaaagctgtggggtctatcgcttacctcttttttacaaaccgacacgaagtgcgcaagatgactctagatagatccgaatatacaagtctcatcccaaatctccgaaacgtggtggccctggatactgaagtggcatcaaatcggatctattggtctgatctctctcagagaatgatttgttctacacaactagatcgagcacatggagtgtcatcttacgatacagtgatctctcgagatattcaggcacccgatgggctagccgtggattggatacatagtaacatatattggactgattcagtgcttgggactgtatctgttgcagatactaaaggagtgaaaaggaagactctgtttagggaaaacggaagtaagcctagagccatcgtagtggaccccgttcacggatttatgtattggacagactgggggactcctgctaaaatcaaaaagggagggctgaacggggtcgacatatacagtttagtaacagaaaatatccagtggccaaatggaataactctagatctactgagtgggcggctttattgggtcgattctaaattgcactccattagttctattgatgtcaatggagggaatcgaaagactatcctggaggacgagaaacgacttgcccatccattttctctggccgtatttgaagataaagtgttctggacagatatcattaacgaggctattttttctgctaacagattaactggatccgatgtcaatctcctggccgagaacctcctgtcccccgaagatatggtgttgtttcacaacctcacacaaccaagaggagtgaattggtgtgaacgaacaacactttccaatggggggtgtcagtatctgtgtttgcctgctccacaaatcaacccccactctccgaagttcacttgcgcctgccccgatgggatgctcttagcacgcgacatgagatcttgtctcactgaagcagaggcagccgtggcaactcaggaaactagtacagtacggttaaaagtgtcttcaacagccgttagaacacagcacactactacacgccctgtgccagatacttccagactgcctggggccactccaggactgactacagtggaaattgtgactatgtcccaccaggctcttggagatgtcgccggacgcgggaacgagaaaaaaccctcgtctgtaagggccctatccatagttctccctatcgtgctgctggtatttttatgcctaggggtttttctcctttggaaaaactggcggcttaaaaacataaactccatcaactttgacaatcctgtgtatcagaaaacaacggaagatgaggtgcacatatgtcataaccaggatgggtactcctatccctcgcggcagatggtgagtctggaagatgatgtcgct

SEQ ID NO: 11488 - DNA, 2580 bp, Artificial Sequence
  derived and/or modified sequence
atgggaccatggggctggaaactgaggtggactgtggcgctcctgctggccgctgcgggaactgcggtcggagacagatgcgaacgcaatgaattccagtgccaggacggaaagtgcattagctacaaatgggtgtgcgacggatcagccgaatgccaggacggcagcgacgagtcacaggaaacctgcctctccgtgacgtgtaaatccggggatttctcgtgcggcggccgcgtgaatagatgcatcccgcagttctggaggtgcgatggacaggtcgattgcgacaatggatcggatgagcaaggttgtccgccgaaaacctgctcgcaggacgagttccggtgtcatgatgggaagtgcatcagcaggcagtttgtctgcgatagcgaccgcgattgtctggatggaagcgacgaggcgtcatgtcctgtgctcacgtgtggcccggcctcgttccagtgtaactcctcgacctgcataccgcaactgtgggcgtgcgataacgacccggactgcgaagatggatcggacgaatggccccaacggtgccggggactctacgtctttcagggagactcgtcaccatgttcggctttcgaatttcattgcctgagcggtgaatgcatccactcttcgtggcggtgcgatggagggcctgattgtaaggacaagagcgacgaggagaactgtgccgtggctacctgtcggccggacgagtttcagtgctcggatggcaattgcattcacggaagccgccagtgcgatcgggagtacgattgcaaggatatgtcggacgaagtgggatgcgtgaacgtgactttgtgcgaaggccccaataagtttaagtgccatagtggtgagtgtatcacgctggacaaagtgtgtaatatggcaagggactgtcgtgattggagcgacgagccaatcaaggagtgcggaactgccgcgtgtctggataacaacggtgggtgcagtcacgtgtgcaatgctctcaagattggcgccgaatgcctgtgcccagatgggttccagctggtcgctcaacggagatgcgaagatattgatgagtgtcaagatcctgacacttgctcgcagctctgcgtgaaccttgagggagggtacaaatgccaatgcgaggagggatttcagctggatccgcacaccaaagcgtgcaaagctgtgggatcgatcgcatacttgtttttcactaataggcatgaagtccgcaagatgaccctcgaccgctccgaatacactagcctgatcccgaacctgcgcaacgtggtcgcgctcgacactgaggttgcctctaacagaatctattggagcgacctttcacagcgcatgatctgttccactcagttggaccgggcccacggagtcagctcttacgatactgtcatctcgcgggatatccaggccccggacggactcgcggtggattggatccactcgaacatctattggacggattcggtgctggggaccgtctcggtggccgacaccaagggagtgaagagaaagaccttgtttcgcgagaatggctcgaagcctcgcgccatcgttgtggacccggtgcacggatttatgtactggacggactggggaactccggcgaagatcaaaaagggcggactgaatggtgtggatatctacagcctggtgactgaaaacatccagtggccgaacggtatcactctggatctcttgtcgggacggctttactgggtcgattccaagttgcattcgatttcgtccatcgacgtcaacggaggtaaccggaaaaccatactcgaggacgaaaaaagacttgcccacccgttctcactggccgtgtttgaggataaggtgttctggaccgacatcatcaacgaagccatcttctccgccaatcgcctgactgggagcgacgtgaacctgctggcggagaacctcttgagtccggaagatatggtgctgttccataacctgacgcaaccgcgcggagtcaactggtgtgagcgcaccactctctccaatggaggctgccagtacctgtgcctcccagcaccgcaaatcaatcctcattcgccgaaattcacctgtgcatgcccggacggtatgctgctggcccgggacatgcgctcgtgcctcactgaggcagaggcagctgttgctacccaggagacttccaccgtccgactcaaggtgtcatccactgcagtgaggacccagcacaccaccacccggcctgtcccggacacgtcgaggctgcccggagcgaccccgggtctgaccaccgtggaaatcgtgactatgtcccaccaggcgctgggagatgtggcaggtcgcggcaacgaaaagaagccttcctcggtgcgtgccctgagcattgtgctgcccatcgtgctcctcgtgtttttgtgcttgggagtgttccttctgtggaagaattggcgcctgaagaacatcaattcgatcaattttgacaacccagtgtaccaaaagacgacggaagatgaagtgcacatctgccacaaccaggacggatacagctacccttcccggcagatggtgtcgctggaggacgatgtcgca

SEQ ID NO: 11489 - DNA, 2580 bp, Artificial Sequence
  derived and/or modified sequence
atgggcccgtggggctggaagctgagatggaccgtggctctgctcctggcagccgcgggtactgcggtgggggaccgctgcgagagaaatgaatttcaatgccaagatggcaagtgtatctcgtacaagtgggtgtgcgatggatcggcggaatgtcaggacgggtcggatgaatcacaggaaacctgcctgtctgtgacctgcaaatccggagatttttcatgcgggggacgcgtgaaccgctgcatcccgcaattctggagatgtgacgggcaggtggactgcgacaacggaagcgatgagcagggttgcccgccaaagacctgctcgcaggatgaattccggtgccatgacgggaaatgtatctcacgccagttcgtgtgcgacagcgatagagattgcctcgacggcagcgatgaggcaagctgtcctgtgctgacttgcggaccggcctcattccagtgcaacagctccacctgcatccctcaattgtgggcctgcgacaatgacccagactgtgaagatggatcagacgaatggccgcaacgctgtagagggctgtacgtgtttcaaggagacagctccccatgctcggcgttcgaattccattgcctgtcgggagaatgcattcactcgtcgtggcggtgcgacggaggaccggactgcaaagacaaatcagacgaggaaaattgcgccgtcgcaacttgtcgcccagacgaattccaatgcagcgatggcaactgcattcatggctctcggcagtgcgaccgcgaatatgactgcaaggacatgagcgatgaagtgggctgcgtcaacgtgactctctgcgaaggaccgaataagtttaagtgccatagcggcgagtgtataactttggacaaggtctgcaacatggcccgcgactgccgagactggtctgacgagccgatcaaggagtgcggaactgcggcttgcttggacaacaatggcggatgcagtcacgtctgcaatgcgctgaaaataggcgcggagtgcctgtgtccggacggctttcagctcgtggcacagcgccgctgcgaagatatcgacgaatgtcaggatccggacacctgcagccagctttgcgtcaatctggaaggaggatacaagtgccagtgcgaggagggcttccagctggacccgcacactaaggcttgcaaagcagtaggatccattgcatacctcttctttaccaataggcatgaagtgcgaaagatgactctggatcggagcgaatacacctcccttatcccaaatctgcggaatgtggtggccctggacaccgaagtggcgagcaacagaatctattggagcgacctgtcgcagaggatgatctgcagcacccaattggatcgcgcccatggagtgtcctcgtacgataccgtgatcagccgcgatatccaggctccagatggattggctgtggactggatccactcgaacatttactggaccgactctgtgcttggcactgtgagtgtcgcggacaccaagggggtcaagcgcaagacgctgtttcgggagaatggaagcaagcctcgtgcgatcgtcgtggacccggtccacggttttatgtactggacggactggggaactccggccaagatcaaaaagggcgggctcaacggagtcgacatttactctctggtcactgagaatatccaatggccaaatggaatcactctcgatctgctgtcaggacggttgtactgggtcgattccaagctgcactcgatctcgtcaatcgatgtgaacggaggaaacagaaaaaccatcttggaggacgaaaaacgactggcccacccattcagcttggccgtctttgaggataaagtcttttggaccgatatcatcaacgaggccattttcagcgcgaaccgactcactggtagcgacgtgaacctccttgcggagaatctcctctcgcctgaggatatggtcctgtttcataatctgactcagccgcggggcgtgaattggtgtgagagaaccaccctttccaacggaggatgccagtacctgtgtctgcctgctccgcaaatcaatccacactcgcccaagtttacctgcgcctgtccggatggaatgttgcttgcgagggatatgcgctcatgcctgaccgaagcagaagccgcagtcgctacccaggaaacctccacggtccggttgaaggtgtcctcaactgccgtgaggacccagcacaccaccacgaggcctgtgccagacacctcccgccttccgggagctactcccggactgactaccgtggagattgtcaccatgtcccaccaggccctcggggatgtggctggtcggggaaacgagaaaaaaccttcctcagtgagagccctgtcgattgtcctccctattgtgctgctggtgttcctctgcctgggcgtgttcctgttgtggaaaaactggcgcctgaagaacatcaactccattaacttcgataaccccgtgtaccagaaaacgactgaggacgaagtgcatatttgccataaccaggatggctactcatacccgtcaagacaaatggtgagcctcgaggacgacgtggcc

SEQ ID NO: 11490 - DNA, 2580 bp, Artificial Sequence
  derived and/or modified sequence
atgggcccttggggatggaagctcagatggacagttgccttacttctggccgctgccggaactgccgtcggagacagatgcgaacggaacgaatttcagtgccaagatggcaaatgtatttcttacaagtgggtgtgtgatgggagcgcggaatgccaagatggctctgatgagtctcaggaaacctgcctgtcagttacctgcaaaagtggtgatttcagctgtggcgggagagttaataggtgtattccccaattttggaggtgcgatgggcaggttgattgcgacaacgggtctgacgagcaaggttgccctccgaagacctgtagtcaagacgaatttagatgccatgatgggaaatgcatatcccgacaatttgtttgcgatagcgaccgagactgcctggatggtagtgatgaagcttcttgccccgtcctcacctgcgggccagcatcctttcagtgtaatagtagtacctgtatccctcaactgtgggcatgcgataacgacccggactgcgaggacggtagtgacgagtggccccagagatgcagaggactctatgtgtttcagggagattcatccccctgcagtgcatttgaatttcactgcctgtcaggtgaatgcatccacagctcatggcggtgcgatggcggcccagattgtaaggacaagtccgacgaagaaaactgtgctgttgccacctgcagaccagacgaattccagtgctcggatgggaattgtatacacgggtccaggcaatgcgacagggagtatgactgcaaggatatgtctgacgaggtcggttgtgtgaatgtgacactgtgtgaggggccaaacaaattcaagtgccatagtggggagtgcatcacgttggacaaggtttgcaacatggccagggactgtagagactggtccgacgaaccaattaaagaatgtggaacggccgcttgtttggataacaatggagggtgctcacatgtgtgcaatgcacttaaaattggggccgagtgtctgtgccccgacgggttccaactagttgctcagcgcagatgcgaggacatagatgaatgccaggaccccgacacctgttcacagctgtgtgtaaacctggaaggaggctataagtgccagtgcgaggagggctttcagctggatccccacacgaaagcctgtaaggcagttggcagcatcgcttatctgttttttactaacagacacgaggtgagaaagatgactctcgacaggagcgaatacacttcattgatcccaaatttgcggaacgtagtggcactggatacggaggtagccagtaaccgaatctattggagcgacctctcccagcgaatgatttgtagtacccagcttgatagggctcacggcgtgtctagctacgataccgttattagcagagatattcaggcccccgatggcctagcagtagattggatccactccaatatttactggacagacagcgtcttgggaactgtatccgtggccgacacaaaaggagttaagcgaaaaacgttgtttagagagaacggatccaaacccagagccatcgtcgtggatcctgttcatggcttcatgtactggaccgactggggcacacccgccaagataaaaaagggaggtctgaatggcgtggacatttattctttagtcaccgagaacatccagtggcctaacggtatcactctggatttgctgtctggacgactctattgggtggattcaaagctgcatagtatctccagtatagatgtcaatggaggaaacagaaagacaatacttgaagatgagaagaggctggcgcacccattttccctggcagtcttcgaggacaaggtcttctggacagacattattaatgaggcgatattctcagcgaaccgactgacgggtagcgacgtgaaccttctcgcggagaacctcctgagcccggaagatatggtgctgttccataatttaacacaaccaaggggagtgaattggtgcgaacgtacaacactcagcaacggcggatgtcagtacctgtgtttacccgccccacagataaaccctcactcccccaaatttacgtgtgcctgccctgatggcatgctgctcgcccgtgacatgcgtagctgtctaaccgaagccgaggctgcagtggcgacccaagagaccagtaccgtcagactcaaagtctcctcgactgctgtccgaacacagcacacaactacccgaccagtgcctgatactagcagacttcccggcgccaccccaggcctcactacagttgaaatagtgacaatgagccatcaggcattgggggacgtagcaggacggggcaacgagaaaaaaccttcatcggtcagagctctatctattgtcttaccgatagtgcttctggtgttcctgtgccttggcgtatttctgctttggaaaaattggagactgaagaatataaactctatcaacttcgacaatccagtctatcagaaaaccaccgaagatgaggtgcacatttgccacaatcaggatggatacagttacccctccaggcaaatggtgtctcttgaggacgatgtcgcc

SEQ ID NO: 11491 - DNA, 2580 bp, Artificial Sequence
  derived and/or modified sequence
atggggccttggggatggaagctgcgatggaccgtcgccttgctgcttgccgccgccggcactgctgtaggagataggtgtgagcgaaatgaatttcaatgtcaggacggcaagtgcattagttataagtgggtctgcgatggaagcgcagagtgtcaagacgggtccgatgagtcccaggaaacttgtctctcagttacctgtaaatctggggactttagctgtggaggcagagtaaaccgctgtattcctcagttctggcgctgtgacggccaggttgattgcgataacggatccgacgagcaggggtgcccaccaaaaacctgctctcaggatgagttccgctgtcacgacggtaagtgcatatctaggcagtttgtatgtgattctgatagggactgtctggatggatcagatgaggcaagttgcccagttctcacctgcggaccagcttctttccagtgcaactcctcgacctgtataccccagttgtgggcctgcgacaatgatccagactgcgaggacggtagtgatgaatggccgcagcgatgtcgcggtctctacgtgttccaaggggactctagcccttgtagcgccttcgagttccattgccttagtggagaatgcatccactccagttggaggtgcgacggcgggccagattgcaaggataaatctgatgaagaaaattgtgccgtggccacctgcagacctgacgagtttcaatgctctgatggaaattgtatccatggcagcaggcagtgcgaccgtgaatatgattgcaaggacatgagtgatgaagtggggtgtgtgaacgtgaccttgtgtgaaggacccaacaagtttaaatgccattcaggagagtgtatcacgcttgataaggtgtgcaacatggcgcgggactgcagagactggtccgatgaaccaatcaaggagtgtgggacagcggcctgcctggacaataacggcgggtgctcacacgtgtgtaacgccttaaagataggtgctgaatgcctgtgtccggatggtttccaactggtggcccagcggaggtgcgaggatattgacgagtgccaggatcccgacacctgcagtcagttgtgcgtcaacctggaaggcggctataagtgccagtgcgaggaggggttccagttggacccacacacaaaagcttgcaaagctgttgggagtattgcctatctctttttcaccaatcgccatgaggtacggaagatgacactggacaggagcgaatacacgagtctgatcccaaatctgaggaatgtggtggcattggataccgaggtggccagcaatcggatctactggtctgatctgagccagcgcatgatttgttcgacacaactagatcgagcccacggtgtgagctcctacgacacagtgatcagcagggacatccaggcacccgatggacttgccgttgattggatccattctaatatttattggaccgattccgtgctaggcaccgtgagcgtcgcggacaccaaaggcgtgaaaaggaaaaccctgtttcgcgagaatggaagcaaaccacgggccatagtcgtggatcccgtacacggctttatgtattggactgactggggtacccccgccaaaatcaaaaagggaggcctgaatggtgtggacatttactctttggtgaccgagaatatccagtggccaaacggtattacactggatctgctgagcgggaggctgtattgggtagacagtaagctgcacagtatcagcagtattgatgtgaatggggggaacagaaagaccattctggaagacgaaaagaggcttgctcatccgtttagtctggctgtgtttgaagacaaggtgttttggactgatatcatcaacgaagccatcttttcagccaacagacttaccggcagcgacgtgaacctcttggccgagaacttactgagccctgaggatatggtgctattccataacctgacccaaccacgtggggtgaattggtgtgaacggacaactctgagcaatggagggtgccagtacctgtgcctccccgctccccaaattaatccccatagtcctaagttcacttgtgcctgccctgatggaatgcttctggctagagatatgcgctcctgtttgacggaagctgaggcagccgtagctacccaggaaacctctacagtgagacttaaggtgtcatccactgcagtgcgtacccagcacacaactactcgtcccgtgccagatactagcagactgcccggcgccacacctggtctcacaactgtagagattgtgactatgtcccatcaagccctcggtgacgtggcaggccgcggaaatgagaagaaaccctcttctgtgcgggcactctccattgttctgcccatcgtgctcctggtcttcctgtgcttgggcgtgttcctgttatggaagaactggcggctcaaaaacatcaactccataaattttgacaatcctgtgtatcaaaagactaccgaagatgaagttcacatctgccacaaccaggatggatactcatacccaagcagacaaatggtatctcttgaagatgatgtggcg

SEQ ID NO: 11492 - DNA, 2580 bp, Artificial Sequence
  derived and/or modified sequence
atgggtccctggggttggaagctgcggtggacggtggcccttctgcttgccgcagcaggaactgcagtgggtgataggtgtgagaggaatgagttccaatgccaggacggaaagtgtatctcgtacaagtgggtgtgcgacggttctgcagagtgtcaggatggctcggatgaatcgcaagagacttgtttgtccgtgacctgtaagtccggagatttcagctgtggtggtcgtgtgaaccgatgtattccacaattttggcgatgcgacggacaggtcgattgtgacaatggaagtgatgaacagggatgtccaccaaaaacctgctctcaagacgagttcagatgtcacgatgggaaatgcatatcaagacaatttgtgtgtgattcggatcgtgactgtctcgatggatcagacgaggcttcctgtcctgtcctcacttgtgggccagcctcgtttcaatgtaactcctcgacctgtattccacagctctgggcctgcgataacgaccccgattgcgaggacggcagcgacgagtggcctcaacggtgtaggggtctttacgtgtttcaaggtgactcctcaccatgctccgcctttgagtttcattgcctttcaggagaatgcattcactcaagctggcgctgtgacggaggacccgattgcaaggacaaatccgacgaagaaaactgtgccgtggcaacttgtcgccccgacgagtttcagtgtagcgacggtaattgtattcatggttcgcggcagtgtgatcgtgaatatgactgcaaggatatgtctgatgaagtgggatgtgtcaatgtgactctgtgcgaagggccaaacaagttcaaatgtcattccggggaatgtataactctggataaggtgtgcaacatggctcgggactgccgggattggtcggatgaacctatcaaggagtgcggtactgcggcatgtctcgacaacaacggaggctgtagtcacgtctgtaatgctcttaagataggagccgaatgcctttgtcctgatggattccaactggtcgcccaacgtaggtgtgaagatatcgatgagtgccaggaccccgatacttgttcccaactttgcgttaaccttgaaggaggatacaagtgtcagtgtgaagagggatttcaattggatcctcacaccaaggcttgtaaagcggtgggttccattgcgtaccttttctttaccaaccgccatgaggtgcgcaagatgacccttgaccgttccgaatacacttccctcatccctaacttgaggaatgtagtggccctggacacggaggtggcgtccaatcgcatttactggagcgatctttcacagagaatgatttgctccacccaactcgacagagcacatggagtctcctcgtacgatactgtgatttcgagagacattcaggcacctgacggcctggccgtggactggattcattccaacatctactggacggactctgtcctggggactgtctccgtggccgatacgaagggagtgaagcggaaaaccctctttcgtgaaaatggctcaaagccacgcgccattgttgtcgaccctgtccacggctttatgtactggaccgactggggtaccccggcaaagataaagaaaggcgggctgaatggcgtggatatctactcgctggtcactgaaaacatccagtggcctaacggaattaccttggatctgcttagcggacggctttactgggtggatagcaagctccattccattagtagcatcgatgtgaacgggggcaatcgtaagaccattttggaagatgagaagcgtcttgcgcatcctttcagccttgcagtgttcgaagataaagtgttttggaccgatatcataaatgaggcgatcttttcagcaaatagattgactggatcggatgtgaacctgctcgcagagaacctgctctcgccagaagatatggtgctgttccacaaccttacccagccgaggggcgtcaactggtgtgagcgtactaccctgtcgaacggaggctgccagtacttgtgtctgccagcaccccagattaaccctcattcaccaaaattcacttgtgcgtgccccgatggtatgctcttggctagagatatgaggtcatgtcttaccgaagcagaagcagcggtggccacccaagaaacctcaaccgtcagactgaaagtgtcctccaccgccgtgcgcacccagcatactactactagacctgtccccgatacctcacgccttcccggtgcgaccccaggattgaccactgtggaaatcgtgaccatgtcgcaccaagcgctgggtgatgtggcaggacggggaaatgaaaagaagccgtcctccgtgcgcgccttgagcatagtgcttccaattgtgctcctggtgtttctgtgccttggagtgtttctgctgtggaagaactggcgccttaagaatatcaatagcataaacttcgataacccagtctaccagaaaactacggaggacgaggttcacatctgtcataaccaggacggatactcatatccttcgcgacaaatggtgtccctggaggacgatgtcgct

SEQ ID NO: 11493 - DNA, 2580 bp, Artificial Sequence
  derived and/or modified sequence
atgggaccttggggttggaagctgaggtggactgttgctctcctgttggccgctgccggaaccgcggtgggcgaccgctgcgaaaggaacgagttccagtgccaggacggaaagtgtatcagctacaagtgggtctgcgacggatccgctgaatgccaggatggcagcgatgaatcgcaggagacttgtctctccgttacttgcaagtcgggagatttctcatgcggaggtcgggtgaatcggtgcataccgcaattttggcgctgcgacggacaggtggattgcgacaacggatctgatgaacaggggtgcccgccgaaaacttgcagccaggacgaattcagatgccatgacgggaagtgtatatcccgccaatttgtttgcgactcggaccgagactgcctcgatggctccgacgaggcctcctgtcccgtgttgacttgcggcccggcctcgttccagtgcaatagcagcacttgcattccacaactgtgggcgtgcgacaacgatcccgattgcgaggatggctcagatgaatggccgcaacggtgccgcggactctacgtttttcaaggggattccagcccttgctcagccttcgaattccactgcctgtccggggaatgcatccactcatcctggcggtgtgatgggggacctgactgcaaagataagtccgacgaggaaaattgtgcggtggcgacttgccggccggatgaattccagtgctcagacggtaactgcatccatggttcgcggcagtgcgaccgcgaatatgattgcaaggacatgtcagacgaggtcggttgtgtgaacgtgactctctgtgagggccctaacaaattcaagtgtcactcaggagagtgcattactcttgataaagtgtgcaacatggcacgcgattgtagagactggtccgacgagccgatcaaagagtgcggaaccgctgcttgccttgacaacaacggcggatgttcacatgtgtgtaatgctctgaaaattggggccgagtgcctctgtccagacggattccaattggtggctcagcggcgctgcgaagatatcgacgaatgccaggaccctgacacgtgctcgcaactgtgcgtgaacctggagggaggttacaaatgccagtgcgaagagggattccagctggatccgcatactaaagcctgcaaggccgtcggctcgatcgcctacctgttcttcaccaaccggcatgaggtccggaagatgactctggatcgctcagaatacacctctctcatcccgaatctgcgcaatgtcgttgcactcgacactgaggtggcaagcaatcgcatctactggtcagatttgtcacagcgcatgatctgctcaactcagctcgaccgggcgcacggagtgtccagctacgatacggtcatcagcagggatattcaggcacctgacggactcgccgtggactggatccactcaaatatctactggacggactcggtgctggggactgtgtcagtggcggataccaaaggcgtcaagcgcaagaccttgttccgcgaaaacggatccaagccgcgggctatcgtggtggacccggtgcacggctttatgtactggactgactgggggactccagcgaagatcaaaaagggcggactgaatggcgtggacatctactcgctggtgaccgagaacatccaatggcctaacggaataacgcttgatttgttgtcaggtcgcttgtactgggtcgactcgaagctccattccatctccagcatcgacgtcaatgggggcaatcggaaaaccattctcgaagatgaaaaacgcctggcccacccgttctcgctcgccgtgttcgaggacaaggtgttctggaccgatatcataaacgaggcaattttctccgccaacagactgaccggatctgatgtcaatctcctggcggaaaacctgttgtctccggaagatatggtcctcttccacaacctgacccaaccgcggggggtgaactggtgtgagcggacgactctgagcaacggtggctgccaatacctgtgccttccagccccacagatcaacccccattccccgaagtttacctgtgcctgcccagacggcatgctgctcgcgcgtgatatgcggagctgtctcactgaagccgaggcggcagtcgccactcaagagacttccactgtgcgcttgaaggtgtcgtccactgcggtgagaacgcagcacaccacgacccggcctgtccccgatacctcacgcctgccgggtgccactccaggcctgaccaccgtggaaatcgtcactatgtcccatcaggcactgggggacgtggcgggtcgaggaaacgagaaaaagccatcttcagtgcgcgctctgagtatcgtcctgccgatcgtgctgctggtctttttgtgcctgggagtgttcctgctgtggaagaactggcggctgaaaaacatcaattccatcaatttcgacaatccagtgtatcaaaagaccaccgaggacgaagtgcatatctgtcataaccaggacggatactcgtacccctcgcggcagatggtgtcactcgaagatgacgtggca

SEQ ID NO: 11494 - DNA, 2580 bp, Artificial Sequence
  derived and/or modified sequence
atgggtccttggggttggaaacttcgctggactgttgcactgctcttggcagcagccggcaccgccgtcggggatcggtgtgagagaaacgaattccagtgccaggacggcaagtgcatctcttacaaatgggtctgtgatggatcagccgaatgtcaagacggctccgatgagtcccaagagacttgcctttcggtcacttgtaaatccggtgatttttcatgcgggggtagagtgaatcgttgtataccgcaattttggcgctgtgatggacaggtggattgcgataacggatcggatgaacaagggtgtcctcctaagacctgtagtcaagatgaatttagatgtcatgacggcaagtgtatttcaaggcaatttgtgtgcgattccgaccgagattgtctggacggaagtgatgaagcctcatgtcccgtgctgacgtgcggcccggcatctttccaatgcaattcgtcgacttgcatcccccaattgtgggcatgtgataacgaccctgattgcgaggatggtagcgacgaatggcctcaacggtgtagaggcctgtatgtctttcagggcgactcatcgccctgttcggcctttgaatttcattgtctctcaggagagtgtatccactcctcatggcggtgcgatgggggacctgattgtaaggacaagtccgatgaggagaactgtgcagtggcaacctgtagacctgatgaatttcaatgctcggacgggaattgtatccacggctcaagacaatgtgacagagagtacgactgtaaggatatgtctgatgaagtgggatgcgtcaatgtcactctttgtgaaggaccaaacaagttcaaatgtcactccggagagtgtattaccctggataaggtctgtaacatggcaagggattgtcgagactggtccgatgaaccaataaaggaatgtgggactgccgcgtgtctggataacaacggcggttgttcacacgtgtgtaacgctctgaaaataggtgccgaatgtctctgtcctgatggttttcagcttgtggcccagagaagatgtgaggatatagatgaatgccaagatccggacacctgtagccagctttgtgtgaacctggaaggaggctacaagtgtcaatgtgaggaaggatttcagctcgatccacataccaaggcatgtaaggccgtgggaagcatcgcatacctgtttttcacgaatcgacacgaagtccgaaaaatgactcttgaccgctccgaatacaccagccttattcctaacctgagaaacgtggtggcactggacactgaggtggcatccaaccggatttactggtccgatctgagccagcggatgatctgttcaacccaacttgacagagcacatggtgtgtcatcgtacgatacggtgatttcgagggatatacaggcacctgacggattggccgtcgactggattcatagcaacatttactggactgattctgtgttgggaacggtgtcggtggcggataccaaaggcgtgaagagaaagaccttgtttagagagaatggtagcaagccacgagccatagtcgtcgaccccgtgcatggttttatgtactggaccgattggggcactcccgccaagattaagaagggcggccttaacggggtggatatctatagcctggtgactgaaaacattcaatggccaaacggcatcacccttgatctgctgtcaggacgcctgtactgggtcgatagcaaactgcacagcatttccagcattgacgtcaacggaggtaacagaaaaactatcctggaggacgagaagcgtttggcccatccattctcgctggccgtgtttgaagataaggtgttttggactgatatcatcaatgaggcaatcttctcggctaatagactgacgggaagcgatgtgaacctgcttgcggagaatcttttgtcaccagaagatatggtcctgtttcacaacctcactcaacctagaggagtcaattggtgtgaacgaaccaccctgtccaacggtggttgtcaatacctttgtctcccagctccacagattaacccacattcccccaagtttacttgtgcatgccccgatgggatgctgctggcgcgcgacatgcggtcatgccttactgaagcagaagcagctgtcgcaacccaggaaacttcgaccgtcaggcttaaggtgagctcaactgccgtgagaacccaacataccaccactcggcctgtgcccgatacgtcccggctgcccggtgcaacccctggactgactaccgtggaaatagtcactatgtcgcaccaagcactcggtgacgtcgcaggaaggggtaatgaaaagaagccttccagcgtgagagcactgagcatagtcttgccaatagtgctgctggtgtttctttgtctgggagtctttctcctctggaagaattggaggcttaagaacattaactcgattaacttcgacaatcctgtgtaccaaaaaaccaccgaggatgaggtccacatctgccacaaccaagacggctactcgtacccctcgagacagatggtgtccctggaagatgacgtggca

SEQ ID NO: 11495 - DNA, 2580 bp, Artificial Sequence
  derived and/or modified sequence
atggggccatgggggtggaagctcaggtggaccgtcgccctgctgctagctgcagctgggaccgccgtgggtgatagatgcgaaaggaatgagtttcagtgccaggatggcaaatgcatctcctacaagtgggtgtgtgacggctctgctgagtgccaagacggaagcgacgaatctcaggaaacctgcctatccgttacttgcaagtctggtgatttctcctgcggcgggcgcgttaaccgctgtatcccacaattctggcggtgtgatggccaggttgattgtgataacggcagcgacgaacaggggtgccctcctaagacctgctcccaggatgagttcagatgtcacgatggcaagtgtataagcaggcaattcgtgtgtgactctgatcgtgactgtttggatggatctgatgaggcctcttgcccagtgctaacctgtggacccgcttctttccagtgcaattcctctacctgcatcccccagctgtgggcttgcgataatgatccagattgcgaggacgggagcgacgaatggcctcagcgatgtaggggcctgtacgtgttccagggagattcctccccttgctctgctttcgagtttcattgtctgtctggggagtgcatacatagttcctggcgctgcgatggcggaccagattgcaaggacaagtccgacgaggagaattgcgctgttgctacctgccggcctgatgaattccaatgtagcgatggcaattgtatccatggaagtcgccagtgtgacagggagtacgactgcaaggatatgtctgatgaggtggggtgcgtgaacgtgacactgtgcgaaggccccaataagttcaaatgccattcaggcgagtgcattaccctggacaaagtgtgcaatatggcaagggactgccgtgactggagtgacgaacccatcaaggagtgcggcaccgctgcctgtctggacaacaacggcggatgtagtcacgtctgcaatgccctgaaaatcggcgccgagtgtctatgccccgatggatttcagttggtcgcacaaagacgatgcgaagacattgatgagtgtcaagatcctgatacctgcagccagctctgcgttaatctggaaggcggatacaagtgtcagtgcgaagagggcttccagctggatccccatacaaaggcctgcaaagccgtgggctccatcgcctacctgttctttacaaatcgacatgaagtgcgtaaaatgaccctggatcgcagtgagtatacctctttgatacctaacttacgtaatgtagtggctctggataccgaggtggccagtaatcgcatctactggagcgatctcagccaacggatgatttgttcaacccaactggatagagctcacggcgtctcatcttacgatactgtgatatcccgggacatccaggcacccgacggcctcgcagttgactggatccacagtaatatatactggaccgactcagtactgggtaccgtgtctgtggccgacacaaagggtgtgaaaaggaagactttattcagagaaaacggttctaaaccacgcgctattgtggtagatccagtgcatggcttcatgtactggaccgattggggcacccccgccaagatcaagaaaggcggcttaaatggcgtggacatttatagtctcgtgaccgagaacatacagtggcctaatgggattaccctagatttactaagcgggaggctgtactgggtggacagtaaactgcattccatctcttctattgacgtcaatggtgggaatcggaaaacaatacttgaagatgaaaagcggctggctcacccctttagcctggcagtttttgaagacaaggtcttttggaccgatatcatcaacgaagctatcttttctgcaaatcggctgaccggctctgacgtgaatttactggccgagaatctgttgtcccccgaagacatggtgctgtttcacaatcttactcagccccgtggtgttaactggtgtgagaggaccaccctcagcaatggcgggtgtcagtacctctgcctgcccgcacctcaaatcaaccctcattcaccaaagtttacctgcgcatgtcccgacggaatgctactggcaagagatatgcggagttgcctgactgaagccgaggctgctgtggccacccaggaaacctcaaccgtgcgcctgaaggtctcctccactgctgtgagaacacagcacactaccacccgtcccgtgccagataccagccgtctgcctggagccacccctgggttgactaccgtagaaatcgtgaccatgtcccatcaggccctgggcgacgttgccggccgcggcaatgagaagaaaccaagcagtgtgagagcactgtccattgttttacccattgtgctactagtgtttctgtgccttggcgtgtttttactttggaagaactggcgccttaagaacataaactctatcaatttcgataacccagtataccaaaaaaccaccgaagacgaggttcatatttgtcacaatcaggacgggtactcctaccccagccgacaaatggtttcactggaggacgatgtggct

SEQ ID NO: 11496 - DNA, 2580 bp, Artificial Sequence
  derived and/or modified sequence
atgggaccatggggatggaagctgaggtggaccgtggcattgctgctggccgccgccgggacggccgtgggtgacagatgcgagagaaacgaattccaatgccaggacggcaagtgcatcagctacaagtgggtgtgcgacggatccgcggaatgccaagatggatcggacgaatcccaagaaacttgtctgtccgtcacctgcaaatcgggagatttttcgtgcggcgggagggttaacagatgcatccctcagttttggcgttgcgacggacaggtcgattgcgacaatgggagcgacgaacaaggctgcccaccgaaaacctgcagtcaggacgagttcagatgccacgacggaaagtgcatctcgcgccagttcgtgtgtgacagcgaccgcgactgcctcgacgggtccgatgaggcgagctgtccagtccttacctgcggaccggcctcgttccagtgcaactccagtacgtgcattccccagctttgggcgtgtgacaacgaccctgactgtgaggacggctcggatgagtggccccagaggtgccggggcctctatgtctttcagggagattcgtcaccgtgttcggccttcgaattccattgtctgtcgggcgagtgcatccactcgtcgtggcggtgtgatggaggaccagactgcaaggataaatccgatgaagaaaactgcgccgtggcaacgtgtagacctgatgaatttcaatgtagcgatggaaactgtatccacggtagccgccaatgcgacagggagtacgattgtaaggacatgagcgatgaagtggggtgcgtgaatgtaaccctctgcgagggcccgaataagttcaagtgccatagcggggagtgtatcacgcttgacaaggtgtgcaacatggctcgcgactgccgtgactggtccgacgaaccaatcaaggaatgcggcaccgcagcatgcttggacaataacggaggttgcagccatgtgtgtaacgctctgaaaattggcgccgaatgcctttgtccggatggattccaactcgtcgcacagaggaggtgcgaagatatcgacgagtgccaagatcccgatacttgcagccagctctgcgtgaacctcgagggagggtataagtgccagtgtgaggagggttttcaactcgacccgcacactaaagcctgcaaggcagtgggatcgattgcgtacctgttcttcaccaatcgccatgaagtgagaaagatgactctggaccgctcagaatacacctcgctcattccgaatctgagaaatgtggtcgcgttggatacggaagtggccagcaataggatctactggtcagatttgtcgcaacgcatgatctgctccacccagctcgaccgggctcacggagtctcgtcatacgacaccgtgatcagccgcgatatccaggccccggatggcctcgccgtggactggatacactcgaatatctactggactgatagcgttctggggactgtctccgtggccgacactaaaggcgtgaagagaaagaccctgttccgcgagaatggctcgaagccacgcgccatcgtggtcgaccccgttcatggcttcatgtactggactgactgggggactcccgcgaagatcaagaaaggaggtctgaacggggtggacatttactctctggtgacggagaatatccaatggccgaacggcatcaccctcgatttgctgtcgggacggctgtactgggtcgactcgaaacttcactccatcagctcaatcgacgtgaacggaggcaacaggaaaacgatcctggaggacgaaaagcgcttggcacatcctttctcgctggccgtgtttgaagataaggtgttttggaccgacatcattaacgaggccatcttttccgcaaaccgcctgactggatcggacgtgaatctgctggccgaaaatctgctctccccggaagatatggtgctgttccacaatctgacgcaaccccgtggagtgaactggtgtgagcggactaccctgtcaaatggcggatgccagtacctgtgccttccagccccgcagatcaatcctcactcgccgaaattcacctgcgcttgtcctgacggaatgctgctggctcgcgacatgcggtcctgcctcaccgaagcagaagccgctgtggccacccaggagacttccaccgttcgactcaaggtatcgagcaccgcggtccgcacccaacacactactacgcggccagtgccggatactagcagactccctggggcgacgccaggattgactacggtggagattgtcaccatgtcccatcaagcactcggggacgtggctgggaggggtaacgaaaagaaaccatcaagcgtacgggcgctctcgatcgtgttgccgattgtgctcctggttttcctgtgccttggcgtctttctcctttggaaaaactggcggctcaagaacatcaactcaattaacttcgataacccggtgtaccagaaaaccactgaagatgaagttcatatctgccacaaccaggacggatactcttacccctcacggcaaatggtttcgttggaagatgacgtcgcg

SEQ ID NO: 11497 - DNA, 2580 bp, Artificial Sequence
  derived and/or modified sequence
atgggaccttggggttggaagctgaggtggaccgtcgccctgttgctggcagcagcaggcaccgcagtgggcgaccgatgtgaacggaacgagtttcaatgtcaagatgggaagtgcatttcctataagtgggtttgcgatggatcagcggagtgtcaggatggctccgacgaaagccaggaaacctgtctctccgtgacgtgtaaatccggtgactttagttgtggcggaagagtgaacaggtgtataccgcagttctggagatgcgatggacaggtggattgtgataacggaagtgatgaacagggatgcccacctaaaacctgttcccaagatgagtttagatgtcacgacgggaagtgtatttcccgtcagttcgtgtgtgactccgacagagattgtctcgatggaagcgacgaggcatcctgccctgttctcacttgcggcccggccagctttcagtgtaattcaagcacctgcattccccaactgtgggcgtgcgacaacgacccggattgtgaagatggaagcgatgaatggccgcaaagatgtcggggactctacgtctttcaaggcgattcaagcccatgctccgcatttgaattccactgtctgagcggcgaatgtattcattcctcatggcgctgcgacgggggacctgattgcaaggataagtcggacgaagaaaactgtgcagtcgcaacgtgtagaccagatgagtttcaatgctccgacggtaactgtatccatggttcccgtcaatgtgatcgcgaatacgattgtaaggacatgagcgatgaagtagggtgcgtgaatgtgaccctgtgtgaaggtccaaacaagtttaagtgccattcgggtgaatgtattacccttgataaagtgtgcaacatggctcgtgactgccgcgattggtcagatgaacctattaaggaatgtggaaccgcggcttgcctcgacaacaatggcggatgtagccacgtctgcaatgcgctgaaaatcggagcagaatgtctctgtcccgatggcttccagcttgtggcccaacgacggtgcgaggacatagatgagtgtcaagaccccgacacttgttcacagctgtgcgtgaacctcgaaggggggtacaagtgccagtgtgaagaagggtttcaactcgatcctcacaccaaggcgtgtaaggccgtcggttcaatcgcctacttgttctttactaaccgccatgaggtcagaaaaatgacccttgatagatccgaatacacttcacttatacccaaccttcgcaacgtggttgcactggatactgaagtggcatcgaaccggatctactggtccgacctgagtcaacgcatgatttgttcgacgcaactcgatcgagcacatggcgtttctagctacgacaccgtcattagccgcgatattcaggctcctgacggcctggcagtggattggattcattcgaacatttactggactgactcggtgcttggaactgtgtcggtggcagatactaagggtgtcaagcgaaagactttgtttcgggaaaacggatcaaagccgagggcaattgtcgttgacccagtccacggatttatgtactggacggattggggaactccagcaaagattaagaaaggtgggcttaatggagtggatatctactcactggtgaccgagaacatccagtggccgaacggtatcactcttgacctgctgtcgggccgtttgtattgggtggactccaaacttcactccatatcgtcaatcgacgtgaatggaggaaaccgtaaaactattttggaggatgagaagaggctggcacatccattttccctcgcagtatttgaagataaggtgttttggacggacatcattaacgaagctattttctctgcaaatcgacttaccggttccgatgtgaatctcttggccgaaaatcttctttcgccagaggatatggtgctgtttcataaccttacccagccccgcggggtcaattggtgtgagcgaaccaccctgtcaaacggcggctgccagtacctgtgccttcctgctcctcagatcaatccgcactctcctaaattcacctgtgcctgtcctgacggaatgttgctcgcccgagacatgagaagttgtctgaccgaggcggaggcagccgttgccactcaagagacttcaacggtccggctgaaagtctcgtcgactgcagtcagaacccaacatactactactcggcccgtgccagacactagccgcctccccggagcgacccctggacttactactgtggaaatcgtgactatgtcgcatcaggcgcttggagacgtggcggggagaggtaacgagaagaagccatcgtcagtccgcgcactcagcatcgtccttccaattgtgcttctggtgtttctttgtctcggcgtgtttctcctgtggaagaattggcgactgaagaatatcaactcgattaacttcgataacccagtgtaccagaaaaccaccgaagatgaagtccatatctgccataatcaagatggttacagctacccttcgagacaaatggtatctctcgaggatgacgtagcc

SEQ ID NO: 11498 - DNA, 2580 bp, Artificial Sequence
  derived and/or modified sequence
atgggaccgtggggatggaaacttagatggactgtggcactgctgcttgcagcggccggaaccgcagtgggtgaccgctgcgaaagaaacgagtttcaatgtcaagacgggaaatgtatttcgtacaaatgggtgtgcgacggctcggcagaatgtcaagatggtagcgacgagagccaagaaacctgtctttcagtgacttgtaagtccggtgacttttcgtgcggcggtagagtgaataggtgtatccctcagttttggcgttgtgatggacaagtcgattgtgataacggtagcgatgaacaaggctgccctccgaaaacttgtagccaggatgaatttcggtgtcatgatggcaaatgcatctcgaggcagttcgtctgtgattccgatcgagattgtcttgacggcagcgacgaggcctcctgtcccgtgcttacttgtgggccagcatcctttcagtgtaactcatccacttgcattccgcagctctgggcttgcgataacgacccagattgcgaggatggatccgatgaatggccacaaagatgtcgcggactttacgtgtttcagggggatagctcgccatgttccgcgtttgagttccattgtctgtcaggggaatgcatacactcgtcttggcggtgcgacggagggccagattgcaaggataagtctgatgaggaaaactgtgccgtcgcaacttgtcgtccagacgaattccagtgctccgacggaaattgtatccacggaagccgccaatgcgacagagagtacgactgtaaggatatgagcgacgaagtgggatgtgtcaatgtgaccctttgtgagggtccaaacaaattcaaatgtcactccggtgaatgtatcactctcgataaggtctgcaacatggcgagggattgccgggattggagcgacgaacccattaaggagtgcggtaccgcggcctgtcttgacaataatggtgggtgctcccatgtgtgcaacgctcttaagatcggtgctgaatgcttgtgtcctgatggcttccagcttgtcgcacaaagaaggtgtgaagatatcgatgaatgtcaggacccggacacctgtagccagctttgtgtgaaccttgagggcgggtacaagtgccaatgtgaagaaggattccagctcgacccgcacaccaaggcatgcaaggcagtgggttcaatcgcgtacctgttctttactaacagacacgaggtccggaagatgaccctcgaccgctcagagtacacctcactgatacctaacctgcgcaacgtggttgcactggatactgaagttgcatcgaaccggatctactggtcggatctgtcgcaacgcatgatttgctcgacccagctcgatcgcgcccacggtgtgagcagctacgataccgtgatttccagagacattcaggcacctgatggactcgccgtggattggatacattccaatatctactggaccgattcagtgcttggcactgtgagcgttgccgataccaagggtgtcaaaagaaagactctgtttcgggagaacggcagcaagcctagggcaattgtggtcgatccagtgcatggattcatgtactggactgattggggcactccagcgaagattaagaaaggagggctgaacggtgtcgatatctatagcctggtgactgagaacattcaatggcctaacggaattacccttgacttgctgtcaggtcgcctgtactgggtggattcgaagctgcattcaatttcgtccattgatgtcaatgggggcaacagaaagaccattctggaggatgaaaagcggcttgcccatccattctcgctggcagtgtttgaagataaggtgttctggactgacattatcaacgaagccatctttagcgccaaccgccttactggctcagatgtgaatttgcttgccgaaaacctcctgtccccagaagatatggtgctgtttcataacctgacccaacctcggggagtgaattggtgtgaaagaactacgctctcaaacggaggctgccaatacctttgtctccctgcgccacagattaatccacattcgcctaaattcacctgtgcctgtcctgacggaatgctcctcgcacgagatatgcggtcctgtcttacggaagcggaagcagcagtggcaacccaagaaacttcgactgtgcggcttaaggtgtcaagcaccgcagtccgaacccaacacactactacccgccccgtgccagacacctctaggctcccgggggctacccctgggcttaccaccgtcgaaatcgtcaccatgagccatcaggcccttggcgatgtcgcgggacgaggtaatgagaagaagccgtcctcggtgagagcgctttccattgtgcttcccatagtcctgttggtctttctttgtctgggcgtgtttctcttgtggaaaaactggcgcctcaaaaacattaactccattaactttgataatccagtgtaccaaaagactacggaagatgaagtgcatatttgccataatcaggacggttacagctacccgtcccggcagatggtcagccttgaggatgacgtcgcg

SEQ ID NO: 11499 - DNA, 2580 bp, Artificial Sequence
  derived and/or modified sequence
atgggtccctggggatggaaacttagatggaccgtggcacttctgctcgcagcagcgggtactgccgtgggagatcgctgtgaacgaaacgaattccagtgtcaagatggtaaatgtatttcttacaagtgggtgtgtgatggctccgccgaatgccaagacggatctgacgagtcgcaagaaacttgtctctccgtcacctgcaagagcggggactttagctgcggaggccgggtgaatcgatgcattcctcaattttggcggtgtgatggacaggtcgactgtgataatggttcggacgaacagggttgcccgcctaaaacgtgtagccaagatgagttcagatgtcatgatgggaaatgtatctcaagacaatttgtgtgtgactcagaccgggactgcctggacggatcggacgaggcatcgtgtcctgtgcttacgtgtggcccagcatccttccaatgtaattcctcgacctgtattccacaactgtgggcatgcgataacgatcctgactgtgaagatggaagcgatgaatggccgcagcggtgccgcggcctttacgtgttccaaggggattcatccccatgtagcgccttcgaatttcattgtctttcaggcgagtgtattcattcaagctggcggtgtgacggaggtcctgactgcaaggacaagtcggatgaggagaactgtgcggtggcaacctgccgaccagacgaattccaatgttccgacggaaactgtatccacggttcccgccagtgtgatagggaatacgattgtaaagatatgagcgacgaagttggatgcgttaacgtgactctttgtgaaggccctaataagtttaagtgccatagcggagaatgtattactctggataaggtgtgtaatatggccagagattgtcgcgactggagcgatgaacctataaaggaatgcggtacggcggcctgtctggacaacaatggtgggtgttctcatgtgtgtaacgccctcaagatcggagcagagtgtctctgccctgatggttttcagctggtggcacaaagacggtgcgaggatatcgacgaatgtcaagaccctgatacctgttcacaactttgcgtgaaccttgaggggggatacaaatgtcaatgtgaagaagggttccagcttgatccccatactaaagcatgtaaggcagtgggttcaatcgcatacctgtttttcaccaataggcatgaggtgcggaagatgacccttgaccgcagcgagtatacttcccttatccctaaccttcggaatgtggtggctctcgatacggaagtggcatctaaccggatttactggtcagatctgtcgcagcggatgatttgttcgactcaactggatagggcacacggggtgagctcctacgatactgttatttcccgcgatatccaggcccctgatggtcttgccgtcgattggattcatagcaatatctactggactgattccgtgcttggtaccgtctccgtggccgatactaagggggtgaagcggaaaaccctttttcgggaaaacggctcgaaaccacgcgctatcgtggtggatccagtccacggttttatgtactggactgactgggggaccccagccaagattaagaaaggaggattgaacggggtcgatatctactcgctggtcaccgaaaacattcaatggccaaatggaattaccttggatcttctgtccggacggctctactgggtggattctaaactgcattcgatatcatcgatagatgtgaatggcggtaatcgaaagactatcctggaagatgaaaagcgactggcacatcccttttcgctcgctgtgttcgaagataaggtgttttggactgatatcattaacgaggccattttcagcgccaacaggctcactggttcagacgttaaccttcttgccgagaatctcttgtcgcctgaggatatggtgctgtttcacaaccttacccagccacgcggtgtcaactggtgcgaaagaaccaccctgtcaaatggaggctgccagtatctttgcctgcctgcccctcagataaaccctcattcccctaagtttacgtgtgcctgcccagatgggatgttgctggcaagagatatgagatcgtgtctgactgaagcagaagctgcggtcgcgacccaggagacttcaactgtgcgactcaaggtgtccagcaccgcggtaaggactcaacataccaccacgcgacccgtcccggatacttcacgactgcccggcgcaactcctgggctgactaccgtggaaattgtgactatgtcccatcaggcgctgggggatgtcgcaggacggggcaacgaaaagaagccttcttcggtgagggcattgtccattgtgcttcctattgtccttcttgtctttctttgtctgggcgtgtttcttctttggaagaactggaggctgaaaaacattaactcgatcaatttcgataaccccgtgtaccaaaagaccactgaggatgaagtgcatatctgccataaccaggatggttactcgtacccaagccgacagatggtcagcctggaggatgacgtggcc

SEQ ID NO: 11500 - DNA, 2580 bp, Artificial Sequence
  derived and/or modified sequence
atgggaccttggggatggaaattaagatggacagttgctttattattagctgcagcaggtactgccgttggtgatagatgtgaacgtaacgaatttcagtgccaagatggtaaatgtatttcatataagtgggtttgtgatggatcagcagaatgtcaagatggatcagatgagtcacaagaaacttgtcttagtgtaacatgtaaatcaggagatttttcttgtggaggtcgtgttaatagatgtattccacaattttggagatgtgatggacaagttgattgtgataatggatctgatgaacaaggttgtccaccaaaaacatgtagccaagacgaattcagatgtcatgatggtaaatgtattagtagacaatttgtttgtgattctgatagagattgtcttgatggaagtgatgaagcaagttgtcctgttcttacttgtggacctgcaagttttcaatgtaattcttcaacatgtattccacaactttgggcatgtgacaatgatcctgattgtgaagacggatcagatgaatggccacaaagatgtagagggttatacgtctttcagggtgatagttcaccatgctcagcttttgaattccattgcttatcaggtgaatgtattcattcttcatggcgatgtgatggaggtccagattgtaaagataaatcagatgaagaaaactgtgctgtagctacatgtcgtccagatgaattccaatgtagtgatggaaattgtatccatggatcaagacaatgtgatagagaatatgattgtaaagacatgtcagatgaagtaggatgtgttaatgttacactttgtgaaggaccaaacaaatttaagtgtcatagtggagaatgtattactcttgataaagtatgtaatatggctagagattgtcgtgattggtccgatgaaccaattaaggaatgtgggacagcagcatgtttagataacaatggtgggtgttcacatgtctgtaatgctcttaaaattggtgccgaatgtctttgtccagatggattccaacttgtagctcagagaagatgtgaagatattgatgaatgtcaagatccagatacttgtagtcaactttgtgttaatcttgaaggaggatataaatgtcaatgtgaagaaggattccaattggatccacatactaaagcttgtaaggcagttggaagtattgcttatcttttttttactaatagacatgaagtaagaaaaatgacattagatcgttcagaatatacaagtttaattccaaatttaagaaatgtagtagcattagatactgaagttgcatcaaatagaatttattggtcagatctttcacaaagaatgatttgttcgacacaattagacagagcacatggagtttctagttatgatactgtaattagtagagatatacaagctccagatggattagcagttgattggattcattctaatatttattggactgactctgtattaggtactgtgagtgttgcagatactaaaggtgttaagagaaaaacattatttagagaaaatggaagtaaaccaagagcaattgtagtagatccagttcatggatttatgtattggacagattggggaactccagctaaaattaaaaaaggaggacttaatggagttgatatttattctttagttactgaaaatatacaatggccaaatggaattactttagatttactttcaggacgtttgtattgggttgattcaaagttgcattctattagttcaatagacgttaatggaggaaaccgtaaaacaattttagaggatgaaaaaagattagcacatccattttctttagcagtatttgaagataaagttttttggacagatattattaatgaagctattttctctgctaatcgattaactggatcagatgttaatcttttagcagaaaatcttttaagcccagaagatatggttttattccacaatcttacacaaccacgtggtgttaattggtgtgaacgaacaacattaagtaatggtggatgtcaatatttatgtttacctgcaccacaaattaacccacatagtcctaaatttacatgtgcatgtcctgatggtatgttacttgctagagatatgagatcatgtttgactgaagcagaagctgcagttgctactcaagaaacatccacagtcagacttaaagtctcaagtacagcagtgagaacacaacatacgactaccagaccagtaccagatacatcaagattgccaggtgcaacaccaggacttacaacagtagaaattgtaacaatgagtcatcaagctcttggagatgttgcagggagaggaaacgagaaaaagccttcaagtgtaagagcattaagcattgttcttcctatagttttacttgtttttctatgtttaggagtatttcttttatggaaaaattggagattaaagaatattaattcaattaattttgataacccagtatatcaaaaaactactgaagatgaagtccacatctgtcacaaccaagatggttattcatatccaagtagacaaatggtttcattagaagatgacgttgca

SEQ ID NO: 11501 - DNA, 2580 bp, Artificial Sequence
  derived and/or modified sequence
atggggccttggggatggaagctgcgctggacagtcgctctgctacttgctgctgctgggacagcagtcggagaccgatgtgaaaggaatgaatttcaatgccaggatggcaagtgcatatcgtataaatgggtgtgtgacggaagcgccgaatgtcaagacggcagtgatgagtcccaagagacctgcctgtcggtgacatgtaagagcggagattttagttgtggcggtcgtgtgaaccgctgcatcccccaattttggcgctgcgacggccaggtcgactgcgataacggatctgatgagcagggttgtccaccaaagacctgctcccaggatgaatttcgctgccacgatgggaagtgcatttcccggcagttcgtttgcgactctgatagagactgtctcgacggctcggacgaggcaagctgtcccgtgttaacatgcggaccagcctcctttcagtgtaactcaagcacatgtattccacaactctgggcctgcgacaatgatcccgactgcgaggatgggtccgatgaatggccacagcggtgccgaggactttatgtgttccagggagactctagcccctgcagcgctttcgagttccattgtctcagtggcgaatgcatacatagtagctggaggtgcgacgggggtcccgattgcaaagataagagcgatgaagagaattgtgccgttgccacttgtcgtcccgacgaatttcaatgctctgatgggaactgtatccacggtagccggcagtgtgacagagagtacgattgtaaggacatgagcgatgaggtcggttgcgtaaacgtgactctatgcgaaggacctaataaattcaaatgccattcaggggaatgtatcacactggataaagtgtgtaacatggcacgtgattgtagagattggtccgatgagcccattaaggagtgcgggaccgcagcctgcttggataataatggggggtgttctcacgtctgtaatgccctaaaaattggtgccgaatgcctctgccctgatggctttcagctggttgctcagcggaggtgtgaagatatcgacgagtgtcaggaccccgatacttgcagtcagttgtgcgtgaaccttgagggagggtacaaatgccagtgcgaggagggatttcagctcgacccccataccaaggcatgtaaggcagtgggcagcattgcttatctctttttcaccaacagacatgaagttcgcaagatgacactcgatcggtcggaatacacatctctgatccctaacctaaggaatgtcgtcgccttagacacagaggtggcaagtaaccggatttattggtcagacctttcgcaaagaatgatttgtagcacccagctggatcgggcccacggagtctcatcatacgacactgtcatctcacgagatattcaagcccccgatgggctggccgtggattggattcactccaatatttactggacagactccgttctgggtaccgtatccgtggcagacaccaaaggggtgaaacgcaagacgctgtttcgcgaaaacggatcaaagccgcgcgcaatagtggtagaccccgtgcacggatttatgtactggaccgactggggtaccccagcaaaaattaagaaaggcggactgaacggtgttgacatctatagtctcgtgaccgaaaacattcagtggcccaacgggattactctcgacctgcttagcggtcgcctctattgggtggacagtaaactgcactccatctcaagcatcgatgttaacggcgggaaccggaagactattctcgaggacgagaagcgtctggcccatcctttttccctggctgtgttcgaggataaggtgttctggacagatatcataaatgaagccatcttctctgccaatcggttgacaggatccgacgttaatctgttagccgaaaatttgctgtcacccgaggacatggtgctattccataatctcacgcagcctcgaggtgtaaactggtgtgagcggactacactgtcgaacgggggctgccaatatttgtgtctgccagctccacaaataaatcctcacagtcctaaattcacttgtgcatgtcccgacggaatgctcctcgcacgcgatatgaggtcgtgcttgacagaggccgaggctgctgtggccacacaggaaacttctacagtgcgcctcaaggtctcttccacggctgtgaggacgcaacacacgaccactcggccggtcccagatacctccaggctgcccggtgctacacctggcctgactaccgttgagattgttacgatgtcccaccaagccttgggcgacgtcgccggccggggaaatgagaagaagccctcttccgtccgcgcactgtctatcgtactccccatcgtgctcctggtgtttttgtgtcttggggtgtttctcctatggaaaaactggcgactcaagaatatcaattcgattaatttcgacaatccagtgtaccagaagacaacggaggacgaagttcatatatgtcacaatcaagatggatactcgtatccaagtcgccagatggtttctctggaggatgatgtggca

SEQ ID NO: 11502 - DNA, 2580 bp, Artificial Sequence
  derived and/or modified sequence
atgggcccatgggggtggaagctaaggtggacagttgcgctgttgctcgccgctgcaggaaccgctgtaggtgacaggtgtgaacgcaacgaattccagtgtcaggacggcaagtgcataagttataaatgggtgtgcgacggttctgccgagtgccaggacggctctgatgagtcccaagaaacatgcctgtccgtcacttgtaagagtggtgacttctcatgcggcggtagagtcaatcggtgtatcccccagttctggcgttgcgacgggcaggtggactgtgacaacgggagcgacgaacagggctgcccacctaagacctgttcccaggacgaatttagatgtcatgatggaaagtgtatctcccgccagtttgtttgcgatagtgaccgcgattgtcttgatggctctgacgaagcatcttgtccagtgctgacctgcggtccagcctccttccaatgcaattcatcaacatgcataccacaactgtgggcctgtgataacgacccagattgcgaagacggatccgatgaatggccccagcgctgtagaggtctgtatgttttccaaggagacagcagtccatgctccgcattcgagtttcattgcctttctggagaatgtattcacagcagttggaggtgcgacggcggacccgactgtaaggataagtctgacgaggagaattgtgcagtggccacctgccggcccgacgagtttcaatgttctgatggtaattgcattcacggctctaggcaatgtgaccgagaatatgactgtaaggacatgagtgacgaggtgggctgcgtgaatgtaacattatgtgagggacccaacaagttcaaatgccactccggtgaatgcattactttagacaaggtctgtaatatggcacgagattgcagagactggtccgatgaacctatcaaggagtgtggaaccgctgcatgccttgacaacaatggcggctgttcgcacgtgtgcaacgcactcaagatcggcgcagaatgtttgtgccccgatgggttccagctggttgcccagcgccggtgcgaggacatcgatgagtgccaggacccagacacatgcagccaactgtgcgtgaacctggaggggggatacaagtgtcaatgcgaggaaggtttccaactggacccgcacacaaaggcttgtaaagccgtgggatccattgcctacttgttctttacaaaccgtcatgaagtccggaaaatgacactcgatcgcagcgaatatacttctctaattcccaatttacgtaatgtcgtggcgctggacactgaggtcgccagcaatagaatatattggtctgatcttagtcagcggatgatctgcagcacccagttggaccgtgcccacggagtgtccagctatgatacagtcatctcacgcgacatccaggcacctgatggactggcagtagactggatacattccaacatttactggaccgacagcgtactgggcaccgtgtccgtggcagacacaaagggagtgaaaagaaagacactcttccgagaaaatgggagtaagcctcgggcgatcgtggtcgatccagttcacggattcatgtactggaccgactggggaacacccgctaaaataaagaaaggagggctgaacggtgttgacatatactctcttgtgaccgaaaacattcagtggcccaacgggattacactcgatctcctgagcgggcgactttactgggtggactccaaactgcatagcatttcttccattgatgtaaacggcggcaatagaaagacaatcctagaggatgagaaaaggcttgcccatccgttctctcttgcggtgtttgaggataaggtcttctggaccgacatcatcaatgaggccattttttcagcaaatcgcctgactggctcagacgtgaacctattagccgagaatctgctatcacctgaggatatggtgctcttccataatctgacgcaaccgcgcggagtgaattggtgtgaacgaaccactctgagcaatgggggttgtcaatacctgtgcctgcctgctcctcagattaaccctcattcccccaaattcacttgcgcctgtccagacggtatgctgctggcgagggatatgaggtcatgcttgacggaagctgaggcagcggtggcaactcaggagacgtccaccgtcaggctgaaggtgtctagcaccgcggtgagaactcagcatactactactagaccggtgcccgatacatcccgtctcccaggggctacgcctgggctaactacagtggagattgtcacaatgagccaccaggctctgggggacgttgccggcagggggaatgaaaagaaaccctcaagcgttagagcactttcaatcgtcttgcccatcgtattactggtctttctctgcctcggggtctttcttttgtggaaaaactggcggctgaagaatatcaactctataaacttcgacaatccagtatatcaaaaaactactgaggacgaggtacacatctgccacaaccaggacgggtattcctatccatccaggcagatggtgtctctcgaggacgatgtggcc

SEQ ID NO: 11503 - DNA, 2580 bp, Artificial Sequence
  derived and/or modified sequence
atggggccatggggatggaagctcagatggacagtagcgctcctgttggctgctgccggcacagccgtcggagatagatgcgagcggaatgagttccagtgccaggacggaaaatgcatttcctacaagtgggtctgtgacggttccgctgagtgtcaggacggaagtgacgagtcccaggagacttgccttagtgttacgtgcaaatctggggatttttcatgtggagggcgcgtgaaccgctgtatcccacaattctggagatgcgacgggcaagtggactgcgataacggttcagacgagcaggggtgccccccaaaaacctgttcccaggacgagttccggtgccacgacggtaagtgcatctccaggcagtttgtgtgtgatagcgatcgtgactgcctagacggatccgacgaagccagctgccccgtgctcacttgcggcccggcttctttccagtgcaatagcagcacctgcatcccccagttatgggcctgtgataacgatccagattgtgaggatggtagcgatgagtggcctcaacggtgtcgagggctttacgtttttcagggggacagtagcccttgctctgctttcgagtttcactgcttatcgggtgagtgcatccactccagttggagatgtgacgggggccctgactgcaaggataaaagcgacgaagagaattgcgccgtggctacctgtagaccagacgaatttcaatgtagcgatgggaattgcattcacgggagcaggcaatgtgatcgggaatacgactgcaaagatatgtccgatgaagttggctgcgtcaatgttacactgtgcgaggggccaaacaaattcaagtgtcattcaggagagtgcatcaccttggataaggtttgtaacatggcgagagattgtcgagattggagcgacgagcccattaaagaatgtggaaccgctgcctgcctggacaacaacggtgggtgctcgcatgtgtgcaacgctctgaaaataggcgctgaatgcctgtgcccagatggatttcagctggtggcccagcgcagatgcgaagacattgacgagtgccaagacccagatacatgttcccagctgtgtgtgaacttggaaggtggatacaagtgccagtgcgaggagggcttccagctggacccccatactaaagcctgcaaggccgtagggagtatcgcatatctcttcttcaccaacagacatgaggtaagaaagatgacactggacaggtcagagtacacctccctcataccaaatctgagaaacgtagtcgctctggataccgaggttgcctctaaccggatttattggagcgatctgtcccaaaggatgatctgcagtactcaattggaccgagcccacggagtttcttcttacgatacggtgatcagcagggacatccaagcccctgatggtctcgctgtggattggattcacagcaacatctactggacagattcagttttggggactgtgtctgtcgcagatactaagggggttaagcgcaaaacactgttccgcgagaacggatccaaaccacgcgctatagtggtggatcctgtccacggcttcatgtactggactgactggggaacacctgcgaagatcaagaagggaggccttaacggggtagacatttattctctggtgaccgagaatattcagtggcctaacggaattacattagacctcctgtcaggaagactgtactgggttgatagtaagctacacagcatctccagcattgatgtcaacggcggcaaccgtaagacaatcttggaagatgagaagaggctggcgcatcccttcagcctcgccgtgttcgaggacaaagtgttctggactgatattattaatgaggccatcttctccgccaatcggcttaccgggtcagacgtgaacttattggccgaaaacctgttgagccccgaagatatggttttgttccacaatctgactcaaccacgcggcgtcaactggtgcgagaggacgacactttccaatggcggatgccaatacctgtgcctgccggctccccagattaatccacatagcccaaagttcacttgcgcttgcccagacggcatgctattagcccgggacatgagaagttgcctgaccgaggccgaggccgccgtggccacacaggaaacatctaccgtacggctgaaagtatccagcacagccgtaaggactcagcatactactacacgacccgtccccgataccagcagactgccgggggctactcccggactgacgaccgtcgagatcgtgacgatgtcacaccaggctttgggtgacgtcgctggaagggggaacgagaagaaaccaagttctgtacgggctctttcaattgtactgcccatagtgctcctggtgttcctctgtttgggcgttttccttctgtggaagaattggcggctcaaaaacatcaacagcataaactttgacaatcctgtgtaccaaaagaccacagaggacgaggtgcacatctgccataaccaggacggctatagttatccctcgagacagatggtaagcttagaagatgacgtggcc

SEQ ID NO: 11504 - DNA, 2580 bp, Artificial Sequence
  derived and/or modified sequence
atgggcccttggggctggaagttacgttggaccgtggcactcctactcgccgcggccggcacagcagtgggagacaggtgcgaaaggaacgagttccagtgccaagatggaaaatgtataagctataaatgggtctgcgacgggtccgctgagtgccaggacggtagcgatgagagtcaggaaacttgtctgagcgtcacctgtaaatcgggtgacttttcatgcgggggccgagttaaccggtgcatacctcagttctggcggtgtgacgggcaggtcgactgtgataacggaagcgatgagcaaggatgccctcccaaaacctgctcacaggacgaatttcgttgccacgatggtaaatgcatatcacggcagttcgtctgcgactcggacagggactgtcttgacggcagcgacgaggcctcctgtccagtgctaacatgtgggccggcaagcttccagtgcaatagtagtacatgtattccccaactctgggcctgcgataatgaccctgactgtgaagatggatccgatgagtggccacagcggtgccggggactgtacgttttccagggagacagctctccatgttctgcttttgagtttcactgcctatcgggagaatgcattcatagctcctggcgatgtgacgggggaccagattgcaaagacaagtctgatgaagaaaactgtgccgtggctacgtgcagaccagatgagtttcaatgctccgatggcaactgcattcatgggagccggcagtgcgaccgcgaatacgattgcaaggatatgtctgacgaagtaggttgcgtgaacgttactttgtgtgaaggcccaaataaatttaaatgtcatagtggagaatgtataacactcgataaggtgtgcaacatggccagggactgcagagactggtccgacgagcccattaaagaatgtggaacagctgcctgcctagataataacggcggatgtagccatgtgtgcaacgctttgaaaataggcgccgaatgtctgtgcccggacggcttccagcttgtggcacagcggcgatgcgaggatattgatgagtgtcaggatcccgacacgtgttcacagctttgtgtcaacctggaaggaggttataagtgccagtgcgaggagggctttcaactcgaccctcacacaaaagcctgtaaggccgttgggtccatagcatatctgttcttcaccaaccgccacgaggtaagaaagatgacactggaccgcagtgaatacacttcgcttatcccaaatctgaggaatgtcgtggccctggacaccgaggtggcttctaaccgcatttactggtctgatttgagccagagaatgatctgcagtacccagcttgaccgggcgcacggagtgagcagctacgacaccgtaatttctcgagatatccaagcccctgatggccttgcggtggactggatccatagtaacatctattggacggattcggttttgggtacggtgtccgtggcggacaccaaaggcgtaaagcggaagaccttattcagggagaacgggagcaagcccagggctatcgtcgttgatccagtgcacgggttcatgtattggactgattggggaactcctgcaaaaatcaaaaaaggcggcctgaatggagtggacatctatagtctggtgacagagaatatccagtggcccaatggaattacgctcgacctgctgtctggacggctctactgggtggattccaagctgcactccatcagcagcattgacgtgaacggagggaatagaaagactatcttagaagatgaaaagcgcctcgctcaccccttctctcttgcggtcttcgaagataaggtattttggaccgacatcataaacgaggccattttctcagccaacagattaacgggcagcgatgtgaatctgctggccgagaacctcttaagccccgaggacatggtgctctttcataacctaacacagccccgcggggtcaactggtgcgaacgtactaccttaagcaacggcggatgtcagtacctatgcctgccggccccccaaatcaacccccattctcccaaattcacatgcgcatgcccagatggaatgctgctggccagggacatgcgttcatgcctgacagaagccgaggctgccgtggccacacaggagacttctacagtccgtttgaaggtttcctctaccgccgtgcgaactcaacatacaaccacacgacctgtgcctgacacctctcgcctgcctggggctaccccagggctgactactgtggagatcgtgaccatgtcacaccaggcattaggggatgtcgccggacgggggaacgaaaaaaagccaagctccgtgcgtgcactttcaatagtcctcccaatcgtcctgcttgttttcctttgtcttggcgtttttctgctttggaaaaactggcgtctgaaaaatatcaatagcataaatttcgataaccctgtgtaccagaagactacagaggatgaagttcacatctgtcacaaccaggacgggtatagctatcccagcaggcagatggtttctctcgaggatgatgtagcg

SEQ ID NO: 11505 - DNA, 2580 bp, Artificial Sequence
  derived and/or modified sequence
atgggaccatggggatggaagctgaggtggaccgtggcgcttctgctcgcggctgccggaactgcggtcggagatcgctgcgagcgcaatgaatttcagtgccaagacggtaagtgcatcagctataagtgggtttgtgacggaagtgctgaatgccaggatggttctgacgaatcgcaggaaacgtgcctttcagtcacctgcaagtccggtgacttcagctgcggtggccgagtgaatagatgtataccgcagttttggcgctgcgatggacaggtcgactgtgacaatggatccgacgaacaggggtgcccgccaaagacctgctcccaagacgaattccggtgccatgacggcaagtgtatctctcgacagttcgtgtgtgactcagatcgcgactgcctggatgggagtgatgaggcgtcctgcccggtcctcacctgcggaccagcctcattccaatgcaattcttccacctgcattccacaactgtgggcctgtgacaatgacccagattgcgaggacggaagcgacgagtggccgcaacgctgcaggggcctgtacgtctttcagggagacagcagcccgtgctcggctttcgaattccactgcctgtccggcgaatgcatccactcctcctggcggtgcgacggcggccccgactgcaaggacaagagcgatgaggagaattgcgctgttgccacttgtcgcccggacgagttccagtgctcggatgggaattgtatccacggttcgcgccaatgcgatcgcgaatacgattgcaaggatatgtcagacgaggtcggttgcgtcaacgtcaccctttgcgagggcccgaacaagttcaagtgccactcaggagaatgtataaccctggacaaggtctgtaacatggcccgtgattgtcgggactggtcggacgaacctatcaaggagtgtgggactgcagcgtgcttggacaacaacggagggtgctcccacgtgtgcaacgcattgaaaatcggcgctgaatgcctctgcccagacggattccaactggtggcccaacggcgctgcgaagatatcgatgaatgccaagacccggatacctgctcacagctctgtgtgaacctggaagggggctacaaatgccagtgtgaggagggctttcaactggacccccatactaaagcctgcaaagcagtgggatccatcgcgtacctcttctttaccaatcgccatgaagtcagaaagatgaccctcgacagatccgaatacacttctcttatcccgaacctcaggaacgtcgtggcccttgataccgaagtcgcttccaacagaatctactggtctgacctgtcacagcgcatgatctgtagcactcagctcgatcgcgcacatggtgtgagctcatacgacaccgtgatcagccgcgatattcaggccccggacgggttggcggtggattggatccattcgaatatctattggacggacagcgtgctgggaaccgtctcggtcgccgatacgaaaggtgtgaagcgcaagaccctcttcagagagaatggatcgaaaccgagagccatcgtcgtagatcccgtccatggatttatgtactggacggattggggaactcccgcaaagatcaaaaagggcggactgaacggagtggacatctactcccttgtcacggagaacatccagtggcctaacggaatcaccttggacctgctgagcggacgcctgtactgggtcgattcaaagctgcactcaatttcgtccatcgatgtcaacggagggaataggaaaaccatcctggaggacgagaagaggctggcgcacccattctcacttgccgtgttcgaggacaaggtgttctggactgacatcatcaacgaagccatcttctccgccaaccggttgacgggatcggatgtgaatctgctggccgagaacctgctgtcgcccgaggatatggtgttgttccataacctgacccagcctcggggcgtgaattggtgcgagcgcactaccctgtcaaacgggggatgccaatacctgtgcctccctgccccacagatcaatccacactcgccgaagtttacctgtgcgtgtccggatggcatgctgctggcccgggacatgagatcgtgcctgaccgaagcagaggccgcggttgccacccaggagacttcaactgtccgcttgaaggtgagctcgactgccgtgcggacgcagcacaccactactaggccggtgccggatacttcgcgcctgccaggggccacgcccgggctgaccaccgtggagattgtgactatgtcccatcaggcactcggagacgtggccggtagagggaatgagaaaaagcccagctccgttcgcgccctgtcgatcgtcctccctatcgtgcttcttgtctttctgtgccttggagttttcctcttgtggaagaactggagactcaaaaacataaactcgatcaactttgataacccggtttaccagaaaacgactgaggatgaggtgcacatctgccacaaccaggacgggtacagctacccatcgaggcaaatggtgagcttggaagatgacgtcgcc

SEQ ID NO: 11506 - DNA, 2580 bp, Artificial Sequence
  derived and/or modified sequence
atgggcccatgggggtggaagctccgatggacggtcgctctcctgcttgccgcagccggtacggcagtgggagatcggtgtgaacggaacgagtttcagtgtcaggatggaaaatgcatttcatataaatgggtttgcgacggtagcgccgagtgtcaggacggatcagatgagtcgcaggaaacatgcctttcggtaacatgcaagagcggagatttcagttgcggcggaagggtgaataggtgcataccgcagttctggaggtgtgatggccaggtggattgcgataacggcagtgatgagcaagggtgccctccgaagacatgctcccaggacgaatttcgatgtcacgatgggaaatgcatcagccggcagtttgtgtgcgacagtgacagggactgcctggacgggtctgacgaagccagctgccccgtattgacctgtggccccgcaagcttccaatgtaactcatccacatgcatcccacagttgtgggcctgcgacaatgatcctgactgtgaggacgggagcgacgaatggcctcagaggtgcaggggattatacgtctttcagggggattcatctccctgtagcgcctttgagtttcactgtctgagcggagagtgcatccattccagttggaggtgcgacgggggtcctgattgtaaagacaagagtgacgaggagaactgtgccgttgctacctgcaggcccgacgaatttcagtgctcagatggtaattgcatacacggttcaaggcaatgtgacagggaatacgactgcaaggatatgtccgatgaagtaggctgcgttaacgtgaccttatgtgagggacctaataaatttaagtgtcacagcggcgaatgtattaccctagataaggtctgtaatatggctcgagattgtcgggactggagcgatgagcccattaaagaatgcggcactgccgcgtgcctcgataataatggagggtgtagtcatgtatgtaacgcgctcaagatcggtgcagaatgtctctgccctgacggattccagcttgtggctcaacgtcggtgtgaggacatcgacgagtgtcaggatccggacacgtgtagccaactctgtgtgaacctcgaaggcggttataagtgtcagtgtgaagagggttttcagcttgacccccacactaaggcctgtaaagccgtcggtagcatcgcctacctgttctttacaaaccgccacgaggtgagaaaaatgacattggataggagcgagtacacttcactgatccccaacctgagaaacgttgtggcgctcgacactgaggtggccagcaaccgcatttattggagcgatctgtctcagcgtatgatatgctccactcagctggaccgagcacatggcgttagtagctatgacacggtgatatccagggatattcaggcccccgacggcctggccgtggattggattcactctaatatttattggactgattccgtcttggggaccgtctccgtggcagataccaaaggagtaaagaggaaaacgctgtttcgcgagaacggatcgaaaccgcgggctatcgtggtcgatcctgtgcatgggttcatgtactggacagactggggaacacccgcaaaaattaagaaaggcggtctgaacggtgtcgacatctacagcctagtgaccgagaacatccagtggccaaacggaataacattagatttgttgagtggccgattgtactgggtggactccaaattgcactccatctcatccatagacgttaatgggggcaacaggaaaacaatattagaggatgaaaagaggctcgcacaccccttcagcttagccgttttcgaagacaaggtattttggaccgatataataaacgaagccatctttagtgctaatcgccttaccggctccgatgttaacctcttggcagaaaacctgctgagccctgaggacatggtactgttccataacctgactcagcccagaggagtaaactggtgtgagcggacaaccttgtccaacggagggtgccagtatctgtgcttgccagctccccagattaatccacatagtcctaagttcacctgtgcctgtcctgatggcatgctcttggccagagatatgcggagctgtctcacagaagcagaggcagcggtcgccactcaggagacctccaccgtgcgcctgaaggtctccagcaccgcagtcaggactcagcacactacaactaggcctgttcctgatacttcccggctgccaggtgcgacgcctggccttacaaccgtcgagattgttacaatgtctcatcaggccttgggcgacgtggctggtagaggcaacgagaagaagcctagttcagtccgtgccctatcaatcgtgctacctatagtgctgctggtgttcctgtgcctaggtgttttccttctctggaagaactggcggctcaagaatatcaactctatcaattttgacaacccagtgtaccagaaaaccactgaggatgaagtgcacatttgccacaatcaggatgggtacagttatcccagtagacaaatggtgtcactcgaggatgatgtggca

SEQ ID NO: 11507 - DNA, 2580 bp, Artificial Sequence
  derived and/or modified sequence
atgggcccttgggggtggaagctgcgatggaccgtagccctgctactggcggcggccggcaccgccgttggcgaccggtgtgagcggaacgaattccagtgtcaggatggtaaatgcatttcatacaagtgggtgtgcgatggttccgctgaatgtcaagacggcagtgatgagagccaggagacctgcctctctgtgacttgcaaatctggcgacttcagctgcggcggaagagtgaatcgctgcatcccccagttttggagatgtgatgggcaggtggactgtgacaacggaagcgatgagcagggttgcccgccaaaaacttgttcccaagatgaattccgatgtcatgacggcaaatgcatttcacgacagtttgtctgcgacagtgacagagattgtctcgatggttctgacgaggctagttgtccagtcctcacctgcgggcctgcatctttccagtgtaattctagcacctgcatcccccaactgtgggcctgcgataatgaccccgactgcgaggatgggtcggacgagtggccgcagcggtgcagagggctgtatgtgttccagggggacagtagtccttgttccgctttcgagttccactgtctgtctggcgagtgcatccacagttcttggagatgcgacggagggcctgattgtaaggataagagtgatgaggagaactgtgccgtcgcaacgtgtcggcccgacgaattccagtgtagcgatggtaattgtattcacggaagtcgccagtgtgatcgcgagtacgattgtaaggatatgtccgatgaggtcggctgcgtgaacgtcactctttgtgaaggtccgaataagtttaagtgtcactcgggagagtgcatcacccttgacaaagtttgtaacatggccagagactgtagagactggtcagacgagccgataaaggaatgtggcactgccgcctgtctcgataacaacggcggatgctcgcacgtgtgcaatgcactgaagattggagccgagtgtctgtgtccagacggcttccagctggtggcacagaggaggtgtgaggacatcgatgagtgccaggatcctgacacgtgttcacagctttgcgtgaacctggagggagggtataagtgtcagtgcgaagagggctttcagctagatccacatacaaaggcatgtaaagctgtcggtagtatcgcgtaccttttttttacaaataggcacgaggtgaggaaaatgactttggacaggtccgaatatacatcacttatccccaatctgcgcaacgtggtggccctggacacagaggtggcatctaacagaatctattggtcagacctatcacaacggatgatttgttctacccagttggatcgagcccatggagtttcatcatatgataccgtgatttcccgggatatacaggctcccgatggcctggccgtggattggatacactcaaatatctactggacagatagcgtccttgggacagttagtgtagccgatacaaaaggcgtgaaacgaaagacactttttagagaaaacggatctaaacctcgcgccattgtcgtggaccctgtgcacggctttatgtattggacggattggggcacccccgcaaagattaaaaaaggaggtctgaatggcgtcgacatttacagtctggtgacggaaaacattcagtggcccaacgggatcactctggacctgttgagcggccggttatactgggtagatagcaagctccactcaatttcatctatcgacgttaatggtgggaataggaagaccattttggaggatgagaaacgattggcacaccccttcagccttgctgtgttcgaggataaagtcttctggacagatataattaacgaggccatcttcagtgctaataggttaaccggcagcgatgttaacttgctagcggagaaccttttgagcccagaggatatggttctcttccataacctcacccagccacgtggggttaactggtgcgagcgcacaacgctgagcaatggaggctgccagtacctgtgcttgccggccccacagatcaacccccactcccccaaatttacctgtgcgtgccccgatggcatgttgctggcaagagacatgcgctcctgtctaacagaggctgaggccgctgtggctacacaggaaaccagcactgtacggctgaaagtgtcgagcacagctgttcgtacccaacataccacaaccagacctgttcccgacacctcacggctgcctggggctacacctgggctcactactgtggagattgtgacaatgtcacatcaggccctgggcgatgttgctggacgtggcaatgagaagaagccgtcatcagtcagagctctctccattgtactccccatcgtactactcgtgttcttgtgcctgggcgtttttttgctttggaagaactggcgcctcaaaaacatcaactctatcaactttgataatcctgtttaccagaagacaaccgaggacgaagtgcacatttgccataaccaggatggttattcctaccctagtcgtcagatggtgtcactggaggatgacgtggct

SEQ ID NO: 11508 - DNA, 2580 bp, Artificial Sequence
  derived and/or modified sequence
atgggcccgtggggatggaaattgcgctggaccgtggcgcttctcctcgcagccgctggaactgccgtgggcgatcgctgcgaacgcaatgaatttcagtgtcaagacggaaagtgcatctcctacaaatgggtctgcgatggtagcgcggagtgccaggatggatctgacgagagccaagaaacctgcctcagcgttacttgtaagtcaggagacttcagttgcgggggacgggtgaaccgctgcatcccgcagttctggcgctgcgacggacaagtggactgcgacaatggaagcgatgagcagggatgccccccaaagacctgttcgcaggacgaattcagatgtcacgatggtaaatgtatctcccggcagttcgtgtgcgattcggaccgggactgcctggatggctcggacgaagcatcctgcccggtgcttacctgcggcccagcctcgttccagtgtaactcgtccacctgtattcctcaactgtgggcatgcgacaacgaccctgattgcgaggacggctcagacgaatggccgcagcgttgtaggggactgtacgtgttccagggcgacagctccccatgttccgccttcgaattccattgcctgtcgggtgaatgcatccactctagctggcggtgtgacggtggacctgattgcaaggacaagtccgatgaagagaactgcgcggtcgccacgtgcaggccggacgagtttcaatgctccgacgggaactgcattcacggatccaggcaatgcgaccgggagtacgactgcaaggatatgtcggatgaagtgggatgtgtgaacgtcaccttgtgcgaaggaccaaataagttcaagtgccactccggggaatgcatcactctcgacaaggtttgtaacatggcccgggattgccgggactggtcagatgaaccgataaaagagtgcggcacggctgcctgcctcgataacaacggtggttgctcgcatgtgtgcaatgccctgaagattggagccgaatgcttgtgcccggacggattccagctcgtggctcagagaagatgcgaggacatcgatgaatgtcaggacccagatacttgctcccaactgtgtgtgaacctggagggcggatacaagtgccaatgcgaggagggattccaactcgatcctcatactaaagcctgcaaggcggtcgggtccatcgcgtacctcttctttaccaatcggcacgaagtgaggaagatgacgctggatcgcagcgagtacacttcactcatccccaacctgagaaatgtggtggccttggataccgaagtcgcatcgaaccgcatctactggtccgatctgtcccagcgcatgatctgctcgacccaactggaccgggcacacggcgtgagctcgtacgacacggtgatctcccgtgatatccaagcccctgacggactggcagtcgattggattcactctaatatctattggacggactcagtgctgggaaccgtctccgtcgccgacactaaaggcgtgaagcgcaagaccctgttcagagaaaacggctcgaaaccgagggccattgtggtcgacccggtccacgggttcatgtattggaccgattggggtactccagcaaagatcaaaaagggaggacttaatggggtggacatctactcgctggtcactgaaaacatccagtggcctaacggaatcactttggacctcctctcagggcggctgtactgggtggattcaaagctccattcgatctcaagcatcgacgttaacggagggaatagaaaaacgatcctggaggatgagaaacggttggcccatccatttagcctggccgtgtttgaagataaggtgttctggaccgacatcatcaatgaggctatcttcagcgcaaacagactcaccggtagcgacgtgaacctgttggcggagaacctgctgtcacctgaagatatggtgctgttccacaacctgactcagccccgcggagtgaattggtgcgaacggactaccctcagtaatggcggatgccaatacctttgcctgccggctccacaaatcaacccccactcgccaaagttcacctgtgcttgtccggatggcatgcttttggctcgcgacatgcgatcctgtctgactgaagccgaggctgcggtggcgacccaggaaacttcaactgtccgcctgaaggtgtcaagcaccgcagtgagaactcagcataccactacccggccggtgccagacacctcgcgcctgcccggggcgacccctggcctgactactgtcgagatcgtcaccatgtcccatcaggccctgggagatgtcgctggccgaggaaacgaaaagaagccgtcgtcagtgcgcgcgctttcgatcgtgctcccgatcgtcctgctcgtgtttctgtgtctcggtgtatttcttctgtggaagaattggcgcctcaagaacattaattcgatcaacttcgacaacccggtgtaccagaaaactaccgaggacgaagtgcatatttgccacaatcaggacggatactcatacccgagcagacagatggtttccctggaggacgacgtcgcg

SEQ ID NO: 11509 - DNA, 2580 bp, Artificial Sequence
  derived and/or modified sequence
atgggcccgtggggctggaagctgcgctggaccgtcgctctgctgctggccgctgccggcaccgctgtgggtgatcgctgcgagcgcaacgagttccagtgccaagacggtaagtgtatctcctataagtgggtctgcgacggttccgcggaatgccaggacggtagtgacgagtctcaggagacctgtttgtccgtcacgtgtaagagcggcgacttcagttgcgggggtcgcgtcaaccggtgcatcccccagttctggaggtgcgacggtcaggtcgattgtgataatggatccgatgagcagggttgtccacccaaaacctgctcgcaggacgagttccgctgccacgacggcaagtgtatctctcgtcagttcgtctgcgacagcgaccgcgactgtctggacggctccgacgaggctagctgcccagtcctaacatgcggtccggcgtccttccagtgcaattcctcgacttgcatcccccagctttgggcatgtgataatgatcctgactgcgaagatggatcggacgaatggccgcaacggtgcagaggtctgtacgttttccagggtgacagttccccctgttccgccttcgaattccattgtttgagcggggagtgtatccatagctcttggcgttgcgacggaggccctgactgcaaggataagtctgacgaggaaaactgtgctgtggccacgtgcaggcccgacgagttccagtgctcagatggtaactgtatccacggttcccgtcagtgcgatcgtgagtacgattgcaaggatatgtctgatgaggtcggttgtgttaacgtgacattgtgcgaggggcctaacaagttcaaatgtcatagtggcgagtgtatcaccctggacaaggtctgcaacatggcccgagactgtagagattggtccgacgagccgattaaggagtgcggcaccgcggcctgcttggacaacaacggcggttgttcgcacgtgtgtaacgccctgaagatcggtgctgagtgcctctgcccggacggtttccagttggtcgcccagcggcggtgcgaagatatcgacgagtgtcaagatcccgacacttgctcgcaactctgtgtcaatttagagggcggctacaagtgccagtgcgaggagggcttccagctggaccctcacactaaggcctgtaaagcggtcggttccatcgcctatctgttttttaccaaccggcatgaggtccgcaagatgactttggaccgctcggagtacaccagcctcattcccaacttgcgcaacgtcgtggccctggacacggaggttgcctcgaataggatctattggtcggatctttcacagcgaatgatctgttcaacccagttagacagggcccacggtgtatcgtcctatgatacggtcatcagccgggatatccaggcgcctgatggcttggctgtggattggatccattctaacatctattggacggactcggttttgggcactgtttccgtcgcggatactaagggcgttaagcgcaagacgctcttccgggagaatggaagtaagcctagggctatcgttgtcgacccggtgcacggctttatgtactggacagattgggggacccccgccaagataaaaaagggaggcttgaatggagttgatatatactccctcgttaccgaaaatatccagtggcctaatggaataacccttgatcttctgtcagggcgcctgtactgggtcgactcgaagctgcacagcattagctcaatcgacgtcaacggcggaaaccgtaagaccatcctcgaggatgagaagcgtctcgcccatcccttctccttggccgtgttcgaggacaaagtcttttggaccgatattattaacgaggctatcttctccgccaaccgtttgaccggcagtgacgtgaatctgttggccgagaatttgctctcccccgaggacatggttcttttccacaacctgacgcaacctcgtggagtcaattggtgcgagcggaccactctttccaacgggggctgccagtacctgtgcctgccggcgcctcagatcaacccgcactcccctaaattcacttgcgcttgccccgacggcatgttgctggcccgcgatatgcgttcttgtttgacggaagccgaagccgctgttgccacacaggagacctccaccgtccgccttaaggtctcgagcactgctgtccgcacccagcacactaccacgcgacctgtccctgacacgagtcgcctcccgggtgctacaccgggcttaactacggtcgagatcgtgaccatgagccatcaggctctgggagacgtggctggacgcggtaatgagaagaagccatcttcagtccgcgctctctctatcgttctgcccattgtcctgctggtctttctgtgccttggcgtcttcctattgtggaagaattggaggctcaagaacatcaacagtatcaacttcgacaaccccgtctatcagaagactaccgaagatgaggtccatatttgccacaaccaggatggttactcgtatccgtcccgccagatggtctctctggaggatgatgtggcc

SEQ ID NO: 11510 - DNA, 2580 bp, Artificial Sequence
  derived and/or modified sequence
atgggaccttggggatggaaactcagatggactgtcgcactcctgcttgcagcagctggcaccgcggtgggagatagatgtgaacgcaacgaatttcagtgtcaggacggtaagtgtatttcgtataagtgggtctgtgatggatcggcagagtgccaggatggtagtgacgaatcgcaagaaacttgcctgtctgtcacctgtaagtccggagatttttcgtgtggtgggcgggtgaatagatgcataccacaattttggagatgcgatggtcaagttgattgtgataacggttccgatgaacagggatgcccaccaaaaacttgttcacaagacgagtttagatgtcatgatgggaagtgcatcagtagacaatttgtgtgtgactccgatcgagattgcctcgatggatccgacgaggcctcctgcccagtgttgacttgtgggccagcgagctttcaatgtaattcttccacttgcattccgcagctttgggcttgcgacaatgacccggattgtgaagatgggtctgatgaatggccccaacgatgtaggggtctgtacgtttttcagggagattcatcaccgtgttcggcctttgagttccactgtctttcaggcgaatgtatccacagcagctggcgctgtgatggcgggccagattgcaaagacaagtcagacgaagagaattgtgccgtggcgacctgtcggcccgatgaattccaatgttccgatggaaattgtatccatggtagcagacaatgtgacagagagtacgattgtaaggatatgagtgatgaagtcgggtgtgtcaacgtcaccctctgtgagggcccaaataagtttaagtgtcattcaggcgagtgtataactctcgataaggtctgcaatatggcccgggattgccgcgactggtcggacgagcctatcaaggaatgtggaactgcagcctgcctggacaataacggaggttgtagccacgtgtgtaacgcgcttaagattggtgccgaatgcctttgtccggacggcttccaactggtcgcacagagacgatgtgaggacattgacgaatgtcaagatcctgatacctgttcccagctgtgcgtaaatcttgaaggtggatacaagtgtcagtgtgaagagggatttcagctcgaccctcatacgaaggcatgcaaggcggtcgggtcgattgcatacctgtttttcaccaaccgccatgaggttcgaaagatgactctggacagatcggaatacacttctctgatcccaaaccttcgaaacgtggtggcacttgatactgaagtggcttccaatcgaatatactggtcggacctgagccaaaggatgatttgctcaacccagctggatagggctcatggggtgagctcatacgataccgtgatctcccgggacatccaagcacccgacggacttgccgtggattggattcattcgaacatatactggacggattccgttcttggtaccgtgtccgtggcagataccaagggtgtgaaaagaaaaactctgtttcgggagaatggctcgaagcctcgcgctatagtggtcgatccagtgcatggatttatgtactggaccgactggggaactccagcaaagattaagaagggcggcctgaacggtgtggatatctattcccttgttactgagaacattcagtggcctaacgggattactctcgatctcttgagcggacgtctgtactgggtggatagcaaactgcattccatttcgtcgattgacgttaacggcggaaacagaaaaactatcctggaggatgagaaacgtttggcccaccctttttcgctggcagtgttcgaggataaagtgttctggaccgatatcatcaatgaagcgattttctctgcaaacaggctcaccggcagtgatgtgaaccttttggcagaaaacctgctctcccctgaagatatggtcctttttcataacttgacccagcctcgaggtgtgaactggtgcgaacggactactctttcaaacggtggatgccaatacctgtgtttgcccgcaccacagattaacccacactcgcccaagttcacctgtgcatgcccagacggaatgcttcttgcacgcgacatgcgttcgtgcctgactgaagccgaagccgcagtggccacccaagaaaccagcacggtgagacttaaggtttcgagcactgcagtccgcacccaacataccaccacgaggccggtccctgatacctcgagactgcctggagcaacccccggactgacgaccgtggagatcgtcacgatgagccaccaggccctcggtgacgtggcaggacggggaaatgaaaagaaaccctcgagcgtgcgggcattgagcatcgtgcttcctattgtcctcttggtgttcctctgtctgggagtgttcttgctttggaaaaactggaggcttaagaatatcaacagtattaactttgacaatcctgtttaccaaaaaacgaccgaagatgaagtacacatttgccataatcaagacgggtacagctaccctagcaggcagatggtgtctctcgaagatgacgtggcg

SEQ ID NO: 11511 - DNA, 2580 bp, Artificial Sequence
  derived and/or modified sequence
atgggtccctgggggtggaaactgcgctggaccgtggcattgcttttggccgctgccggaaccgcagttggcgacagatgcgaaagaaacgagtttcagtgccaggatggtaagtgtataagttacaagtgggtttgcgatggatccgcagagtgccaggacgggtcagacgagtctcaagaaacctgcctgtccgtcacgtgtaaatccggtgacttttcttgcggtggacgagtgaatagatgtataccccagttctggagatgtgacggtcaggtggattgtgataacggcagtgatgagcaaggctgccccccgaagacatgttcccaagacgaattccgctgtcatgacgggaagtgcatatctaggcaatttgtttgtgacagcgacagagattgcttggacggaagtgacgaggcctcatgccctgtgctgacatgcggtcccgcaagcttccagtgtaacagtagcacatgcatccctcagctgtgggcctgtgataatgaccccgattgtgaagacggctccgatgagtggcctcaacgatgtcgcgggctgtatgtgtttcagggcgactcctccccttgcagcgcgtttgagttccattgtctctcaggggagtgcatacacagttcttggagatgcgatggcggccccgactgtaaagacaaaagcgacgaggagaactgcgccgttgcaacttgcaggcctgatgaattccaatgtagtgacggcaattgtatacatggatccaggcagtgcgaccgggagtacgattgcaaagatatgtcagacgaagtgggctgcgtgaatgtgaccctgtgcgagggacccaataagtttaagtgccattccggagaatgcatcacactggacaaagtttgcaatatggcaagagactgtagagattggagcgacgagcccataaaggaatgcgggaccgccgcttgtcttgataacaatggtgggtgttcacatgtgtgcaacgctctgaagatcggggctgaatgcctttgccccgacggattccagttggtcgcacagcgacgctgcgaggacatcgatgaatgccaagatcccgatacttgctcacagctctgcgtgaatcttgagggcggctataaatgtcagtgcgaggagggattccagctggaccctcatacaaaagcatgcaaggctgtaggttctatcgcctacctctttttcacgaatcgccacgaggtgcgcaaaatgaccctggatcgctccgagtataccagccttattcctaatcttcgcaacgttgttgctctggatactgaagtggcctcaaacaggatttactggtccgaccttagtcagcggatgatctgcagcacccagctggatagggcacatggcgttagctcatatgacaccgtaatttccagggatattcaggctcccgacggcctggcagtggattggattcatagtaacatctattggactgattcagtgctcggcacggtgtccgtagcggatactaagggtgtcaaaaggaaaactctcttcagagagaatggcagtaagcctcgggcaatcgtggtggaccctgtgcatgggtttatgtactggacagattggggcacacccgcaaagatcaagaaaggcgggctcaatggcgtggatatctattccctggtgacagaaaatattcaatggccaaacggcatcactctcgacctcctgtctggacggctgtactgggtcgactctaagctgcactcaatcagttccatcgacgtcaacggcgggaatcggaagaccatcctggaagatgagaagaggcttgcccaccccttttctctggccgtctttgaggacaaagtcttctggacggacattatcaatgaggctatcttctccgcgaaccgcctcactggatctgacgtcaaccttctcgccgaaaacctcctgtctcctgaagatatggtgctgttccataacctcacacagcctcgaggggttaactggtgtgaaaggacaaccctgagtaatggagggtgtcaatacctctgcctccccgctccccaaatcaacccacattctcccaagttcacgtgtgcatgccccgacgggatgctcctggccagagacatgcgatcctgcctgactgaggctgaggccgctgttgcaactcaagagactagcaccgtgcgacttaaagtgagttccaccgccgtccgaacccaacacactaccactaggcccgtgcctgatacctcccgattgccaggcgctacccctgggctcacaacggtggaaatcgtgacaatgtcacaccaggcgcttggggacgtggcaggcagaggtaatgaaaaaaaaccatcaagcgtacgggcactgagtatcgtgctgcctattgttctcctcgtgttcctgtgtttgggtgtattcctgctctggaaaaactggcggctgaagaatatcaacagcattaatttcgataaccccgtgtatcaaaaaaccacggaggacgaagttcacatttgccacaatcaggacggatattcctatcctagccgccagatggtttctctggaagacgatgtcgct

SEQ ID NO: 11512 - DNA, 2580 bp, Artificial Sequence
  derived and/or modified sequence
atgggcccgtggggatggaagttgagatggaccgtcgccctgctcctggcagcagcgggtaccgccgtgggggaccggtgtgagagaaacgaatttcaatgccaagacggaaaatgcattagctacaagtgggtttgcgatggatcagcggagtgccaggacggttcggacgagtcccaagaaacctgtctcagcgttacttgtaagtcgggtgatttttcgtgcgggggacgggtgaacagatgcattccccagttttggcgctgcgatggtcaggtggactgtgacaatgggtcggacgagcagggatgcccgccaaagacttgctcgcaagacgaattccgctgtcatgatggaaaatgtatcagccggcaatttgtgtgcgactctgatagagactgcttggacgggtcggatgaggcgtcctgccctgtcctcacctgtggacctgcatcgttccagtgcaattccagcacctgtatcccacagttgtgggcatgtgataacgaccctgactgcgaagatggcagcgatgaatggcctcaacggtgcagaggactgtacgtgttccagggcgactcgtcgccgtgttcggctttcgagttccactgccttagcggagagtgcattcattccagctggcggtgtgacggaggacccgattgtaaggataagtcggacgaagagaattgcgccgtggcaacctgccggccggacgaattccagtgctccgatggaaactgcatccatggatcgagacaatgtgatagggagtatgactgcaaggacatgagcgacgaagtcgggtgcgtgaatgtgaccctgtgcgagggaccgaacaagttcaaatgccactcaggagaatgtatcaccttggataaggtgtgtaatatggcccgtgattgccgcgactggtccgacgaacctatcaaagagtgtggaaccgctgcgtgccttgacaataacggtgggtgtagccatgtctgcaacgccctgaagatcggggcggagtgtctgtgcccagatggatttcagctggtggcgcaacgccggtgcgaagatatcgacgagtgtcaggaccctgacacttgctcgcagctctgtgtgaacctggaaggcggttacaagtgccagtgcgaagaaggattccagttggatccacacaccaaggcttgcaaagcggtgggctcaatcgcctacctgttcttcaccaaccgccatgaggtgcggaagatgaccctggaccgcagcgaatacacttccctgatcccgaatcttaggaacgtggttgccctcgatactgaggtggcaagcaacagaatctactggagcgatctgagccagcggatgatttgcagcactcaactggatcgcgcgcatggagtcagctcctacgatacggtcatttcgagagacatccaggcgccggatggactggcggtggactggatacactcgaacatctactggaccgacagcgtgctcggaactgtgtctgtcgccgacactaagggagtgaagcgcaagacccttttccgcgagaacggctccaagccacgcgccatcgtcgtggatccagtccatggatttatgtactggactgactggggaactcctgcgaagatcaagaagggaggattgaacggagtggacatctacagcttggtgactgagaatatccagtggccaaacggtattactctcgatctgctctcgggacgcctgtactgggtggattccaagctccattctatctcatccatcgatgtcaatgggggcaaccgcaaaacgatccttgaggatgagaaacggcttgctcatcccttctctctggccgtgttcgaggacaaggtcttttggaccgacatcattaacgaggccatcttttcggccaaccggctgacgggaagcgacgtgaatctgctggcagaaaatctgctgagcccagaagatatggtgctgttccacaatctcactcaaccgcgcggagtgaactggtgtgagcgcactactctgtccaacgggggatgtcaatacctctgtctgcctgcccctcagatcaatccgcattcgccgaagttcacttgcgcgtgccctgacgggatgttgctggcccgggacatgaggtcctgtctgaccgaagccgaagcggccgtggcgacgcaagaaacctccacggtgcgcctgaaagtgtcgtcgaccgccgtgagaacccaacacactactactcggccagtcccggatacctcacgcctgccgggggccacgcctgggctgactactgtggagatcgtgaccatgtcgcatcaggcactgggagacgtcgccggccgaggtaacgagaaaaaaccgagctcagtccgggccctgtccatcgtgctgccgatcgtgctgctcgtgtttctctgcctcggcgtgttcctgctgtggaagaattggcgtctcaaaaacatcaattcaatcaacttcgataaccccgtgtaccaaaagactacggaagatgaagtgcatatctgccataaccaggacggctactcttacccgtcgagacagatggtgtcgctggaggatgatgttgcc

SEQ ID NO: 11513 - DNA, 2580 bp, Artificial Sequence
  derived and/or modified sequence
atgggtccgtggggctggaaactccgatggacggtggccttgttgctagcagctgcggggacagcggtcggagacaggtgcgagagaaatgaattccagtgccaggacggtaagtgcatttcttacaagtgggtatgtgatggtagcgccgagtgccaagatggctctgatgagagccaggagacctgcctgtctgtcacgtgcaaaagcggggacttcagctgcggcggccgcgtgaatcgatgtatccctcaattttggcgctgtgatggccaagtggactgtgacaacggctccgacgagcagggctgccctcctaagacctgcagccaggacgagttccgctgccacgacggtaagtgtattagccgccagtttgtgtgtgacagcgatagagactgtctggacggaagcgacgaagccagctgtcctgttctgacctgcggcccagcgtcgttccaatgcaatagtagcacctgcataccacagttgtgggcatgtgacaatgatcctgattgtgaggacggcagcgacgagtggccacagagatgtagaggactctacgtgttccaaggcgactcatctccatgcagtgccttcgaattccactgtctgagcggggaatgcatccactcatcttggcgctgcgacggtggcccggattgtaaggacaaatctgacgaggaaaattgcgcggttgcgacctgccgcccagatgaatttcaatgttctgatggtaattgcatccacggtagccgccaatgcgaccgtgagtatgactgcaaagatatgtcagacgaggtcgggtgcgttaacgtgaccctgtgcgaaggccctaacaaatttaagtgccacagcggcgaatgtataacactggacaaagtgtgtaacatggccagggactgcagggactggagcgacgagccgatcaaagaatgtggcactgcggcttgtctggataacaacggaggctgcagccatgtctgtaacgcgctcaagatcggcgccgaatgcctgtgtccagatggctttcaattagtggcacaacgcagatgtgaagatattgatgagtgccaggaccctgatacctgcagccaactgtgtgtgaacttggagggcgggtacaaatgccaatgcgaagaaggctttcagctggacccgcacacgaaagcgtgcaaggccgttggaagcattgcctacctattctttaccaaccggcacgaagtgcgcaagatgacgctcgatcggtctgaatacacctccctgattccgaatctgcggaacgtggtggccctcgataccgaggtcgcgtctaatcgcatctactggagcgatctcagccaacggatgatttgctcaacgcagctggatagggcgcatggcgtcagctcctacgataccgtgatatccagggacattcaagctcctgatggcttggctgtggactggatccactcaaatatttactggacggacagtgtactggggacggtctccgtcgcagataccaaaggtgtgaagcggaaaaccctgtttcgagaaaatggaagcaaaccgcgagccatcgtggtggatccggttcatggcttcatgtactggacggactggggtaccccggcgaaaattaagaaaggtggcctgaatggtgtggacatctatagccttgtgaccgagaacattcagtggcctaacggaattaccttggatctgctgtctggaaggttgtactgggtcgactctaagctgcatagcatttcctcaatagacgtgaatggcggtaatagaaaaactatcctggaggatgaaaaacgcctggctcaccctttctcactggcagtgttcgaagataaagtcttctggacggacattatcaacgaggcaatcttttctgcaaacagattgacgggatctgacgtcaacctgttggcggaaaacttgctgtctccggaggacatggtgctgtttcataacttaacgcagcctaggggagtcaactggtgtgagcgcaccaccctgagcaacggtggctgccagtacctgtgtctaccggcgcctcagattaatcctcactccccgaagttcacatgtgcatgccctgatggcatgctgttggcacgtgatatgagaagctgcctgaccgaggctgaagccgctgtcgcgacacaggagacctccacggttcgtctgaaggtgagcagcacggcagtacgcacacagcacactaccacgaggccggtgcctgacacctctcgcctgccgggtgcaaccccgggcctgacaacggtggaaattgtaaccatgtcacatcaggcactcggtgatgtggcgggtcgcggtaatgagaaaaaaccatcttctgtacgcgccctgagcattgtcctgcctatcgtcttgctggtgtttctctgcttgggggtgttcttgctgtggaaaaattggcgcctaaagaacatcaacagcatcaattttgacaacccagtctaccagaaaacgacggaggatgaagtgcatatctgtcacaatcaagatggttacagctacccttctcgtcagatggtgagtctggaagatgatgtggca

SEQ ID NO: 11514 - DNA, 2580 bp, Artificial Sequence
  derived and/or modified sequence
atggggccttgggggtggaaactacgctggacagtggccctactcttagccgctgccggaactgccgtcggggatagatgcgaacgtaatgaattccaatgccaggatgggaaatgtatttcctataagtgggtctgcgatggatctgctgaatgccaggatgggtcagatgagtcgcaggaaacatgcttgtcggtgacatgcaaatctggggattttagttgcggaggaagagtgaatagatgtatcccccagttttggcgttgcgatgggcaggtcgattgcgataatgggtctgatgagcagggatgtcctcccaaaacatgttcacaagatgaatttcggtgccacgacgggaagtgtatcagtcgccagttcgtgtgcgattccgatagggattgtctagacgggtccgacgaggcctcatgtcccgtccttacatgtgggcccgctagtttccagtgcaattcttctacatgtataccccagctatgggcttgcgataacgatcctgattgcgaagacggatctgatgagtggccgcagaggtgtcgaggactgtatgtgttccagggggattcctctccctgttctgcgttcgagttccattgtctctcaggggagtgtatccatagtagttggaggtgcgacggagggccagattgtaaagataaatcagatgaagaaaactgcgccgtagccacatgtcggccagatgaattccagtgttccgatgggaattgcatacatgggtcccgacagtgtgatcgggagtacgattgtaaagatatgtcagatgaagtggggtgcgtgaatgtaacactgtgtgaaggaccaaataaatttaaatgtcactcaggagaatgtataactcttgataaagtatgcaatatggctagggactgcagagactggagtgatgagcccataaaagaatgcggaactgcggcttgtctggataacaatggaggatgctcccacgtatgcaacgccttaaaaataggagccgaatgtctttgtcccgatggattccaattggtcgctcagcgacgctgcgaagatatcgatgagtgtcaagatcccgatacttgctctcagctctgtgtcaacctggaaggagggtataaatgtcagtgcgaagagggatttcagctagatccacacacaaaagcatgtaaggctgtgggatctatagcttatctgttttttactaaccgacatgaggttcgaaaaatgacattagatagatcagaatatacaagtctaatacccaatctaagaaacgtcgtagctcttgatactgaagttgcgtccaatcggatatattggtccgatctgtcccagagaatgatctgctccactcagttggatcgggcccacggggtctcctcttatgatacagtgatatcccgagatatccaggctcctgatgggctagctgttgattggattcattctaacatctattggacagattctgtactgggaactgtctctgttgctgatacaaaaggagtcaaacgcaaaactttatttagagaaaatggatcaaaaccgcgtgcaatcgtggtggatcctgttcacgggtttatgtattggacagattggggaacacccgccaaaatcaaaaagggggggctgaatggagtggatatatattccctagtgactgaaaatattcagtggcctaatggaattacactagatcttctgtctgggcggctgtattgggtggatagtaaactgcattctataagttctatagatgttaacggagggaataggaaaacgatcctcgaagatgaaaaacgacttgcacacccattttcattggcagtattcgaagacaaagtgttctggacagatatcataaacgaagcgatattttccgctaatcggctgacggggtctgatgtgaacctcctggcagaaaatttgctctctcccgaggatatggtgctctttcataacttaacacagcccagaggggtgaactggtgtgaacggactacactctctaacggggggtgccagtacctatgcctccccgcaccacagatcaatcctcattctcccaagtttacatgtgcatgcccagatgggatgctccttgcaagagacatgcggtcatgtctgactgaagctgaggcagccgtcgccacacaggaaacatctactgtaaggttaaaagtgtcttccacagcagtgcgcacacagcatacaactacacgcccggtgcccgatacaagtaggctacccggggccactcccggactcacaacagtcgaaatagtcactatgtcacatcaggctttgggagatgtggctggaagagggaacgaaaaaaaaccatcctccgtgagagctctctcgatagtactgcccattgtgctcctggtatttctatgcctgggggtcttccttctgtggaaaaactggcgcctcaagaatatcaattccatcaactttgataatcccgtctaccagaaaacaacagaagatgaagtccatatctgccataatcaggatgggtattcctacccctcccggcagatggtctcgttagaagatgatgtggcc

SEQ ID NO: 11515 - DNA, 2580 bp, Artificial Sequence
  derived and/or modified sequence
atgggtccttggggatggaaacttcgctggactgtggcactgcttctggctgcagcaggtaccgctgtgggcgatagatgcgagagaaacgagtttcaatgtcaagacggaaagtgtatttcatacaagtgggtctgtgacggcagcgcagagtgtcaggacggcagcgatgagagccaagaaacctgcctgagcgtgacttgtaagagcggggatttttcatgcggtggaagagtgaatcgctgtatccctcagttctggagatgcgatggacaggtggactgtgataatggttcggacgagcaggggtgcccacccaagacctgttcccaggatgaattccgatgtcacgacggtaagtgcatctcacgccagtttgtctgtgattccgatagggactgtcttgatggcagtgacgaggcatcgtgccctgtgttgacctgtggccccgcctcctttcaatgtaactcttcaacctgtattcctcaactgtgggcctgtgacaatgacccagactgcgaagatgggtcggacgaatggccacaacgatgtcgtgggctgtacgtttttcaaggtgactcgagcccatgcagcgcgttcgaattccattgtttgtctggcgaatgtattcacagctcctggcgctgcgatggaggccccgattgcaaagataagtcggacgaagaaaactgtgccgtcgccacctgtaggcccgatgaatttcaatgctctgatgggaattgtattcacggttcccgacagtgcgaccgagaatatgattgtaaagacatgtccgatgaagtgggatgtgtgaatgtgaccctttgcgagggacctaacaagttcaagtgccattcgggagagtgtatcacgcttgataaagtgtgcaacatggcacgcgattgtagagattggagcgatgaaccaatcaaagaatgcgggactgcagcgtgccttgacaacaacggcggatgctcacatgtgtgtaatgccctcaagattggagctgaatgcctgtgtccagacggtttccaacttgtagcgcagcgccgctgtgaagatatcgatgagtgccaggacccagatacgtgctcccagctctgtgttaacctggaaggaggttacaagtgtcagtgtgaagaaggtttccaactggatccacacactaaagcctgtaaggccgtgggcagcattgcatacttgttcttcaccaacaggcacgaggtgcggaagatgaccctggatcggtctgagtatacgtccctcattccaaaccttagaaacgtggtggccctggataccgaagtcgcaagcaatcgaatatactggtccgatttgtcgcaaagaatgatttgttcgacccaactcgacagagcacatggggtgtccagctacgacaccgtcatctcaagggatattcaggcacccgatggtctggcggttgactggatacattcgaatatctactggactgattcggtgctgggaactgtctccgttgctgacactaaaggggtgaagaggaaaactctttttcgagaaaacggatcaaagcctagagcaattgtggtcgatcctgtccatggattcatgtactggaccgattggggtactcccgcaaagattaagaagggtgggctgaacggagtggacatctactccctggtgactgaaaacattcagtggccgaacgggattacgctggatctcctgtctggaaggctttactgggtcgattcgaagctgcactccattagctccattgatgtcaatggcggtaaccgcaagacgatccttgaagatgagaagcggcttgcgcatccgtttagtctcgcagtctttgaagataaggtattttggaccgatatcattaacgaagcgatattcagcgcaaatcggctgactggatccgacgtcaatttgcttgcagagaatctgctctcgcctgaggatatggtgctgtttcataaccttacccagcctagaggcgtaaattggtgtgaacggaccaccctgagtaatggggggtgtcaatacctctgtctgcctgccccacagataaatcctcatagccctaagtttacctgtgcgtgtcccgatggtatgctcctggcacgcgacatgagatcatgtctgaccgaagccgaggcagcagtcgctactcaagagacgagcaccgtgagactgaaggtttcgtcgactgcagtgcggacccaacacactacgaccaggcccgtgccggatacgtcgcgtctccccggagcaacccctggacttaccactgtggaaatagtgactatgtcccatcaggcccttggagatgtggccggtcgtggcaacgagaagaaaccatcgtcggtgagagccctgtcgatcgtgcttcctatcgtgctgctggtgtttctctgcttgggcgtttttctgctctggaaaaactggcggctcaagaacattaactcaattaactttgataatccggtgtaccaaaaaacgactgaagatgaagtgcatatatgccataaccaagatgggtactcctaccctagccggcaaatggtatctcttgaggacgatgtggca

SEQ ID NO: 11516 - DNA, 2580 bp, Artificial Sequence
  derived and/or modified sequence
atgggaccttgggggtggaagttgagatggactgtcgcactgctgctcgccgcggcaggcactgccgtcggagatcggtgcgaacgaaatgagtttcagtgtcaggatgggaaatgtatctcatacaagtgggtttgtgatggcagcgcagaatgtcaagatggttccgatgaatcccaagaaacctgcttgtccgtcacgtgcaaatccggtgacttcagctgtggggggcgagtcaatcggtgcattccacagttttggcgttgtgatgggcaagtcgactgcgataacggttcggatgaacaggggtgtccacccaagacctgttcgcaagatgagtttcgctgtcatgatggaaagtgcatatcgaggcagtttgtctgtgattcggatcgggattgcttggatggatcggacgaagcaagctgtccagtgctcacctgcggtccagcatcctttcaatgtaactcatcgacttgtattccccagctctgggcctgtgataatgaccccgattgtgaggacggatccgatgaatggcctcagagatgtcgcggcctctacgtgtttcaaggtgacagctcaccttgctcagcctttgaattccattgcctgtcgggggagtgtatacatagctcgtggcgctgtgatgggggaccggattgtaaagataagtcagatgaagaaaattgtgcggttgcaacgtgtaggccagatgagttccaatgtagcgatgggaactgtattcatggatcaagacagtgcgatagagagtacgactgtaaagatatgagcgatgaagtgggctgtgtgaatgtgactctctgtgaaggcccaaacaagttcaaatgtcattcgggagagtgcattacccttgacaaagtctgcaatatggcaagagattgtcgagactggtccgatgaaccgattaaagaatgtggcactgcagcatgtttggacaacaacggtggatgcagccatgtgtgtaacgcacttaagattggggcagaatgcctctgccccgacggatttcagcttgtcgcgcaacgtcgctgtgaggacatcgacgaatgtcaagacccagacacctgttctcagctctgcgtgaatctggagggcggatacaagtgtcagtgcgaagagggttttcaacttgatccgcacactaaggcttgtaaggcagtcggttccatcgcctacctcttctttaccaacagacacgaagtgcggaagatgacgctggaccgctcagagtacactagcctcattccaaacctgcgcaacgtcgtggcgctggacactgaagtggcatcaaatagaatttactggagcgatctgtcccagaggatgatctgctccactcaattggatagggcacacggagtctccagctacgacacggttattagccgcgacatccaagcacctgatggacttgccgtggattggatacattctaatatctactggaccgattcagtgcttggcactgtgtccgtggccgacactaagggtgtgaagcgcaagaccctgttccgggaaaacggctcgaaaccccgggctattgttgtggaccccgttcatggattcatgtactggactgattgggggaccccagcaaagattaagaagggaggactcaatggagtggacatttactcgctggtcaccgagaatatccaatggccgaacggtatcaccctggatctcctgtcgggtaggctctattgggtggattctaagctccactccatttcaagcattgatgtcaacggcggaaacagaaagaccatattggaagatgagaaaaggcttgcccaccctttttccctggcagtgtttgaagataaggtgttctggactgacatcattaacgaggcaattttcagcgcaaacaggttgactggatccgacgtgaacctgctggccgagaacctgctttcccccgaggatatggttctgtttcataatctgacccaaccacgaggagtcaactggtgcgaaaggactaccctgtcgaatgggggatgccaatatctttgtttgcccgcaccccaaatcaatccgcacagccccaagtttacctgtgcttgtcctgacggcatgcttcttgctcgtgacatgcgctcctgtcttaccgaagcagaggcggccgtcgccacccaggagacttcaaccgtgcggctgaaagtgagctcgaccgcggtcagaacccagcacaccaccacgaggcctgtgcccgatacttcacgtctccccggagcgactccggggctgaccaccgtggaaattgtgaccatgagccatcaggcgctcggagacgtggccggacgaggtaacgaaaagaagccctcatcggtgcgggcgctttccattgtgcttccaatagtgcttctggtctttctttgtctcggagtgtttttgctctggaaaaactggagactgaagaacatcaattcgataaactttgataacccagtgtaccaaaaaaccactgaggatgaggtccatatctgccataaccaagacggatactcgtacccctcgcggcagatggtgtcccttgaagatgacgttgct

SEQ ID NO: 11517 - DNA, 2580 bp, Artificial Sequence
  derived and/or modified sequence
atgggcccctggggctggaagctgcgttggactgttgcgttgctcctcgccgctgctgggaccgccgttggggaccgatgcgaaagaaacgagttccaatgccaagacggtaagtgcatctcttataagtgggtctgtgatggctctgccgagtgtcaagacggctcagatgagagccaagagacatgcctttcggtgacgtgtaagtcgggcgatttcagttgtggcggtagagttaatcggtgcatcccccagttttggcgctgtgacggccaggtcgattgtgacaacggctccgacgaacagggctgccctcctaaaacgtgttctcaagatgagtttcgttgccatgatgggaaatgcatctcccgacaatttgtgtgcgattccgaccgagactgtttggacgggagcgacgaagcgagctgccctgtgctaacttgtggaccagcatcttttcagtgtaattcctcgacttgcatccctcagctgtgggcctgtgataatgaccccgactgcgaagacgggtctgatgaatggccgcaacggtgccgaggtttatatgttttccagggagattctagtccgtgttccgcattcgaattccattgtctctctggtgagtgcattcattcatcgtggcgttgtgacggagggcccgactgcaaggataagtctgacgaggaaaactgtgccgtggcgacctgcaggcccgacgagttccaatgttcggacggcaattgtatccatgggtctcgacaatgcgatagggaatacgattgtaaagacatgagtgatgaggtcggatgtgtcaacgtcaccttgtgcgaggggccgaataagtttaagtgtcacagtggcgaatgtataacacttgacaaagtttgcaacatggcgcgtgactgtagagattggtctgacgagccaatcaaggaatgcggcacagcggcatgcttggacaacaatggagggtgctcccatgtttgtaatgcccttaagattggcgctgaatgcctgtgtcctgacggattccaactcgtagcgcaacggagatgtgaagatatcgacgagtgtcaagatccggacacttgtagccaattatgtgtgaatttggaggggggttacaagtgtcaatgcgaggagggtttccaactcgacccacacactaaagcttgtaaagctgttggaagtatagcctacttgtttttcaccaatcgacatgaagtgaggaagatgactcttgaccgcagtgagtacacgtcactaattccgaatcttcgaaacgttgtcgcactcgacaccgaagtggcgtctaaccgtatctactggagtgacctctcccaacgcatgatctgtagcacgcagttagaccgggctcacggcgtatcaagctatgatacagtgattagcagagatatccaagcgcccgatggcctcgctgtcgactggattcattcaaatatctattggacagacagcgtgctgggtaccgttagtgtagccgataccaagggcgtgaaacgcaagactctcttcagagagaatggcagcaaaccacgcgcaattgtggtggatcccgtccacggcttcatgtattggacagactgggggactccggccaaaatcaagaagggaggactgaacggtgttgacatctactcgttggtaacggaaaatattcaatggccaaacggtataacgctcgatctcctgagcggtcgtctttattgggtcgacagtaaactgcattctatttcctctatcgacgtgaatggcggtaacaggaaaaccattctcgaagacgagaagcgccttgcccatccatttagtctggcagtctttgaagataaggttttttggacggatatcattaatgaagcgattttttctgcgaaccgcttaactggatccgatgtcaacctgctggcggaaaaccttctcagtcccgaggatatggtcttatttcacaatctgacacaaccccgtggagtcaactggtgtgagcggacgaccctctctaatggcggttgtcagtatctttgtctgcctgccccacagataaatccacactcaccgaaattcacctgcgcttgccctgatgggatgttgttggcacgtgatatgcgcagctgcctgaccgaggcggaagcagcggtggctacccaggagacctcgactgtccggctcaaggttagttcaactgcggtgcgaactcagcacacgaccaccaggcctgtgcccgatacatcacggcttccaggagcgacgccaggactcactacagttgagatcgtgacaatgtcacaccaggcgttaggggatgttgccggacgtggcaatgaaaagaagccctcgtcagttcgagcactgtctatcgtcctccccattgttctccttgtgttcctgtgtttgggggttttcctgttatggaagaattggcgtctcaagaacatcaatagtattaacttcgataaccccgtttatcagaagactacagaagatgaagtgcatatctgtcacaatcaggacggttattcatatcccagccgtcaaatggttagtctagaggacgatgttgcc

SEQ ID NO: 11518 - DNA, 2580 bp, Artificial Sequence
  derived and/or modified sequence
atgggcccttggggttggaaactccgctggacagtggctctgctcctcgctgcagctggcacagcggtgggggaccgatgtgagcggaacgagtttcagtgccaggacggaaagtgcatatcctataaatgggtttgtgacggatcagctgaatgtcaggacggatctgacgagtctcaggaaacttgccttagtgtaacgtgtaagtccggggacttcagttgtggcggccgagtgaataggtgtataccccagttttggcgatgtgatggccaggtagattgcgataatggctctgatgagcaaggctgcccgcctaaaacctgcagccaggatgagttccggtgccacgacggaaagtgcatttctcgacaattcgtgtgcgacagtgatagagattgtttagatggttccgatgaggcttcgtgccctgtgctgacatgcgggccagcctcatttcaatgtaactcaagtacctgtatccctcagctgtgggcatgcgacaatgacccagactgtgaggatggatctgacgagtggccccagcgatgtaggggactgtatgtgttccaaggggactcctcgccatgttccgccttcgagttccactgtctctctggcgaatgcatccattccagctggcgctgcgatggcgggcctgactgcaaagacaagagtgacgaggagaactgcgcagtcgctacctgtcgtccagatgagttccagtgcagtgatggcaattgtatccacgggtctcggcagtgtgatagagagtacgactgtaaggatatgagcgatgaggtcggctgcgtgaatgtgaccctgtgcgagggtccaaacaagtttaagtgccactcaggcgaatgcataacgttggacaaggtgtgcaatatggcaagggactgtagagattggtctgacgaacctattaaggagtgtggtacagctgcatgccttgataacaacgggggatgctcacacgtttgcaacgccctgaaaattggcgcggagtgtctttgtcccgatgggttccagttagttgcgcaaaggagatgcgaggacattgacgaatgccaggatccagacacctgtagtcagctgtgcgtgaacctcgaaggcggatataaatgccagtgcgaggagggcttccaactggacccccacacaaaggcttgtaaggcagtgggtagtattgcctatctattttttactaacaggcatgaagttcggaaaatgaccctggaccggtctgagtacacgagcctcatacccaatcttaggaatgtcgtggcacttgatacagaggtggcaagcaatcgcatctattggagtgatttgagccagagaatgatctgttccactcagctcgatagagcccatggcgttagtagttacgataccgtgattagccgcgacatacaggcacctgatgggttggcggttgattggattcattcaaatatctattggaccgactccgttctgggaacagtctccgtggccgatacaaagggagtcaaaagaaaaaccctttttcgagagaacggatccaaaccaagagcaatcgtggtggaccccgtgcacggcttcatgtactggacagactggggcacccccgcaaagattaagaaggggggcctgaatggagtggacatctattccctggtgacggagaatatacagtggcccaatggcattactctggaccttctgtccggaagactatactgggtggatagcaaattacattccataagttcaatcgatgtcaacggtggcaacagaaagaccattctggaagatgagaaaagactcgcacaccccttttcactggcggtttttgaagataaggtgttttggactgacataatcaacgaagccatattttcagctaacagactgactggatctgacgtcaacttattagcggagaacttactttctccagaggacatggttttattccacaatctgacccagcctaggggcgtcaattggtgtgaacgaactactctgtctaacggcggctgccaatacctctgcctgcctgcacctcagataaatccgcacagccctaaattcacatgtgcctgccccgatggaatgctgctggcccgggacatgcgatcctgcctcaccgaggcagaggccgccgtggcaacccaggagacctcaacggttcgcctcaaagtaagctctaccgctgtgaggacccaacacactacaaccagaccagtccccgacacctctagactaccaggcgccacccctggtctgaccaccgttgagatagtgactatgtctcaccaggcactgggcgatgtggcgggacgtgggaacgagaagaaaccctcttccgtgagagcactttcgatcgtgctccccatcgtccttttggtgttcctgtgtctcggggtgtttttgctgtggaagaactggcgattaaagaatatcaacagtatcaacttcgataatcctgtgtaccagaagaccactgaagacgaggtgcatatctgccacaaccaggatggttatagttatccttcccgacaaatggtgtcactcgaggacgatgtggct

SEQ ID NO: 11519 - DNA, 2580 bp, Artificial Sequence
  derived and/or modified sequence
atgggaccttggggatggaagttgcggtggacggtggcacttctcctcgcagcagcagggactgcagtgggtgatcgatgcgaacggaacgagtttcaatgtcaagatgggaaatgtatctcttacaagtgggtgtgtgatggtagcgcagagtgtcaagacggctctgatgaatcgcaagaaacctgtctgtccgtgacctgtaaatccggggatttttcatgtggggggcgggtgaacaggtgcattccccagttttggagatgcgacggtcaggtggattgcgataacggcagtgacgagcaaggatgccctccaaagacgtgctcgcaagacgaatttcggtgtcatgacggtaaatgtatttcgagacaatttgtgtgcgatagcgaccgcgattgtctggatggttcggacgaagcgtcctgtcctgtgctgacttgcggacctgcgagcttccaatgtaattcgtcaacttgcattccacaactgtgggcttgtgataacgaccctgattgcgaagatggctcagacgaatggccgcagagatgtcgcggactttacgtgttccagggtgattcgtccccttgcagcgcattcgaattccattgtctgagcggagagtgcatccattcctcctggcgatgcgatggaggtccagattgtaaggataaatccgacgaagaaaactgtgccgtcgcaacttgtcgacctgatgagtttcaatgctcagacggaaattgtattcacggttcccgccaatgtgatcgcgaatacgattgcaaagatatgtcggatgaagtcggctgtgtgaacgtcaccctgtgtgaaggaccgaacaaattcaaatgccattcgggggaatgcattaccctggataaggtctgcaacatggcaagagactgccgcgattggtcggacgaacccattaaagagtgcgggaccgcagcctgtttggataacaacggtgggtgcagccacgtctgtaacgccctgaaaatcggggcggaatgcctgtgtccagacggattccaactggtcgcacaaagacgttgcgaggacatcgatgaatgtcaagatcccgatacctgctcccagctgtgtgtgaacctggagggtggatacaagtgtcagtgtgaagaaggattccaacttgatccacacactaaggcatgtaaggcagtgggttccattgcctaccttttctttacgaacagacatgaagtccgcaaaatgactctggacagatcggaatacacttcattgattcctaaccttcgaaatgtcgtggcactggatactgaggtcgcatcgaaccgtatttactggtcggatctctcgcaacgaatgatatgttccactcaactggaccgcgcgcatggagtgtcgtcctacgatacggtcatttcgagagacatccaggcgccagacggactcgcagtggattggattcactcgaacatttactggaccgacagcgtccttggtaccgtgtcggtggcagacaccaaaggtgtgaagaggaaaactctttttcgggaaaatggatcgaaaccacgagcaatcgtggtggatccggtgcacggctttatgtactggaccgattggggaacgcctgctaaaatcaagaaaggaggcctgaatggtgtcgacatttactcccttgttaccgagaatatacaatggccaaacggtataacccttgaccttctgagcggacgcctgtactgggtcgactcaaagctgcattcaatttcgtcaatcgacgtaaacgggggcaatcggaaaactattcttgaagatgaaaagaggctggcgcatcccttctccctggcagtgtttgaggacaaggtgttctggactgacataatcaacgaagccattttctcagcaaaccggctgacgggtagcgatgtcaaccttctcgccgaaaacctgctctcacctgaggacatggtcctgttccataatctcacccaacctagaggcgtgaattggtgtgagagaactactctctccaatggggggtgtcagtacctttgcctgccggctccacagataaacccccattcccctaagttcacttgcgcctgccctgacggtatgctcctggcaagagacatgcgctcgtgtctgactgaagcagaagcagccgtggcaacccaggagactagcactgtccggcttaaagtctcgtccaccgctgtgaggacccaacataccactaccagaccggtgcccgacacttcccgcctgcctggagcaactccaggactgaccacggtggagatagttaccatgagccatcaagcactcggtgatgtggcagggagagggaatgaaaagaagccatcatcagtccgcgccctgtccatcgtgctcccaattgtgctgcttgtgtttctctgtctcggcgtttttctcctttggaagaactggagacttaagaacatcaattcaatcaattttgacaacccggtgtaccaaaagactactgaggacgaagtgcatatttgtcacaaccaggatggctactcctacccttcacggcagatggtgtccctcgaggatgacgtcgca

SEQ ID NO: 11520 - DNA, 2580 bp, Artificial Sequence
  derived and/or modified sequence
atggggccgtggggatggaaattgcgttggaccgtagccctgttgttagcagcggcgggtactgcagtcggggatagatgtgaaagaaatgagtttcagtgtcaagatggaaaatgtatttcctataagtgggtatgtgatggctctgccgaatgccaggacggatcagatgaaagtcaggagacatgtcttagtgtaacatgcaaatcaggagactttagttgcggaggacgcgttaatagatgtataccacaattttggcgttgcgatggacaggtagattgtgataatggctcagatgagcaagggtgcccacctaaaacatgttctcaagatgaattccgatgccatgatgggaaatgcattagtcgtcaattcgtatgcgattcggacagagattgtttggatggcagtgatgaagcatcatgcccagttcttacttgcggacccgctagttttcagtgtaatagtagtacctgcataccgcaattgtgggcctgcgataacgatccagattgtgaggacggatctgatgaatggccacaacggtgtagaggactatatgtttttcaaggggactcatcaccgtgctctgctttcgagttccactgtttgtccggggaatgcatacatagtagttggagatgtgatggaggtccagactgcaaagataaatcagacgaagagaattgcgcagttgcaacatgccgaccagatgaatttcaatgctcagacgggaattgcatccacggatcacgacagtgcgaccgagaatacgattgcaaggatatgtctgatgaagtgggttgcgtgaatgttactttgtgtgaaggaccaaacaaatttaaatgccactctggagaatgcatcacactagataaagtttgtaatatggctcgggattgtcgtgattggtcagacgaaccgataaaagagtgcggcacagctgcatgcctggataacaatggaggttgttctcacgtgtgcaatgcattgaagatcggagctgaatgtctttgccccgatggattccaactggttgcccaaagacgatgtgaggatattgatgaatgccaagatcccgatacttgctctcaactatgtgttaatttggaaggaggctataaatgccaatgtgaggagggatttcagttggatccacatacaaaggcatgcaaggcagtcggatccattgcttacctgttttttacgaacagacatgaagtcagaaaaatgacacttgatcgctcggaatatacaagtttgatcccaaacctccgaaacgttgttgctcttgatacagaagttgctagcaaccgaatctactggtcggatcttagtcagcggatgatctgctctacacagctggaccgtgcacacggagtatcgtcgtatgatacagttatttctcgagacattcaagctcctgatggattagccgtcgattggatacactctaacatttattggactgattccgttttggggactgtgtctgtagctgatacaaagggagttaaaagaaagaccttgtttagagagaatggttctaaaccccgagcaatagtcgtcgatcctgtgcacggttttatgtattggacggattggggaaccccagcaaaaatcaagaagggaggtctcaatggcgtagatatttactctttggttacggaaaatattcaatggccaaatggaatcacacttgatcttttatcgggaagattgtactgggtggatagtaaacttcacagtatctcgtcaattgatgtcaacggcggaaacagaaagacgatcttggaagatgagaaacgattggcgcacccattttctctggcggtgttcgaggacaaggtattttggactgatatcattaatgaagctatcttctcagcgaatcgacttacgggtagcgatgtcaatttgttggcagagaacctcctttcacctgaagatatggttttatttcacaatcttacgcaaccgcggggagttaattggtgcgaacgaacgactttatcaaatgggggttgtcaatatctttgcctccctgcgccgcagattaatccacattctcctaaattcacctgcgcttgtccagacggaatgctccttgcgcgcgatatgcgatcctgcctcacagaagccgaggctgcagttgcaacacaagaaacttctacagttagactcaaggtatcatcgaccgcagtacgaactcagcacacaacaacacgtccagtgccagacacaagcagactacccggggccaccccaggacttaccacagtagaaattgttactatgagtcatcaagccctgggagacgtggctggccgaggaaatgaaaaaaagccttcttcggttcgagctttgtccatcgttctgccaattgtccttttggtcttcttgtgccttggcgtgtttctgttgtggaagaactggaggttgaagaatattaatagcattaatttcgataatccagtttatcaaaaaacaacggaggacgaagtgcatatctgtcataatcaggatggatattcgtatccttccagacagatggtgagtctcgaagacgatgtggct

SEQ ID NO: 11521 - DNA, 2580 bp, Artificial Sequence
  derived and/or modified sequence
atgggaccatggggctggaaacttcgttggactgtggcactgctgctggcagcagcgggcactgcagtcggcgaccggtgtgaacgtaacgaattccagtgtcaagatgggaagtgtatttcgtacaagtgggtctgtgacggttcggcagagtgccaagatggttccgacgaatcacaagaaacttgtctgagcgtgacctgtaagagcggcgacttcagctgcggagggagggtgaatcggtgtattccccagttttggagatgcgatgggcaggtcgattgtgataatggttcagacgaacagggatgtccaccaaagacttgtagccaggacgaattcagatgtcatgatggtaagtgcatttcccggcagtttgtgtgtgatagcgatagagactgtttggacggaagcgacgaagcctcgtgtccagtgcttacttgcggtcctgcctcatttcagtgcaattctagcacctgcatcccacaactgtgggcctgtgataacgatcccgactgtgaggacggatcggatgaatggccacagcggtgcagaggtctgtacgtgtttcagggagattcgagcccttgttccgcgtttgagtttcactgtctctcgggagaatgcatccactcctcgtggcgctgcgatggtggacccgattgcaaggacaagtcggatgaggaaaattgtgcagtggctacctgcagaccagacgaatttcaatgtagcgatggaaactgtatccacggttcaagacagtgcgaccgcgagtatgactgcaaggatatgtccgatgaggtcgggtgcgtgaacgtgactctttgcgagggtcctaacaaattcaagtgccattcaggtgaatgcatcacgctggacaaagtgtgtaacatggcgcgcgactgtagggactggagcgatgaaccgattaaagaatgtggaactgcagcatgtctggacaataacgggggatgttcgcatgtgtgcaacgcactcaagataggtgcagagtgtctgtgtccagacggatttcagttggtcgcacagcgccgatgcgaagatattgacgaatgccaagaccctgacacctgttcccagctttgcgtcaatttggaaggggggtataagtgccaatgcgaagagggattccaacttgatcctcataccaaggcctgtaaggcagtcggatccatcgcatacctgttctttaccaacagacacgaagtgaggaagatgaccctggatcgttccgagtacacgagcctgatccctaacctgcgcaacgtcgtggcccttgatactgaagtggcatcgaatagaatttactggtcagatctgtcgcagcggatgatttgtagcacccaacttgatagggcacatggagtgtcgtcgtacgatactgtgatatctcgcgatatccaagcaccagatggattggccgtcgattggatacattcaaacatttactggactgactcggttctggggaccgtttcggtggctgacaccaagggagttaagcggaaaaccctgttcagggaaaacggatccaaacccagagcaatagtggtggaccccgtgcacggatttatgtactggaccgattgggggaccccagccaagataaagaagggaggactcaacggagtggacatatactcgctcgtgactgagaatattcagtggccaaacggaattactctggacctcctctcgggacgtctctactgggtggattcgaaacttcattccatttcgtcgatcgatgtcaatggcgggaataggaaaactattctcgaagatgaaaagcggctggcacatccatttagcttggccgtctttgaagataaggtgttctggactgacattatcaatgaagcaattttctcggcaaacagactgaccggctccgatgtgaatctgcttgctgaaaatctgttgtcccccgaagatatggtcctttttcataacctgactcagcctaggggcgtgaactggtgtgaaagaactaccctctcgaacggaggatgtcagtacctttgtttgcctgcgccccaaatcaatccccactcaccgaagtttacttgtgcttgtcccgatggcatgttgctcgcacgtgatatgcgcagctgccttactgaggcggaagcagccgtggcaacccaagagacttccactgtcagactgaaagtgtcctcaaccgctgtgcgtactcagcacactaccactcggcccgtgcccgacacctcaaggctgcctggcgccaccccgggtctgactactgtggaaatcgtgaccatgtcgcaccaagccctgggtgatgtggccggacggggaaacgagaagaagccctcatccgtgcgtgcacttagcatcgttcttcctatagtcttgcttgtgtttctgtgtcttggagttttccttttgtggaagaactggcgcttgaagaatatcaactcgatcaatttcgataacccagtctaccaaaagaccaccgaggatgaggtgcatatatgtcataatcaagatggatacagctatccttcacggcagatggtgtcccttgaggatgatgtggca

SEQ ID NO: 11522 - DNA, 2580 bp, Artificial Sequence
  derived and/or modified sequence
atgggaccatggggttggaagctgcgatggactgttgccctgctgctggccgctgctgggacagcagtaggcgataggtgtgaaaggaatgagtttcagtgccaagacggaaaatgtatttcatacaaatgggtgtgcgatggcagtgccgaatgtcaggatgggagcgatgaatctcaagagacatgcctgtctgtgacttgcaagagtggtgacttctcatgtggtggccgcgtaaaccgctgcataccacagttttggcggtgcgatggccaggtggactgtgacaatgggtcagatgaacagggctgtcctcccaaaacgtgtagtcaggacgagtttagatgtcacgatggcaagtgcattagccggcagtttgtatgtgactcagatcgcgattgcctcgacggttctgacgaggcctcttgccctgtgctgacatgtggaccagcctcattccaatgcaacagcagtacgtgcatcccacagctgtgggcttgtgacaatgacccagactgtgaagatggttcagatgagtggccacaacggtgcaggggtttatatgtcttccagggagattcgtccccctgctcggcctttgagtttcactgcctgagtggggagtgcatccacagtagctggagatgtgacggcgggcctgattgcaaagacaagagtgatgaagagaactgtgctgtagctacatgtaggcctgatgagtttcagtgcagcgatggaaattgcatacacgggtcccgacagtgcgacagggagtatgactgcaaagacatgtccgacgaagtggggtgtgtgaatgttacgctctgtgagggccctaataaattcaaatgtcatagtggcgagtgcatcacactagacaaagtttgtaatatggcacgagactgcagagactggtcagacgagcctataaaggagtgcgggactgcggcttgcctggataataacggcggttgctcccatgtttgcaacgcactgaagataggcgcggaatgtctttgccctgatgggtttcagctggtcgcccaacgtagatgcgaggatatcgacgaatgtcaagatcccgacacatgtagccagctgtgtgtgaacctggagggaggatataaatgccagtgtgaagagggcttccagctggatccccacactaaagcctgcaaggccgtggggtccatcgcctacctgtttttcacgaatagacacgaggtgaggaagatgaccctggatagaagcgagtatacaagcctaattcctaatcttcggaatgtggtcgccctagatactgaagtggcctctaaccggatctattggagcgacctaagtcaacgcatgatctgtagcactcaactggacagggcccacggcgtgtcatcatatgacacagtgatttcacgagacattcaggcccccgacggactagccgtggattggatacactcaaacatttattggacagactccgtcctagggacagtttcagtggctgataccaaaggcgttaagaggaaaacacttttccgcgagaatgggtcgaagcctagggcaatcgtcgtagaccctgtccatgggttcatgtactggaccgattggggaacccccgctaaaatcaagaaggggggactcaatggcgtggatatttatagcctcgttacagaaaatattcagtggccaaacggtatcaccctcgatctgctgtctgggcggctctattgggtcgactccaagctgcactctatctcatcaatcgatgtcaacggcggaaaccgcaagaccattttggaggacgagaaaaggcttgctcatcctttcagcctggctgtgtttgaggacaaggtcttctggaccgatatcattaacgaagcaatcttcagcgctaaccggctgaccggttctgatgtaaaccttctggctgaaaatttactcagtcccgaggacatggtgctctttcataacctgacacagcctcggggcgtcaactggtgtgagcggacaacgctctcgaatgggggttgtcagtatctgtgtctgccagccccacagattaaccctcactctccaaaattcacctgtgcatgcccagacggaatgctcttggctcgcgatatgagaagttgcctgactgaggcggaggcagccgtggctactcaggaaacatctacagtgcggttgaaggtgtctagtacggctgtgcggacccagcacacaactactagacccgtgcctgatacgagccgcctgccaggagctacccccggactcacgaccgtcgagatagttactatgtcccatcaggccctgggcgacgtggcaggccggggaaatgagaaaaaaccctcctccgtccgcgctctgtcgattgttctgccaatcgtgcttttagtgttcctgtgtctgggcgtcttcctcctgtggaagaactggcggttaaagaatattaacagcattaacttcgacaatcccgtctatcagaagaccacagaggacgaagtgcatatttgccacaaccaggacggttacagttacccctctagacagatggtatccttggaagatgacgtcgcc

SEQ ID NO: 11523 - DNA, 2580 bp, Artificial Sequence
  derived and/or modified sequence
atgggaccgtggggatggaagctgcgctggaccgtggccttgctgctggcagccgcgggtacggcagtgggggaccgctgtgaaagaaatgaattccagtgtcaggacggaaaatgcatttcctacaagtgggtgtgcgacggcagcgccgaatgtcaagatggctccgatgaatcgcaagagacttgccttagcgtcacctgtaagtcaggagatttctcttgcggggggcgcgtgaaccggtgcatcccacaattctggcggtgcgatggacaggtggattgcgataacggatccgatgaacagggatgtccgccgaaaacctgctcgcaggacgaattcagatgccacgacggcaagtgcatctcacgccagttcgtgtgcgactcagaccgcgactgcctggatggctcggatgaggcttcatgcccagtgctgacttgcggacctgcttcattccagtgcaactccagcacctgcatcccccaactctgggcctgtgacaatgaccctgactgcgaagatggatccgacgagtggccacaacggtgccgggggctgtacgtttttcagggagattcgtcgccgtgctcggccttcgagtttcactgcctctccggagaatgcatccacagcagctggaggtgcgatggtggcccggactgcaaggacaaatcggacgaagagaattgcgcggttgcaacttgccggccggatgagttccaatgcagcgatggaaactgcatccatggatccagacagtgcgaccgggagtacgattgcaaagatatgtcggacgaagtgggatgcgtgaatgtgaccctctgtgaaggacctaacaagtttaagtgtcactcgggagagtgcatcaccctcgataaagtctgcaacatggctcgggactgcagagactggtcggatgaaccgatcaaagaatgcggcaccgccgcctgcttggacaataacggaggatgcagccacgtgtgcaacgcactgaagattggcgcagaatgtctgtgtcccgacggattccagctggtggcgcagcgcaggtgcgaggacatcgatgagtgccaagatccggatacttgcagccaactgtgcgtgaacctggagggtggatacaaatgccagtgtgaggaggggttccaactggatccgcacaccaaagcatgcaaggcggtgggatcgatcgcttacctgttcttcactaaccggcacgaagtgcgcaagatgaccctcgataggagcgaatacacctccctgatcccaaacctccgcaatgtggtggcgttggatactgaagttgcttcaaatagaatctactggtcggatctctcgcagcgcatgatctgctccacgcagctggacagagcccacggagtttcctcatacgataccgtgatctccagagacatccaagctccggacggacttgcggtggactggattcactccaacatctactggactgattcagtgctggggactgtgagcgtggctgatactaaaggcgtgaaacggaaaacgctcttcagagagaatggatcaaagccccgcgctattgtggtcgacccggtgcatggattcatgtactggaccgattggggaacgccggcaaaaatcaagaaaggtgggttgaacggcgtggacatctactccttggtcaccgaaaacatccagtggccgaatggaatcactctggatctgctctccggtcggctgtactgggttgactcaaagctgcattcaatctcctctatcgatgtgaacggaggaaatagaaagacgatcttggaggacgagaagagactcgcacatccattctcgttggctgtgttcgaagataaggttttctggactgatatcatcaacgaggccatctttagcgccaataggcttactggctcggatgtgaacctcctggcagagaacctgctgagcccggaggacatggtgctgttccacaacctcacccaaccacgcggagttaactggtgcgaacgcaccaccctctcgaacggcggatgccagtacctctgccttccagccccgcagattaatccccattcgccgaagtttacctgcgcctgccctgacgggatgttgctggcacgggatatgcgatcgtgtttgaccgaggctgaggcggccgtcgcgactcaggagacttcgaccgtccggctcaaggtgagctcaaccgcagtgcgcacgcaacatactaccacgcgccctgtcccggacacctcgcgtctcccgggcgctaccccgggattgaccaccgtcgaaattgtgacgatgagccatcaagccctgggtgatgtggccggacgcggaaacgaaaagaagccttcgtcagtccgagcactttccatcgtgcttcctattgtgctgctggtattcctctgcctgggtgttttcctgctctggaaaaactggcgcttgaaaaacatcaattccatcaactttgacaacccagtctaccaaaagaccactgaggatgaggtgcatatctgtcataaccaggacgggtacagctacccatcgcgccagatggtgtccctggaggatgatgtggca

SEQ ID NO: 11524 - DNA, 2580 bp, Artificial Sequence
  derived and/or modified sequence
atggggccgtggggttggaagttgcggtggaccgtcgccctgctgctggcagcggctggtaccgccgtgggcgaccgctgcgagcggaatgagtttcaatgtcaggatggaaaatgcatcagctacaaatgggtgtgtgatggatcagctgaatgccaagacggaagtgacgagtcgcaggagacttgcctgtcagtgacctgcaaatccggagatttctcgtgcgggggccgggtgaatcgctgcatcccgcagttctggcggtgtgatggtcaagtggattgcgacaacggctcggacgaacagggatgtccaccgaaaacttgttcacaggacgaattccgctgccatgatggaaagtgtatctcacggcagttcgtctgcgattccgacagggactgccttgacggaagcgacgaagcctcctgtccggtgcttacttgcggcccggcctcgtttcagtgcaactcgagcacgtgtatcccacaactttgggcctgcgacaatgacccggattgcgaggacggctcagacgaatggccccagcggtgtagagggttgtacgtgttccagggcgactcatccccctgctcggcatttgaattccattgtctctccggcgagtgcattcattcatcctggaggtgcgacggaggtccggactgcaaggacaagagcgacgaagagaattgcgccgtggccacttgcagaccagatgaattccaatgttcagacggcaattgtatccacggatcacgccagtgcgacagggaatacgactgtaaagacatgtcggatgaagtcggatgcgtgaacgtgaccctctgcgagggaccgaacaagttcaagtgtcactccggagagtgtataacgctggacaaggtgtgcaacatggcccgggattgccgcgattggtcggatgaaccgatcaaggagtgtggaaccgcggcctgcctggacaacaacggaggatgctcacatgtgtgtaatgccctcaaaatcggagcggagtgcctgtgcccggatgggttccagttggtggcccagcggcgctgtgaagatatcgacgagtgccaagacccggacacctgctctcagctctgcgtcaatttggagggcggatacaagtgccagtgcgaagagggattccagctggacccgcacactaaggcttgcaaagccgtcggatcaatcgcatacctcttcttcaccaaccgccacgaagtgcggaagatgactcttgaccgatcggaatacacttcgctgatcccaaacctgcggaacgtggtggcccttgacactgaagtcgcctctaatcggatctactggtccgatctgagccaaaggatgatctgctctacccaactggaccgggctcatggagtttcgtcgtacgacactgtgatcagccgcgacatccaggcgccggacggactcgccgtggattggatccattcgaacatctattggaccgattccgtcctggggactgtcagcgttgctgacactaagggcgttaagagaaaaaccttgtttagagaaaatggctccaagcctcgggccatcgtggtcgatccggtgcacggattcatgtattggaccgactggggtactccggcgaaaatcaagaaaggcggactcaacggagtggacatctacagcttggtgaccgaaaacatccagtggcccaacggaatcacgcttgacctgctgagcgggcgcttgtattgggtcgacagcaagctgcatagcatctcatccatcgacgttaacggaggcaatcgaaagactatcctcgaggacgagaagagattggcgcatccattcagcctggccgttttcgaagataaggtgttctggactgatatcatcaacgaagcaatcttttcggcgaaccggctgaccggctcagatgtgaaccttctcgccgaaaatctcctctcgcctgaagatatggtgctgttccacaacctgactcaaccgcgcggcgtcaactggtgcgaacggaccaccctctcaaacggcggctgccaatacctgtgcctgccggcaccgcagatcaatccgcactccccgaagtttacgtgtgcctgtcccgacgggatgctcctggcacgcgatatgcgctcctgccttaccgaagccgaggccgcggtggcgacccaagaaacctccactgtccggctgaaggtgagctccaccgccgtgcggacccagcacactaccacccgcccggtgcccgatacttcaagactgccgggcgccaccccggggctgaccactgtcgaaatcgtcacgatgtcccatcaagcgctgggagatgtcgctggacggggaaatgagaagaagccgtcgtcggtcagagccctgtcgatcgtgctgccgatcgtgctcctcgtctttctttgcctcggagtctttcttctctggaagaactggcgccttaagaacatcaattccatcaacttcgataacccggtgtaccaaaagaccactgaagatgaagtgcacatctgccacaatcaggacggatacagctacccttcccgtcaaatggtttccttggaggacgacgtggca

SEQ ID NO: 11525 - DNA, 2580 bp, Artificial Sequence
  derived and/or modified sequence
atgggaccttggggatggaagctgaggtggacggtggcgctgttgctggcggcagcaggtaccgcagtgggagataggtgcgagcgaaacgagtttcaatgccaggacggtaagtgcatttcctacaagtgggtgtgtgatggatcagccgaatgtcaagacggatcggacgagtctcaagaaacctgcctgagtgttacttgtaaatccggagacttcagctgtggtggtcgcgtgaaccgctgcattcctcagttttggcgctgtgatgggcaggtggattgtgataatgggtcggacgaacaaggttgcccacctaagacttgctcgcaagatgaatttagatgccatgacggtaagtgtatttccagacagttcgtgtgcgacagcgatcgagactgccttgacggctcggatgaagcctcgtgcccagtgctgacttgtggtcctgcctccttccagtgtaactcatcgacctgtatccctcaactgtgggcatgtgataacgatccagattgtgaagatggatctgatgaatggccacagcggtgtagaggactgtacgtttttcaaggtgattcgagcccctgttcagcatttgagttccattgtcttagcggtgagtgtattcattcgagctggcgttgcgatggaggcccagattgcaaagataagtccgacgaagagaattgcgcagtcgcaacttgtcgcccggacgaattccaatgttcagacggtaactgtattcacggctcaagacaatgtgatagagagtacgattgcaaggatatgtcggatgaggtgggctgtgtgaacgtgactctgtgcgaaggcccgaacaagttcaaatgtcacagcggcgaatgcattacgctggataaggtgtgcaacatggcacgggattgtcgcgattggtccgatgaacccatcaaggaatgcgggacggcagcttgtcttgataacaacggaggctgcagccacgtgtgtaatgcgctgaaaattggagcagaatgtctgtgtccagatggatttcagctggtcgctcaacgacgctgtgaagatatcgatgaatgtcaagatccagacacctgtagtcaactgtgtgttaatctggagggcggctacaagtgtcagtgcgaagaaggatttcagctcgaccctcatactaaggcatgcaaggcggtgggttccatcgcatacctcttctttactaaccggcatgaagtgcgcaagatgactctggacagaagcgaatacacctccctgattccaaatctgaggaacgtcgtggcactggatactgaagtggcatccaatcggatttactggtctgatctgtctcaacgaatgatctgctccacgcagctcgacagagcacatggggtttcttcctatgatacggtgatttcgagggatatccaagctcctgatgggctggctgtcgattggatacattcaaacatctactggaccgatagcgttctcgggactgtgagcgtggcagataccaagggtgtgaaacgcaaaacgctcttcagggagaatggctcgaaaccaagagccattgtcgtcgatcctgtgcatggattcatgtactggacggactggggtactcccgctaaaatcaaaaagggcggactgaatggagtggacatctactcgcttgtcaccgagaatatccagtggccaaatgggattacccttgaccttctttccggtcgcctctactgggtggatagcaagctgcattcaatctcgtccatagatgtgaacggtggcaaccgtaagacgattcttgaggacgagaagcggctggcgcaccctttctcacttgcagtgttcgaggataaagtgttttggaccgacataatcaacgaggccatcttttccgcgaatcggttgactggtagcgacgtgaatctcctcgccgaaaacctgctttcgccggaggacatggtcttgtttcataacctgactcaacctcggggagtgaattggtgtgaacgcactactctttccaacgggggatgccaatacctctgtttgccagccccacagataaacccgcattcgccgaagtttacttgcgcttgtcccgatggtatgctgctggcgagagatatgaggtcgtgtctcacggaagcagaagcagcagtcgcaacccaggaaacctcaaccgtgaggctgaaggtgagcagcacggcagtgagaacccagcataccacgactaggcctgtgcctgacacgtcgaggctgccaggtgccaccccaggtttgaccactgttgaaatagttacgatgtcccaccaagccttgggggatgttgccggccgcggtaacgagaagaagccctcatccgtgcgggcactttccatagtactccctattgtgctgttggtctttctgtgtctcggtgtttttcttctctggaaaaactggcgtcttaagaacattaactcgatcaacttcgataatcctgtgtatcaaaagaccaccgaagatgaagtgcacatttgtcacaatcaggatggctacagctacccttcgcggcaaatggtcagcctcgaggacgatgtcgca

SEQ ID NO: 11526 - DNA, 2580 bp, Artificial Sequence
  derived and/or modified sequence
atgggaccctggggatggaaattgcgttggacagtggcactcctcctcgcagctgctggtacagccgtgggggaccgttgcgagcgtaacgaatttcagtgccaagatggaaagtgcatttcctataaatgggtgtgcgatggcagcgccgagtgtcaggacggctcagatgagagccaggagacctgcctgagtgttacctgcaagagcggagattttagttgcggaggacgcgttaataggtgcattccgcaattctggcggtgcgacggacaggtcgactgtgacaacggatctgatgagcagggatgcccacccaaaacctgtagccaggacgaatttcgctgtcacgatggaaagtgtatctctcgacagtttgtttgtgattcagatagggactgcctggatggtagcgatgaagccagttgtccggtgctcacttgcgggcccgcaagcttccagtgcaatagctcaacctgtattccacagttgtgggcttgtgacaatgacccagattgtgaagacggctccgatgagtggcctcagaggtgccgtgggctgtacgtcttccagggagatagcagcccatgtagtgcattcgagtttcattgcctttccggcgagtgcatccattcctcttggaggtgcgatgggggcccagactgcaaagataagtcagatgaagagaactgcgctgtcgccacttgcaggccagatgaatttcagtgttcagacggcaattgcatccatggatctcggcaatgcgacagggagtatgattgtaaagatatgtcagacgaagtgggatgcgtaaatgtcactctatgtgaaggacctaataaattcaagtgtcacagcggggaatgtataaccctagacaaagtgtgcaacatggcaagggactgccgggattggtctgacgagcctataaaggaatgcggcaccgcagcatgtctcgacaacaatggcggatgttcacatgtgtgcaatgcgttgaagatcggggcggagtgcctgtgcccagacggattccagttagtggcccagcgccgctgcgaggacatcgatgagtgtcaggatcctgacacctgctcccagctgtgcgtcaatctcgaaggaggctataagtgccagtgtgaggagggattccagctggatccccatacaaaggcttgcaaagcagtgggatccatcgcgtacttgttcttcactaatcgccatgaagttcgcaagatgactcttgaccggtcagagtatacgagtctcatccctaatctcaggaacgttgtcgcactggatacagaggtggcttctaacagaatatattggtcggacctgtctcagaggatgatctgcagtacgcagttagacagggcccacggagtgtcaagctacgataccgttatcagcagagacatccaggctcctgatggcctggcagttgactggattcacagcaacatctattggactgatagtgtcctgggaaccgtcagcgtggccgacaccaagggcgtgaaaaggaagactctgtttagagagaatggctcaaagccccgcgcaatcgttgtggacccagtgcatggcttcatgtactggactgattggggaactcctgcaaaaatcaaaaaaggaggactgaatggcgttgatatttacagcctcgtcaccgaaaatatccagtggcctaatggcatcactctagacctactgagtggccgcctttactgggttgacagcaaattgcactccatcagcagcatcgacgtgaatggtggaaacagaaagaccatcctagaagacgaaaagcgtctggcccatccctttagcctggctgtatttgaagataaggtgttttggacagacatcatcaacgaagccattttctcagcgaatcgcctcacgggctcggatgttaacctgctcgcagagaatttactgtcccccgaagacatggtgttatttcacaacctaacacagcctaggggtgttaattggtgcgaacgtacaaccttgagtaacggtggatgccaatacctgtgtcttccagcacctcaaatcaaccctcatagcccaaaatttacctgcgcctgccccgacggaatgctccttgcccgtgacatgcgctcatgcttgactgaggccgaagccgctgttgccacccaagagactagcacagttaggctgaaggtgtcttccactgccgtcagaactcagcatacaaccactcggcccgttccagacaccagtaggcttcctggagctactccaggcctcactaccgtggaaatagtaactatgagccatcaagccctgggcgatgtggctggaaggggtaacgaaaagaaaccatctagtgttcgagccctcagcattgttttgccgatagtacttctggtgtttctctgcctgggcgtttttctgctttggaaaaattggagattgaaaaacatcaacagtatcaacttcgacaatccggtttaccaaaagaccaccgaagatgaagtgcatatttgccacaatcaagatggttattcttatccaagcagacagatggttagcctggaggatgacgttgca

SEQ ID NO: 11527 - DNA, 2580 bp, Artificial Sequence
  derived and/or modified sequence
atgggaccgtggggttggaagctgaggtggactgtggctctcctcctggccgcagctggaaccgcggtgggagacagatgcgagaggaacgagttccagtgccaggacgggaagtgcatctcttacaagtgggtgtgcgatgggtccgcagaatgccaagatggctccgatgagagccaagaaacctgcctgtcggtgacctgcaaatccggcgacttctcatgcggcggacgggtgaaccgctgtatcccacagttctggcggtgcgacggtcaagtggactgcgataatggctcggatgaacaaggatgtccgccaaagacttgcagccaggacgagttcagatgtcacgacgggaagtgtatctcccgccaattcgtgtgcgattcagacagagactgcctggacgggagcgacgaagcctcgtgtccggtgctcacctgtggaccggcctcattccagtgcaactcctcgacctgtatcccgcagctgtgggcttgcgataacgacccagattgtgaggatggttcggatgagtggccgcaacggtgccggggcctgtacgtctttcagggagactcatcaccatgctcagcattcgagttccactgcctgtccggtgaatgtattcactcatcatggaggtgcgacggaggcccggactgcaaggacaagtcggatgaagagaactgcgccgtcgcaacgtgccggcctgacgaattccaatgctcagatggaaattgcatccatggaagccgtcagtgcgacagggaatatgactgcaaggatatgtcggatgaggtcggatgcgtgaacgtgactctgtgtgaggggccaaataagttcaagtgccactccggggagtgtatcactcttgacaaagtctgtaacatggcccgggactgccgggattggagcgacgaaccgatcaaagaatgtggaactgctgcctgtctggacaacaatggcgggtgctcgcacgtctgcaatgcacttaagattggggcggaatgcctctgcccggacggattccagctggtggctcagcgccggtgtgaggacatcgacgaatgccaggatccggacacctgctcccagctgtgcgtcaatctggagggaggatacaagtgccagtgtgaagagggtttccaactggacccgcatactaaggcgtgcaaggccgtcggttccatcgcttacctcttcttcaccaatcgccacgaagtgagaaagatgactctcgaccggagcgaatacacttcgctcatcccgaacctccggaacgtggtcgccctggacactgaagtggcgtcaaaccgaatctactggtctgatctgtcccaacggatgatctgctcgactcaactggaccgcgcgcacggcgtcagcagctacgatactgttataagccgcgatatccaggccccggatggcctggctgtcgactggatccactccaacatctactggacggattcagtgctgggaactgtgtcggtggctgacactaagggcgtgaagcggaaaacgctctttcgcgagaatggcagcaagccgcgcgcaatcgtggttgacccagttcatggcttcatgtactggactgactggggaactccggctaagatcaagaagggaggcctcaacggggtcgacatctatagcctggtgacggaaaacatccagtggccaaacggaatcactctggacctcctgtcgggcagattgtattgggtggactcgaaacttcattcaatctccagcatcgatgtcaacggtggaaatagaaagactatcctggaagatgagaagcgcctggcgcatccattctcattggccgtgttcgaggataaggtcttttggaccgacattatcaatgaagcgatcttctcagccaaccgcctgaccggatcagatgtcaatttgctcgccgagaacctcctgtcgccggaggacatggtgctgttccataatctcactcaacctcgcggcgtgaactggtgcgaacggacgactctgagcaacggaggatgccagtacttgtgtctccctgcccctcagattaatccgcacagcccgaagttcacctgcgcatgtccggatggaatgctcctggctcgggatatgcgctcctgtctgaccgaagccgaagctgccgtggccacccaggagacttctacggtgagactcaaggtgtcgtcgaccgccgtccgcactcagcataccacgaccaggcccgtgcccgacactagccgcctgccaggagctacccctggtctgactactgtggagatcgttactatgtctcaccaggcgttgggagacgtcgcgggacggggcaacgaaaagaagccttcctcagtgcgagcactttcaatcgtgttgcctatcgtgctgctggttttcctgtgcctgggggtgttcctgctgtggaagaattggcggttgaagaacataaactctatcaacttcgacaaccccgtgtaccagaaaaccaccgaagatgaggtgcatatctgccataatcaggatggctactcgtacccctcccgccagatggtgtcgctggaagatgacgttgct

SEQ ID NO: 11528 - DNA, 2580 bp, Artificial Sequence
  derived and/or modified sequence
atgggaccatggggctggaaactgcggtggactgtcgcacttcttctggccgcagcaggaaccgccgttggagatcgttgcgaacgcaatgagttccagtgtcaagacggcaaatgtatatcatacaagtgggtgtgtgatggttcagcagagtgccaggacgggagcgatgagtcacaggaaacatgcttgtctgttacgtgcaaaagtggggatttttcctgcggcgggagagtcaaccgctgcatccctcagttttggcgctgtgatgggcaagtagattgcgacaacgggagtgatgaacaggggtgcccacctaagacctgttctcaggacgagtttcggtgtcacgacggcaaatgtatatctcgccagtttgtttgtgacagcgaccgggattgcctggacgggtcggacgaggcctcatgtcccgtgctgacctgcggtcccgcctccttccagtgtaacagcagtacatgcattcctcaactctgggcgtgtgacaacgaccctgattgtgaagatggaagtgatgagtggcctcagcggtgtagaggcctctatgtgtttcagggggatagcagcccctgtagcgctttcgaatttcactgcctttctggcgagtgtattcacagtagctggcggtgtgacggggggcctgattgcaaggacaagtctgacgaagagaattgcgctgttgccacgtgccgcccagacgaatttcagtgtagtgacggaaattgcattcacggttcaaggcagtgcgatcgtgagtatgactgtaaagatatgtccgatgaggtggggtgcgtaaatgtcacactgtgcgaaggcccaaacaaattcaaatgccatagcggcgaatgcatcacattggacaaagtctgcaatatggccagggattgtagagactggtcggatgagccaatcaaggaatgcggaaccgctgcgtgcctggataacaatgggggctgttcgcacgtttgcaacgcattgaaaatcggagcggaatgtctgtgcccagatgggttccagctagtggcacagcgtaggtgtgaggacatcgacgagtgtcaggaccccgacacctgtagccagttgtgtgtgaacctcgagggtggatacaaatgccaatgcgaggagggcttccaactggatccccacacaaaggcttgtaaagctgtgggcagcatcgcctacctgtttttcacaaatcggcatgaggtgaggaagatgacccttgatagatctgagtacactagcttgattccaaatctaaggaacgtcgtagcattggacacagaggtagcgagcaaccgcatttactggtctgacctgagccagcgcatgatttgctcgacgcagctggatagggcgcatggggtctcctcatacgatacagtgatttctagagacatccaagctcctgatggcctggccgtggattggattcattctaacatttactggacagactctgtgctgggcacggtgtcagtggccgatactaagggtgtcaagcggaagactctcttccgcgagaacggaagtaagccgagggccatcgtggtcgaccctgtccacggttttatgtactggacagactggggaactccagctaagatcaagaagggcgggctcaacggggtcgacatctattcactggtgacagagaatattcagtggcccaatgggatcactctggatctgctaagtggccgattgtactgggtcgactctaagctgcatagtatcagcagcattgatgtgaacggtggaaacagaaagacaattctggaagatgagaaaagactcgcacatccattctctctggccgtgtttgaagacaaggtgttctggacggatattatcaacgaagccattttttccgcgaaccgactgacaggctcggatgtaaatctactagccgagaatctgctgtcccccgaagacatggttttgtttcacaatctgactcagcccagaggtgtaaactggtgtgagaggaccacgctgagcaatgggggttgccaatatctgtgccttcccgctccgcagattaatccccactccccaaagtttacctgcgcctgcccagacggcatgctactggcccgtgacatgaggagctgccttacagaagcagaggccgctgtggcgacccaggagacctccaccgtccgcctgaaggtcagttctaccgccgtccgcacgcagcatacaaccacgagacccgtgcctgacacatctaggctcccaggggccacccccggtctaactaccgtcgaaattgtaaccatgtcccatcaagccctgggcgacgtggccggtagggggaacgaaaaaaagccatcatccgtgagagccctgtctatcgttttgccgatcgtcttactggtctttctgtgtttgggagtcttcctcctgtggaagaactggcgactaaagaacatcaactcaattaatttcgataatcccgtttaccaaaagaccactgaggatgaagtgcacatctgtcacaaccaggacgggtactcatatcccagtaggcagatggtctcactggaagatgatgtcgcg

SEQ ID NO: 11529 - DNA, 2580 bp, Artificial Sequence
  derived and/or modified sequence
atgggaccatggggttggaagctgcgctggaccgtggcgctcctgctcgcggctgccggaacggcagtgggagacagatgcgaacgaaatgagttccagtgccaagacggaaaatgtatttcttacaaatgggtgtgcgatggatcggccgagtgccaggatggaagcgacgagtcacaagagacttgcctttcggtgacgtgtaagtccggtgacttttcatgtggtggacgggtgaacagatgtatcccacaattttggagatgtgatggacaggtcgactgtgacaacggatcagacgagcagggatgcccacccaagacttgttcgcaggacgaattcagatgccacgacggcaaatgcatctcacgccagtttgtttgcgactccgaccgggactgtctcgacggaagtgacgaggcctcctgcccggtcctgacctgcggtcccgcgagcttccaatgcaacagctccacttgcatcccacagctctgggcctgcgacaatgacccggattgcgaggatgggtcggacgagtggccgcagcgctgtcggggactgtacgtctttcagggtgactccagcccgtgctcagcattcgaattccactgcttgtcgggagaatgcatccactcatcctggcggtgcgacggcggccctgattgcaaggacaaatccgatgaagaaaactgcgctgtcgcgacgtgccgccctgacgaattccagtgctcggacggtaattgcatccatggaagtcgacagtgtgacagggaatacgactgtaaggatatgtcagacgaggtgggttgcgtcaacgtgactctttgcgaaggaccgaataagttcaagtgccattccggcgaatgtatcacccttgataaggtgtgcaacatggcgagagactgtagggattggtcagacgaaccgattaaagagtgcggcactgctgcctgtctcgacaacaacggcggatgttcacacgtgtgcaacgcgctgaagattggagccgaatgcctgtgccctgacggttttcaacttgtggcccagagacggtgtgaggatatcgatgagtgtcaggacccggatacctgttctcaactctgcgtgaacctggaaggaggctacaagtgccaatgcgaagagggcttccaactggatccacacactaaggcctgcaaagcagtaggctcgatcgcctacctcttcttcaccaaccgccacgaggtccgaaagatgactctggaccggtcggaatatacgtcactgatcccgaatctgcggaacgtggttgccctggacaccgaggtcgcctccaatcgcatctactggtcggatctttcccaacgcatgatttgctcaactcagctcgaccgcgcccatggcgtgtcgtcctatgatactgtgatttcgagggatatccaggctcccgacgggctcgcagtggactggatccactctaatatctactggaccgactccgtgctgggaactgtcagtgtcgccgacaccaaaggagtgaagaggaaaactctgttccgggagaatgggtcgaagccgcgcgccattgtggttgacccagtgcacggcttcatgtactggactgactgggggactccggcgaagatcaagaagggaggccttaacggagttgacatttactccctcgtgaccgaaaacatacagtggcctaacggaatcaccctcgatctgttgtcggggagactgtactgggttgactcgaaactgcattcgatctcatccatcgacgtgaatggcggcaaccgcaagaccatcctggaagatgagaaacggctggcgcatccattttcgctggcagtgtttgaggataaggtcttttggaccgacatcattaatgaagccatcttctcggccaatcggctgaccggatccgacgtcaacctgctggccgaaaacctgctgagcccagaagatatggtgctcttccacaatctgactcaaccacgcggtgtcaattggtgcgagagaactactctcagcaacggtggctgccaatacctttgcctgccagctccgcagatcaacccgcattcgccaaagtttacgtgcgcttgcccggatgggatgctgctggctcgcgacatgaggtcctgcctgaccgaagcggaggccgccgtggccacccaggaaacttccaccgtgagactgaaggttagttctacggccgtgcggacccagcacaccactacccgccccgttccggatacgtccaggctgccgggtgcaactcctggactcacgaccgtcgaaatcgtcaccatgtcgcatcaagcactcggagacgtggcaggaagagggaatgagaagaagccatcctcagtgcgcgccctgtcaatcgtgctgccgatcgtgctcctcgtgtttctttgtctcggtgttttcttgctgtggaaaaactggcgactgaaaaacatcaactccattaacttcgacaatccggtgtaccaaaagaccaccgaagatgaggtccacatctgccacaaccaggatgggtactcatacccgtcgcgccaaatggtgtcgcttgaggacgacgtggcc

SEQ ID NO: 11530 - DNA, 2580 bp, Artificial Sequence
  derived and/or modified sequence
atgggcccctggggatggaaattgcgctggaccgtggccctattgctggctgccgccggaacagctgtaggggacaggtgcgagaggaatgaatttcaatgccaggatggtaaatgtatcagttacaagtgggtttgcgacggttctgccgaatgccaagacggcagtgacgaatcacaggagacttgtttgtccgtcacgtgtaagagcggtgacttttcctgcggcggccgagtgaacaggtgtatcccccagttttggcggtgcgatgggcaggtggattgtgacaacggaagtgatgagcagggatgcccgccaaaaacctgttcccaggatgagtttcgctgccatgatgggaagtgcatttccaggcagtttgtgtgcgattccgaccgtgattgcttagatggcagcgatgaggctagctgcccggtgctgacatgcggacctgcgtcttttcagtgtaatagctctacatgcatcccccagctctgggcgtgcgataacgaccctgactgcgaggacggatctgacgaatggcctcagagatgtcggggattgtatgtgttccagggtgacagctcaccctgtagtgcctttgagtttcattgcctgtctggagaatgtatacactcatcatggaggtgtgatgggggccccgactgtaaggataaatccgacgaggaaaactgcgctgtcgccacttgtaggcctgatgagttccagtgttcagacgggaactgtattcacggatcacgccagtgcgatcgggaatatgactgcaaagacatgagcgatgaggtggggtgtgtgaacgtcacgctgtgcgagggccctaacaagtttaagtgccactccggcgagtgtattacattggacaaagtgtgtaatatggcccgcgactgccgggactggtctgacgagcccatcaaagaatgcggtactgctgcgtgcttggacaacaacggcgggtgttcccacgtttgcaatgccctgaaaattggcgccgaatgcctctgtcccgacggctttcagctcgttgcgcagcggaggtgtgaggatatagacgagtgccaggaccctgacacctgttcacagctgtgtgtgaatttggaggggggctacaaatgtcagtgtgaggaaggatttcaattagaccctcacacaaaagcatgcaaagctgtgggaagcatcgcatatttattctttacaaatcgccatgaagtgcgcaaaatgactttggaccgtagcgagtacacatccctgattccgaatctgcgaaacgtggtggccctagataccgaggtagcaagcaaccgaatctattggagcgatctatctcagagaatgatctgttctactcagctcgatcgggcacatggcgtctcgtcatatgacacagtcatctccagagacatacaggccccagatggcttggcagtggattggatacattcgaacatctactggactgatagcgtgttggggacagtgtccgtcgctgataccaaaggggtcaagcggaagaccctgtttcgtgagaacggtagcaaaccgagggctatcgtcgtggacccagtgcatggctttatgtattggaccgactggggaacccctgcaaagattaaaaagggaggcctgaatggtgtcgatatttattcactggttacagaaaatatacagtggccaaacggcataacattggatcttctgtcagggcgactgtactgggtggacagtaagctccatagtatctccagtatagatgtgaatggtgggaaccgaaagactatccttgaggacgagaaacggctggcccatcctttttccctggctgtcttcgaagacaaagtattctggaccgacattataaacgaggccatctttagcgccaatcgacttaccggctccgacgttaatctgttggcggagaacctgctcagccctgaggatatggtgttatttcataatttgacgcagccccgtggcgtgaactggtgtgagcgcacaaccctgtcaaatggcggctgtcagtacctctgccttcctgcacctcaaataaacccacattctcccaaatttacttgcgcttgcccagacgggatgttgttggctcgggacatgcgatcttgtctgacagaggcagaagccgcggtagctactcaggagaccagtacagttaggctgaaagtatcctctactgcggtccgcactcagcatacgacaacccggcctgtacccgacacgagccgcctgccgggagctacgcccggactgactacggtagaaatcgtgactatgagtcatcaggcgttgggcgatgtcgccggacgagggaacgaaaaaaagccatcttcagtgcgggcactaagtatagtgttaccgatcgtgctgctcgtttttctttgtctgggagtttttcttctgtggaaaaattggcgtctgaaaaacatcaactctataaatttcgacaaccctgtgtatcagaagactacagaggatgaagtgcatatctgtcacaaccaagatggctactcctatccgagccgtcagatggtcagccttgaggatgacgtcgca

SEQ ID NO: 11531 - DNA, 2580 bp, Artificial Sequence
  derived and/or modified sequence
atgggaccctgggggtggaagcttcgttggacagtcgccctgctgctggcagctgctgggacagctgtcggcgacagatgcgaacggaacgagtttcagtgccaagacggcaagtgcatatcctataaatgggtctgtgatggcagtgccgagtgccaggacggatccgatgagagtcaggaaacgtgcctgtccgtcacctgcaaaagcggggattttagctgtgggggaagagtgaataggtgcatcccccaattctggaggtgcgacggacaggttgattgcgacaacgggagcgatgaacagggatgcccgccgaagacttgcagccaggatgaattccggtgccatgacggtaagtgtatctcaaggcagtttgtctgtgattcagatagggactgtctcgatggttcagacgaagcatcctgcccagtcctgacatgcgggcctgccagtttccagtgcaattccagcacttgcatcccccagctttgggcctgtgacaatgatccagattgcgaggatgggagtgatgagtggccccaaagatgtaggggcctgtacgtctttcaaggcgattcaagtccttgttctgcattcgagtttcattgtttgagtggagagtgcattcactcctcttggcggtgtgacggaggccccgattgtaaagacaaaagcgacgaggaaaactgtgctgtcgccacatgcaggcccgacgagtttcagtgtagcgatggaaactgtatccatgggagccgccagtgcgacagggagtatgactgtaaggacatgagcgatgaggttgggtgcgtgaacgtgaccctttgcgagggcccgaataagttcaaatgtcactccggtgaatgcatcaccttagataaagtgtgcaacatggctcgcgactgtcgggattggtctgacgagcctattaaggagtgcggcacggccgcttgcctggataacaatggcggatgttcacatgtatgtaatgctttaaaaatcggtgcggaatgtttgtgtcccgatggattccagcttgtagcccagcgaaggtgcgaagacatagacgagtgccaggatcccgatacttgctcacagttgtgcgttaacctcgagggcggctataagtgtcagtgtgaggaaggcttccaacttgacccccacaccaaggcatgtaaggccgtcggtagcatcgcttacttgttctttaccaatcgccacgaggtcagaaagatgacgctcgaccggtcagaatacacatccctgattcccaaccttcggaacgtggtggccctggacactgaagtggcatccaatcggatctactggtctgatctcagtcagcgcatgatctgtagtacacagcttgatcgggcccatggagtcagttcttacgatacagtaatatccagggacattcaggcccctgacgggttggccgtggattggatccactccaatatctattggacagactcagttttaggaacagtgagcgtggcggacacaaagggcgtcaagcgtaagacgctttttcgcgagaacggttctaaacctagggccatcgtcgtcgatcctgtgcatggcttcatgtattggacagattggggaactcccgccaaaattaaaaagggcgggctgaatggcgtagacatctatagtctggttacggagaacatccagtggcctaatgggattacgctcgatttgctatccggcagactgtattgggttgatagtaagttacatagcatatctagtatagatgtgaacggaggaaatcgaaagactatcctggaggatgaaaagaggttggctcacccattcagcctggccgtttttgaagataaggtcttttggaccgacattatcaacgaagctattttttccgccaataggctgacaggtagcgacgtcaacctgctcgccgaaaatttgctgtcacctgaggacatggtcttgttccacaacctcacacagccccgtggcgttaattggtgtgagcgcaccacactctccaatgggggctgtcaatacctctgtctgcccgcccctcagatcaatccccactcacccaagtttacctgcgcctgccctgacgggatgttactggccagagatatgcgatcatgcctgaccgaggcggaagcagccgttgccacccaagaaacttccaccgtgcggctcaaggtaagttcaacagctgtgcgcacccaacacacaaccactcgaccagtacccgacacctcgaggttaccaggtgctactccggggctcaccaccgtagagattgtgactatgagccaccaggcgctcggggacgtggccgggcgggggaatgaaaaaaaaccaagtagcgtacgtgctctttcaatcgtcttgccgattgtcctgctggtctttttgtgtttgggagtgttccttctgtggaagaactggcgcctgaaaaatatcaattccattaactttgataatccagtctaccagaagacaacagaagatgaggtccatatttgtcacaaccaggatgggtactcctacccgagcagacagatggtcagtcttgaggacgacgtggcc

SEQ ID NO: 11532 - DNA, 2583 bp, Artificial Sequence
  derived and/or modified sequence
atgggcccctggggctggaagctgagatggaccgtggccctgctgctggccgccgccggcaccgccgtgggcgacagatgcgagagaaacgagttccagtgccaggacggcaagtgcatcagctacaagtgggtgtgcgacggcagcgccgagtgccaggacggcagcgacgagagccaggagacctgcctgagcgtgacctgcaagagcggcgacttcagctgcggcggcagagtgaacagatgcatcccccagttctggagatgcgacggccaggtggactgcgacaacggcagcgacgagcagggctgcccccccaagacctgcagccaggacgagttcagatgccacgacggcaagtgcatcagcagacagttcgtgtgcgacagcgacagagactgcctggacggcagcgacgaggccagctgccccgtgctgacctgcggccccgccagcttccagtgcaacagcagcacctgcatcccccagctgtgggcctgcgacaacgaccccgactgcgaggacggcagcgacgagtggccccagagatgcagaggcctgtacgtgttccagggcgacagcagcccctgcagcgccttcgagttccactgcctgagcggcgagtgcatccacagcagctggagatgcgacggcggccccgactgcaaggacaagagcgacgaggagaactgcgccgtggccacctgcagacccgacgagttccagtgcagcgacggcaactgcatccacggcagcagacagtgcgacagagagtacgactgcaaggacatgagcgacgaggtgggctgcgtgaacgtgaccctgtgcgagggccccaacaagttcaagtgccacagcggcgagtgcatcaccctggacaaggtgtgcaacatggccagagactgcagagactggagcgacgagcccatcaaggagtgcggcaccaacgagtgcctggacaacaacggcggctgcagccacgtgtgcaacgacctgaagatcggctacgagtgcctgtgccccgacggcttccagctggtggcccagagaagatgcgaggacatcgacgagtgccaggaccccgacacctgcagccagctgtgcgtgaacctggagggcggctacaagtgccagtgcgaggagggcttccagctggacccccacaccaaggcctgcaaggccgtgggcagcatcgcctacctgttcttcaccaacagacacgaggtgagaaagatgaccctggacagaagcgagtacaccagcctgatccccaacctgagaaacgtggtggccctggacaccgaggtggccagcaacagaatctactggagcgacctgagccagagaatgatctgcagcacccagctggacagagcccacggcgtgagcagctacgacaccgtgatcagcagagacatccaggcccccgacggcctggccgtggactggatccacagcaacatctactggaccgacagcgtgctgggcaccgtgagcgtggccgacaccaagggcgtgaagagaaagaccctgttcagagagaacggcagcaagcccagagccatcgtggtggaccccgtgcacggcttcatgtactggaccgactggggcacccccgccaagatcaagaagggcggcctgaacggcgtggacatctacagcctggtgaccgagaacatccagtggcccaacggcatcaccctggacctgctgagcggcagactgtactgggtggacagcaagctgcacagcatcagcagcatcgacgtgaacggcggcaacagaaagaccatcctggaggacgagaagagactggcccaccccttcagcctggccgtgttcgaggacaaggtgttctggaccgacatcatcaacgaggccatcttcagcgccaacagactgaccggcagcgacgtgaacctgctggccgagaacctgctgagccccgaggacatggtgctgttccacaacctgacccagcccagaggcgtgaactggtgcgagagaaccaccctgagcaacggcggctgccagtacctgtgcctgcccgccccccagatcaacccccacagccccaagttcacctgcgcctgccccgacggcatgctgctggccagagacatgagaagctgcctgaccgaggccgaggccgccgtggccacccaggagaccagcaccgtgagactgaaggtgagcagcaccgccgtgagaacccagcacaccaccaccagacccgtgcccgacaccagcagactgcccggcgccacccccggcctgaccaccgtggagatcgtgaccatgagccaccaggccctgggcgacgtggccggcagaggcaacgagaagaagcccagcagcgtgagagccctgagcatcgtgctgcccatcgtgctgctggtgttcctgtgcctgggcgtgttcctgctgtggaagaactggagactgaagaacatcaacagcatcaacttcgacaaccccgtgtaccagaagaccaccgaggacgaggtgcacatctgccacaaccaggacggctacagctaccccagcagacagatggtgagcctggaggacgacgtggcctag

SEQ ID NO: 11533 - DNA, 2838 bp, Artificial Sequence
  derived and/or modified sequence
tgaggcagacccggcgtgccccccagattcctgagccagagaagaagacaggtgcccggccccagaagcagactgagagacatccacgagagccccagcgtgatcctgggcccccccggcgaggtgcccggcttcagatgcgccctgtggagacacctgagaccccacctggtgctgggcggcgccctggccccccccgcccccatcaagttcaccgagggcccccccgccaccctgaaggccagcgtgccctacgaggtggagaccctgccccagaacctgcccgcccccccctggagcgccgccgagatcttcagccacgtgggcgacagatgcgagagaaacgagttccagtgccaggacggcaagtgcatcagctacaagtgggtgtgcgacggcagcgccgagtgccaggacggcagcgacgagagccaggagacctgcctgagcgtgacctgcaagagcggcgacttcagctgcggcggcagagtgaacagatgcatcccccagttctggagatgcgacggccaggtggactgcgacaacggcagcgacgagcagggctgcccccccaagacctgcagccaggacgagttcagatgccacgacggcaagtgcatcagcagacagttcgtgtgcgacagcgacagagactgcctggacggcagcgacgaggccagctgccccgtgctgacctgcggccccgccagcttccagtgcaacagcagcacctgcatcccccagctgtgggcctgcgacaacgaccccgactgcgaggacggcagcgacgagtggccccagagatgcagaggcctgtacgtgttccagggcgacagcagcccctgcagcgccttcgagttccactgcctgagcggcgagtgcatccacagcagctggagatgcgacggcggccccgactgcaaggacaagagcgacgaggagaactgcgccgtggccacctgcagacccgacgagttccagtgcagcgacggcaactgcatccacggcagcagacagtgcgacagagagtacgactgcaaggacatgagcgacgaggtgggctgcgtgaacgtgaccctgtgcgagggccccaacaagttcaagtgccacagcggcgagtgcatcaccctggacaaggtgtgcaacatggccagagactgcagagactggagcgacgagcccatcaaggagtgcggcaccaacgagtgcctggacaacaacggcggctgcagccacgtgtgcaacgacctgaagatcggctacgagtgcctgtgccccgacggcttccagctggtggcccagagaagatgcgaggacatcgacgagtgccaggaccccgacacctgcagccagctgtgcgtgaacctggagggcggctacaagtgccagtgcgaggagggcttccagctggacccccacaccaaggcctgcaaggccgtgggcagcatcgcctacctgttcttcaccaacagacacgaggtgagaaagatgaccctggacagaagcgagtacaccagcctgatccccaacctgagaaacgtggtggccctggacaccgaggtggccagcaacagaatctactggagcgacctgagccagagaatgatctgcagcacccagctggacagagcccacggcgtgagcagctacgacaccgtgatcagcagagacatccaggcccccgacggcctggccgtggactggatccacagcaacatctactggaccgacagcgtgctgggcaccgtgagcgtggccgacaccaagggcgtgaagagaaagaccctgttcagagagaacggcagcaagcccagagccatcgtggtggaccccgtgcacggcttcatgtactggaccgactggggcacccccgccaagatcaagaagggcggcctgaacggcgtggacatctacagcctggtgaccgagaacatccagtggcccaacggcatcaccctggacctgctgagcggcagactgtactgggtggacagcaagctgcacagcatcagcagcatcgacgtgaacggcggcaacagaaagaccatcctggaggacgagaagagactggcccaccccttcagcctggccgtgttcgaggacaaggtgttctggaccgacatcatcaacgaggccatcttcagcgccaacagactgaccggcagcgacgtgaacctgctggccgagaacctgctgagccccgaggacatggtgctgttccacaacctgacccagcccagaggcgtgaactggtgcgagagaaccaccctgagcaacggcggctgccagtacctgtgcctgcccgccccccagatcaacccccacagccccaagttcacctgcgcctgccccgacggcatgctgctggccagagacatgagaagctgcctgaccgaggccgaggccgccgtggccacccaggagaccagcaccgtgagactgaaggtgagcagcaccgccgtgagaacccagcacaccaccaccagacccgtgcccgacaccagcagactgcccggcgccacccccggcctgaccaccgtggagatcgtgaccatgagccaccaggccctgggcgacgtggccggcagaggcaacgagaagaagcccagcagcgtgagagccctgagcatcgtgctgcccatcgtgctgctggtgttcctgtgcctgggcgtgttcctgctgtggaagaactggagactgaagaacatcaacagcatcaacttcgacaaccccgtgtaccagaagaccaccgaggacgaggtgcacatctgccacaaccaggacggctacagctaccccagcagacagatggtgagcctggaggacgacgtggcctag

SEQ ID NO: 11534 - DNA, 2726 bp, Artificial Sequence
  derived and/or modified sequence
gggaaataagagagaaaagaagagtaagaagaaatataagagccaccatgggtccgtggggctggaagcttagatggacagtcgcgctcctccttgcagcagcaggaactgcggtcggagatcgatgcgagcgcaacgagttccaatgccaagatgggaagtgtatttcgtacaagtgggtctgcgatggatcagcggaatgtcaggacggaagcgatgagagccaagaaacatgcctctcagtgacatgcaagtcgggagacttctcgtgcggaggacgcgtaaacagatgtattccacagttttggcgctgcgatggtcaggtggactgcgacaacggttcagatgaacagggatgtcctccgaaaacgtgctcacaagacgagtttcgctgccatgatggaaagtgcatttcgcggcagttcgtatgtgattcggatcgggactgtctggacggctcggacgaagcgtcatgcccggtacttacttgcgggccagcctcattccaatgcaacagctcaacgtgcattccccagctgtgggcctgtgacaatgatcctgattgtgaggacggtagcgacgagtggccgcagagatgtaggggtttgtacgtattccaaggagactcaagcccctgttccgcctttgagtttcactgcctgtcgggtgaatgcatccactccagctggcgatgtgatggtgggcccgactgcaaagataagagcgacgaggagaattgcgcggtcgcgacgtgcagacccgatgagttccagtgctccgatggaaactgcatccacgggagccggcagtgtgatcgcgagtacgattgtaaagacatgtcagacgaggtcggatgcgtgaacgtcacgttgtgcgagggtccgaacaagtttaagtgccattcgggcgaatgtattacgctcgataaagtctgcaacatggcgcgagattgtagggattggtcagacgaacccatcaaggagtgcggcactaacgagtgtttggacaataacggcgggtgttcgcacgtctgcaatgatctcaaaattgggtatgagtgtctctgtcctgacggattccagctggtcgcgcagcgcagatgcgaggacatcgacgagtgccaggaccccgacacatgttcgcagttgtgtgtcaaccttgaaggagggtacaagtgccagtgcgaggagggatttcagcttgacccgcacacgaaagcatgtaaagcggtggggtccattgcgtatttgtttttcacaaacagacatgaagtgcggaagatgacccttgatcgcagcgaatatacgtcactgatccctaatcttaggaatgtcgtggcccttgacacggaggtagcatcaaatagaatctactggtccgacctctcacagagaatgatctgttcaacacagttggatcgggcgcacggggtgtcgtcgtacgatacggtaattagccgcgacatccaggcgccagacggactcgcggtcgactggatccatagcaacatctactggacagactccgtgttgggaaccgtatccgtagctgacacaaagggagtgaagcggaaaactctttttagagagaacggcagcaaaccgagagcaatcgtggtcgatccggtgcatggattcatgtattggaccgattggggaacgccagccaaaatcaagaaaggcggtttgaatggggtcgacatctactcgctggtgactgagaatattcagtggccaaacgggatcaccttggacttgttgtcggggaggttgtattgggtggactcaaagctccactcgatcagctcgatcgacgtgaacggcggaaataggaaaactattctcgaagatgagaaaagactggcccaccccttctcgctcgcggtgttcgaggacaaagtattttggacagacatcatcaacgaagcgatcttttcagccaaccgcctgacagggtcggatgtcaatctcttggccgaaaaccttctgagcccggaagatatggtcttgtttcacaatttgacccaacccagaggtgtgaattggtgcgaacggacgacattgtcgaacggaggttgccagtatctctgtctccctgcaccccagattaatccccattcacccaagttcacgtgtgcgtgcccagacggaatgcttcttgcgagggacatgagatcctgtctcaccgaagcggaagcggcagtggccacacaagagacttcgactgtccgccttaaagtgtcctcgacggcggtccgaactcagcatacgaccacacgacccgtgcccgatacctcgcggttgcccggagcaacaccggggttgacgacagtagaaatcgtaaccatgagccaccaggcacttggagatgtcgcaggcagaggcaatgagaagaaacccagctcggtcagagccctcagcatcgtgctgcctattgtgctgcttgtgtttctctgtttgggtgtgttcttgttgtggaagaactggcgccttaagaatatcaactcgattaacttcgataatccggtataccagaaaaccacagaggatgaagtgcatatttgtcacaaccaagatggctattcgtacccgtccaggcaaatggtatcacttgaggacgacgtggcctgataagctgccttctgcggggcttgccttctggccatgcccttcttctctcccttgcacctgtacctcttggtctttgaataaagcctgagtaggaag

SEQ ID NO: 11535 - DNA, 2583 bp, Artificial Sequence
  derived and/or modified sequence
atgggtccttggggctggaagctcaggtggaccgtggcgcttctgctcgcagccgctgggacagcggttggagatcgatgtgagcgtaacgagtttcagtgtcaagacggtaaatgtatctcatacaaatgggtttgtgacggatcagccgaatgccaggacgggagcgatgaatcgcaggaaacatgtttgtccgtgacttgtaagtctggcgatttttcctgcggaggaagagtgaaccgctgtatcccccaattttggaggtgtgatgggcaggtggactgtgataatggatctgatgagcagggatgcccaccaaagacttgcagccaggatgaattccgctgtcacgatggcaagtgtatctccaggcagttcgtgtgcgattccgatagggattgcctcgatggctctgatgaagcatcttgtcctgtcctaacttgcggaccagcttcatttcaatgcaactcttcaacgtgtatccctcagctgtgggcctgcgacaatgacccagattgtgaggatggctctgacgagtggccccagcggtgcaggggtctgtatgtttttcagggcgatagcagcccatgttccgcgtttgagtttcactgccttagtggggagtgcattcattcctcctggcgctgcgatggggggcccgattgcaaggacaaatccgatgaagagaattgtgccgttgccacctgtagacccgatgaatttcaatgctcggatgggaattgcatccatgggtcacgccagtgtgacagggagtacgactgtaaagatatgtcagacgaagtgggatgtgtgaacgtgactttgtgcgagggtccaaacaaattcaaatgccactccggagagtgtataactctcgacaaagtctgcaatatggccagagactgccgggattggtctgacgagcctattaaagagtgtggcactaacgagtgtctcgataacaatggggggtgttcccatgtttgtaacgacctcaagataggctacgaatgcctttgtcccgacggatttcagctggttgcacagaggcgatgcgaagacatcgatgagtgtcaggaccctgatacatgtagtcagctgtgtgtcaacctcgaaggtggatataagtgtcagtgcgaggaaggcttccagctggatcctcacactaaggcttgtaaggccgttggcagtatcgcctacctattcttcacaaaccgacatgaggttagaaagatgactcttgatagatccgaatatacctctctgattcccaacttgaggaacgttgtcgccctggatacggaggtggccagtaataggatatactggtcagacctgtcacagcgcatgatctgcagtacccaactggaccgggcccacggtgtctcctcttatgatacagttatctcccgtgacatacaggcccccgatggcctggcggtcgactggattcatagtaacatctactggactgacagcgttttaggcacagtgtccgtagcagatacaaagggtgtgaaaaggaagacactcttcagagagaacgggagcaaaccacgagctattgttgtcgaccccgtgcacgggtttatgtactggactgattggggaactcctgctaagatcaagaaaggaggacttaatggtgttgacatctatagtcttgtgactgagaacatccagtggccaaatgggatcacactcgaccttctctctggccggctgtactgggtggacagtaaactacacagcatcagcagcatagacgtgaacgggggcaatcgcaaaaccatcctcgaggatgaaaaaagactggcccacccttttagtcttgctgtttttgaagataaggtgttttggactgatataatcaatgaggcgatattttccgctaatcggcttacggggtctgatgttaacctgttagctgaaaatttactcagtccagaagacatggttctctttcacaacctgactcaacctaggggggtcaactggtgcgaaaggaccaccctctctaatggcggatgtcagtatctctgtctgcctgcgccccagattaatccccatagtccgaagttcacatgtgcgtgtcctgatggaatgctccttgcccgggacatgcgttcatgcctgacagaagctgaggccgctgtggcaacccaagagacttctactgtccggctcaaagtcagctcaacggccgttcgcacccagcacacaaccactagacccgtgcccgacactagtcggttaccgggcgctaccccggggctgactacggtcgaaatagtaacaatgagccatcaggcactgggcgacgtcgcaggaagaggcaacgaaaaaaagccctctagcgtcagggccctgtcaatcgtgctgcccatcgtgctgctcgtgtttctgtgcctcggcgtttttttattgtggaagaactggcggttgaaaaacattaattctatcaacttcgacaaccccgtgtatcagaagacaacagaggatgaggtgcacatttgtcacaatcaggacgggtatagttacccaagtcggcagatggtgtccttggaagatgacgttgcttag

SEQ ID NO: 11536 - DNA, 2838 bp, Artificial Sequence
  derived and/or modified sequence
tagggcaggccaggcgttcccccgcgcttcctgtcccagcgtaggcgacaagtccctgggccccgtagcagattacgagacatccacgaatctcctagcgtgatcctgggacctccaggtgaggtgccaggctttagatgtgctctctggcgccatctcagaccccatttagtacttgggggcgcgctggctcccccagcccccattaaattcaccgagggtcctcctgctaccttaaaggcttccgtcccctacgaagtggaaacactgccccaaaacctgcccgcgcctccatggtctgctgccgagattttctcacacgtgggcgaccgatgtgagcgtaatgagttccaatgtcaagatgggaaatgtatttcttacaagtgggtgtgtgatggtagcgccgagtgccaagatggatcagacgaatctcaagagacttgtctgtcagtaacatgtaaatccggggacttctcttgcggaggacgcgtaaaccgttgcattccacaattttggcggtgtgatggtcaggtagattgtgacaacggatctgatgaacagggctgcccaccaaaaacttgttcccaagacgaattcagatgccatgacggcaagtgcatcagtagacagttcgtgtgcgattcggatagagattgcctagacggcagtgacgaagcctcatgcccagtgctgacttgtgggcctgcctcctttcaatgcaactcctccacctgcattccccagctctgggcctgtgacaatgatccagactgcgaggacggcagcgacgagtggccccaacggtgtaggggcctgtatgtctttcaaggcgattcctctccatgctcagcctttgagtttcactgcctgagtggagaatgtatacacagctcgtggagatgtgacggtggtccagactgtaaggataaatctgatgaggaaaattgcgcagtggctacgtgtcggccagacgagtttcagtgcagcgatggtaactgtatacacggctcacgccagtgcgacagggaatacgattgtaaggatatgtccgacgaagtgggctgcgtcaatgttacgctgtgcgagggaccgaacaaatttaagtgccatagcggtgaatgcattacacttgacaaagtgtgtaacatggcccgcgactgccgggactggagcgatgagcccattaaagaatgcgggacgaacgagtgtctagacaataacggaggatgttctcatgtctgtaacgatctgaagatcgggtatgagtgtctttgccctgacggctttcaattggttgctcagaggcgctgtgaggatatcgacgagtgccaagatcctgatacatgttcacagttatgcgtcaacctcgagggggggtataagtgtcagtgcgaggaagggtttcagttggacccacacaccaaggcctgcaaggccgtggggtcgattgcctacctgttttttaccaaccgtcatgaggttcgcaagatgacattggataggtcagaatatacgagcctcatcccaaacctacgtaatgtcgtagctctggacacggaggttgcctccaatagaatctactggtcagatctttcacaaagaatgatatgttcaacacagttggaccgcgcccatggcgtgtctagctacgacacggtaatttcccgagacattcaggctcctgatggccttgccgttgactggatccattcaaatatctattggactgacagtgtgctgggaacggtttctgtagctgatactaagggagtgaagaggaagacactcttcagggaaaacggatctaagccccgtgcaatagttgtggatccagtgcatgggttcatgtactggactgactggggcacccccgcaaaaatcaagaaaggaggcctcaatggcgttgacatatactcactggtgacggagaatatccaatggcccaacggaattactctggatctgctaagtggtcgcctgtattgggtggactcgaagctgcacagcatttcctccattgatgtgaacgggggaaatcgaaaaacaatcctagaagacgagaagcgactcgcccatccatttagcttggcagttttcgaggacaaggtcttctggaccgatataattaacgaggcgatcttcagtgccaataggctgaccggctctgacgttaatctcttggccgagaatctgcttagcccagaggacatggtgttgtttcacaacctgacccagccccgaggcgtcaattggtgcgaacgaactacactgtccaacggcggatgtcagtatttatgtttgcccgccccacagatcaatccccatagtcccaaattcacttgtgcctgtccagacgggatgttgcttgctcgagatatgcgttcctgtctgacggaagctgaagccgcagtggcaacccaagaaacctcaactgtgaggcttaaggtctccagcaccgccgtgcgtacccagcacacaaccaccagacccgtgcccgatacctccaggctcccgggcgcaacacctggcttaaccaccgtagaaatcgtgacaatgtctcaccaggctttgggcgatgttgccgggcgggggaatgagaagaaaccctcatcagttagagcactctctatagttcttcctatcgtgctactcgtgtttctctgcctcggcgtgtttctcctatggaagaactggagattaaagaatataaacagcatcaattttgataatcccgtgtatcagaagacaaccgaggacgaagtgcacatctgtcacaaccaagacggctattcctatccatctagacaaatggtgagtctcgaggacgacgtggcgtag

SEQ ID NO: 11537 - DNA, 2583 bp, Artificial Sequence
  derived and/or modified sequence
atgggcccctggggctggaagctgcgctggacagtggccctgctgctggccgctgctggaacagctgtgggggacagatgtgaaagaaatgagttccagtgccaggacggcaagtgcatctcctacaagtgggtgtgtgatggcagcgctgagtgccaggacggcagtgatgagagccaggagacctgcctgtctgtgacctgcaagagcggggacttcagctgtggcggccgggtgaaccgctgcatcccccagttctggaggtgtgatggccaggtggactgtgacaatggaagtgatgagcagggctgcccccccaagacctgcagccaggatgagttccgctgccatgatggcaagtgcatcagccggcagtttgtgtgtgacagcgaccgggactgcctggatggcagtgatgaggccagctgccctgtgctgacctgtggccctgccagcttccagtgcaacagcagcacctgcatcccccagctgtgggcctgtgacaatgaccctgactgtgaagatggcagtgatgagtggccccagcgctgccggggcctgtatgtgttccagggcgacagcagcccctgcagcgcctttgagttccactgcctgagcggggagtgcatccacagctcctggaggtgtgatggcggccctgactgcaaggacaagagtgatgaggagaactgtgctgtggccacctgcaggccagatgagttccagtgcagtgatggcaactgcatccacggcagccggcagtgtgaccgggagtatgactgcaaggacatgtctgatgaggtgggctgtgtgaatgtgaccctgtgtgagggccccaacaagttcaagtgccacagcggggagtgcatcaccctggacaaggtgtgcaacatggcccgggactgccgggactggagcgatgagcccatcaaggaatgtggcaccaatgaatgtctggacaacaacggcggctgcagccacgtgtgcaatgacctgaagattggctatgaatgtctgtgcccagatggcttccagctggtggcccagaggcgctgtgaagatattgatgagtgccaggaccctgacacctgcagccagctgtgtgtgaacctggagggcggctacaagtgccagtgtgaggagggcttccagctggacccccacaccaaggcctgcaaggctgtgggcagcatcgcctacctgttcttcaccaacagacatgaggtgaggaagatgaccctggacagaagtgagtacaccagcctcatccccaacctgagaaatgtggtggccctggacacagaggtggccagcaaccgcatctactggagcgacctgagccagaggatgatctgcagcacccagctggaccgggcccacggcgtgagcagctatgacaccgtcatcagccgggacatccaggccccagatggcctggccgtggactggatccacagcaacatctactggacagattctgtgctgggcaccgtgtctgtggccgacaccaagggcgtgaagaggaagaccctcttccgggagaatggcagcaagccccgggccatcgtggtggaccctgtgcacggcttcatgtactggacagactggggcaccccagccaagatcaagaagggcggcctgaatggagtggacatctacagcctggtgacagagaacatccagtggcccaacggcatcaccctggacctgctgagcggccgcctgtactgggtggacagcaagctgcacagcatcagcagcattgatgtgaatggaggcaacaggaagaccatcctggaggatgagaagaggctggcccaccccttcagcctggccgtgtttgaggacaaggtgttctggacagacatcatcaatgaggccatcttcagcgccaaccggctgactggaagtgatgtgaacctgctggccgagaacctgctgagccctgaggacatggtgctcttccacaacctgacccagccccggggcgtgaactggtgtgagaggaccaccctgagcaatggaggctgccagtacctgtgcctgcctgccccccagatcaacccccacagccccaagttcacctgtgcctgcccagatggcatgctgctggcccgggacatgaggagctgcctgacagaagctgaggccgctgtggccacccaggagaccagcacagtgcggctgaaggtgagcagcacagctgtgaggacccagcacaccaccaccaggcctgtgcctgacaccagccggctgcccggggccaccccaggcctgaccaccgtggagatcgtgaccatgagccaccaggccctgggagatgtggccggcagaggaaatgagaagaagcccagctctgtgcgggccctgagcatcgtgctgcccatcgtgctgctggtgttcctgtgcctgggcgtcttcctgctgtggaagaactggaggctgaagaacatcaacagcatcaactttgacaaccctgtgtaccagaagaccacagaagatgaggtgcacatctgccacaaccaggacggctacagctaccccagccggcagatggtgtccctggaggatgatgtggcctag

SEQ ID NO: 11538 - DNA, 2838 bp, Artificial Sequence
  derived and/or modified sequence
tgaggaagacctggggtgcccccacgcttcctgagccagaggcggcggcaggtgcccggccccaggagccggctgcgggacatccacgagagccccagcgtcatcctgggccccccaggagaggtgcccggcttccgctgtgccctgtggaggcacctgcggccccacctggtgctgggcggggccctggcccccccagcccccatcaagttcacagagggccccccagccaccctgaaggcctctgtgccctatgaggtggagaccctgccccagaacctgcctgccccaccctggagcgctgctgagatcttcagccacgtgggggacagatgtgaaagaaatgagttccagtgccaggacggcaagtgcatctcctacaagtgggtgtgtgatggcagcgctgagtgccaggacggcagtgatgagagccaggagacctgcctgtctgtgacctgcaagagcggggacttcagctgtggcggccgggtgaaccgctgcatcccccagttctggaggtgtgatggccaggtggactgtgacaatggaagtgatgagcagggctgcccccccaagacctgcagccaggatgagttccgctgccatgatggcaagtgcatcagccggcagtttgtgtgtgacagcgaccgggactgcctggatggcagtgatgaggccagctgccctgtgctgacctgtggccctgccagcttccagtgcaacagcagcacctgcatcccccagctgtgggcctgtgacaatgaccctgactgtgaagatggcagtgatgagtggccccagcgctgccggggcctgtatgtgttccagggcgacagcagcccctgcagcgcctttgagttccactgcctgtctggagagtgcatccacagctcctggaggtgtgatggcggccctgactgcaaggacaagagtgatgaggagaactgtgctgtggccacctgcaggccagatgagttccagtgcagtgatggcaactgcatccacggcagccggcagtgtgaccgggagtatgactgcaaggacatgtctgatgaggtgggctgtgtgaatgtgaccctgtgtgagggccccaacaagttcaagtgccacagcggggagtgcatcaccctggacaaggtgtgcaacatggcccgggactgccgggactggagcgatgagcccatcaaggaatgtggcaccaatgaatgtctggacaacaatggaggctgcagccacgtgtgcaatgacctgaagattggctatgagtgcctgtgcccagatggcttccagctggtggcccagaggcgctgtgaggacattgatgagtgccaggaccctgacacctgcagccagctgtgtgtgaacctggagggcggctacaagtgccagtgtgaggagggcttccagctggacccccacaccaaggcctgcaaggctgtgggcagcatcgcctacctgttcttcaccaacagacatgaggtgaggaagatgaccctggacagaagtgagtacaccagcctcatccccaacctgagaaatgtggtggccctggacacagaggtggccagcaaccgcatctactggagcgacctgagccagaggatgatctgcagcacccagctggaccgggcccatggagtgtcctcctatgacaccgtcatcagccgggacatccaggccccagatggcctggccgtggactggatccacagcaacatctactggacagacagcgtgctgggcaccgtgtctgtggccgacaccaagggcgtgaagaggaagaccctcttcagagaaaatggcagcaagccccgggccatcgtggtggaccctgtgcacggcttcatgtactggacagactggggcaccccagccaagatcaagaagggcggcctgaatggagtggacatctacagcctggtgacagagaacatccagtggcccaacggcatcaccctggacctgctgagcggccgcctgtactgggtggacagcaagctgcacagcatcagcagcattgatgtgaatggaggcaacaggaagaccatcctggaggatgagaagaggctggcccaccccttcagcctggccgtgtttgaggacaaggtgttctggacagacatcatcaatgaggccatcttcagcgccaaccggctgaccggcagtgatgtgaacctgctggccgagaacctgctgagccctgaggacatggtgctcttccacaacctgacccagccccggggcgtgaactggtgtgagaggaccaccctgagcaatggaggctgccagtacctgtgcctgcctgccccccagatcaacccccacagccccaagttcacctgtgcctgcccagatggcatgctgctggcccgggacatgaggagctgcctgacagaggccgaggccgctgtggccacccaggagaccagcacagtgcggctgaaggtgagcagcacagctgtgaggacccagcacaccaccaccaggcctgtgcctgacaccagccggctgcccggggccaccccaggcctgaccaccgtggagatcgtgaccatgagccaccaggccctgggagatgtggccggcagaggaaatgagaagaagcccagctctgtgcgggccctgagcatcgtgctgcccatcgtgctgctggtgttcctgtgcctgggcgtcttcctgctgtggaagaactggaggctgaagaacatcaacagcatcaactttgacaaccctgtgtaccagaagaccacagaagatgaggtgcacatctgccacaaccaggacggctacagctaccccagccggcagatggtgtccctggaggatgatgtggcctag

SEQ ID NO: 11539 - DNA, 2583 bp, Artificial Sequence
  derived and/or modified sequence
atgggcccctggggctggaagctgcggtggaccgtggccctgctgttggcagcggcaggaacggccgttggagacagatgcgaacggaatgagtttcaatgtcaggacggcaagtgtatttcatacaaatgggtctgcgatggatctgcagaatgccaagatggctccgatgaatcacaggaaacgtgcctatctgttacatgtaaaagcggtgacttttcatgtggtggacgagtgaataggtgcataccacagttctggagatgcgatggccaggtcgattgtgataatgggagcgatgaacagggctgtcctcctaagacgtgcagccaggacgaatttcgatgccacgatggcaagtgcatcagtcggcagtttgtatgtgactctgacagggattgtctggatggctctgacgaagcctcttgcccggtacttacctgtggacccgctagctttcagtgtaactccagtacctgtatccctcagttgtgggcttgcgacaatgaccctgactgtgaggatggctctgacgagtggccacagagatgtcgtgggttgtacgtgtttcagggagatagtagcccctgcagtgccttcgagtttcattgtcttagtggggagtgcattcacagctcgtggcggtgtgatggcggccccgactgcaaggataagtcagacgaagagaattgcgcggtggccacctgcagaccagacgagtttcagtgtagcgacggtaactgcatccatgggtcaaggcaatgcgaccgcgaatacgattgcaaagatatgtctgacgaagtcggttgcgttaatgtcaccctatgcgagggtcccaataaatttaagtgccattctggggagtgtattactctggacaaagtgtgcaacatggcgagagactgcagagattggagcgacgaacccattaaagaatgcggaacaaacgagtgcctggacaataatggagggtgctcgcatgtgtgcaatgacctcaagatcggatacgaatgcctgtgcccagatggcttccagttggttgctcagagacggtgtgaggatattgatgagtgccaggatcctgatacctgcagtcaactttgcgtcaaccttgaaggaggatacaagtgtcagtgcgaggaaggatttcagttagatcctcataccaaagcctgcaaggccgttggaagcatagcctacctgttctttactaacagacacgaggtgaggaagatgacgttggacaggagtgaatacactagcctaatccccaatctgaggaacgtcgtggccctggatactgaagtagcaagcaacagaatctattggtctgacctctctcaacgcatgatctgttcgacccaactcgatcgggctcatggtgtctcatcctacgacacggtgattagcagggatatacaggctcccgacgggctggctgtggactggatccattccaatatctactggacagactctgttctgggcaccgtgtccgtggccgacactaaaggagtcaagcggaagaccctcttcagagagaacggctctaaacctcgggccattgtcgtcgatcccgtgcacgggtttatgtattggacggattggggaactccggctaagatcaaaaaggggggacttaacggcgtggacatatactctctcgtaacggagaatatccagtggcctaatggcatcacactcgacctcttgtcaggccgcctgtactgggtggatagcaaactccatagcattagctctatcgacgtgaatggaggaaaccggaaaactatcctcgaggatgagaagcgcctcgcacatccattctccctggccgtcttcgaagacaaagtcttttggactgacattatcaatgaagccatcttctcggccaatcgcctgactggcagcgatgtcaatctcctcgcggaaaatctgcttagtcccgaagatatggtgctgttccacaatcttacacagccgcgcggagtcaactggtgcgagaggactactttgtcaaacggaggctgccagtacttatgccttcccgcaccacagatcaatccacacagccctaaattcacatgtgcttgccctgatggtatgctcctggcacgggacatgcgtagctgtctcacagaagccgaagctgctgtggctacacaggaaacttcgactgtaaggctgaaggtaagttcaactgccgttcgtacacagcatacaacaaccaggccagtacccgacacttccagactccctggagctacccccggtctgactactgtcgaaatcgtgacgatgtctcatcaagctttaggagatgtagcaggcaggggtaacgagaaaaaaccctcatccgttcgggctctttctatcgtgctgcctatagtcttgttagtatttctttgcctcggtgtctttctcctgtggaaaaactggagacttaagaacatcaattccattaactttgacaatcccgtgtaccagaaaactacagaggacgaagtccatatttgccacaaccaggacgggtactcttatccttctagacagatggtcagcctggaggatgatgtagcatag

SEQ ID NO: 11540 - DNA, 2838 bp, Artificial Sequence
  derived and/or modified sequence
tgaggccggcccggcgtgcccccccggttcctgagccagcggcggcgtcaggtgcccggccctaggtccaggttacgcgatatccacgagtcgcccagtgtgattctgggtccccctggtgaagtccccggctttcgctgcgccctttggaggcacttgcgaccccacctggtgcttggaggagccttagccccacccgcccctatcaagtttactgagggccctcccgctactctgaaggcatccgtgccttacgaggttgagactctgccccaaaatcttcctgccccgccttggtctgctgctgagattttctctcacgtgggggaccggtgtgagcgcaacgaatttcaatgtcaagatggcaagtgcatttcctacaaatgggtgtgtgacggtagcgcagagtgtcaggacgggtctgatgagagccaggaaacatgcttgtctgtcacctgcaagtccggagatttctcttgcggaggccgagtgaaccggtgcattcctcagttctggcggtgtgacggacaggttgactgtgataatgggtcggatgagcaagggtgtcccccaaaaacctgtagccaagacgagtttaggtgtcatgacggtaagtgtatcagccggcagtttgtgtgcgatagcgaccgggattgcttagatggaagtgatgaggccagctgcccggtactcacctgtggccctgcttcctttcagtgcaactcaagcacttgcatccctcaactatgggcttgtgataacgaccccgattgcgaagatggtagtgatgaatggcctcagcggtgccgcggcctgtatgtgttccagggtgattccagtccttgttctgctttcgaattccactgcctgtccggcgaatgtatacatagcagctggcgctgtgatggaggaccagactgtaaagacaagtctgacgaagagaactgcgctgtggctacctgcagacctgatgaattccaatgttctgacggaaattgtatccatggctcgcgccagtgcgaccgtgaatatgattgtaaagatatgtcggatgaagttggttgtgtgaacgtcacattgtgcgagggccccaacaaattcaagtgccactcaggcgagtgcatcaccttggacaaggtgtgcaatatggcccgcgactgccgcgactggtctgacgaaccgatcaaggaatgcgggacgaatgaatgtctggacaacaatggaggctgcagccacgtgtgcaatgatctcaaaatcggctatgaatgtctctgcccggacggatttcagttggtcgctcagcgtaggtgcgaggacatcgatgagtgtcaagacccagacacctgctcccagctctgcgttaacctagagggcggctacaagtgccagtgtgaggagggatttcagctcgacccacacacgaaggcatgcaaggctgtagggtcaatcgcctacctcttctttaccaacagacatgaagtgagaaagatgaccctcgaccgctcagaatacaccagcctgatcccgaatttgcggaacgtggttgccttggatactgaggtagcgagcaatagaatctattggtcggatctgagccagagaatgatttgtagcactcaactggatcgggcccatggagtgtcttcatatgacaccgttatcagtagagatattcaggccccagacgggctagccgtggactggattcattcgaacatctactggaccgattctgtcctgggaaccgtctcagtcgcagacacaaaaggtgtgaaacgcaagaccttgtttcgcgagaacggatccaagcccagagcgattgtggtcgaccctgtgcatggattcatgtattggaccgattggggcactcccgctaaaataaagaaaggcggtctcaacggggttgatatctacagcctggttactgagaatatacagtggccaaatggaattactctggacctgttgagcggtaggttgtactgggtggattcaaaactccatagtatatcctctatcgatgtgaacggtggcaaccgcaagaccatattagaagatgaaaaacggctagcgcatccgttttcccttgccgtgtttgaagacaaggtcttctggactgacatcattaatgaggccattttttccgcaaaccgactgaccggctcggacgtgaatctactcgcagagaacctgcttagccctgaggacatggtgctatttcataatttgacccagccacgcggagtcaattggtgtgagcgtaccacgctgagcaacgggggatgccaatacttatgtctcccggctccgcaaattaatccacacagtcccaagtttacctgcgcctgccccgacgggatgttgctcgccagagacatgcgctcatgcctgactgaggcggaggccgctgtagctacgcaggagacgtccaccgtgcggctgaaggtttcatcgaccgcagtcagaacccagcacacaactacacgaccagtccccgatacatcccgattaccgggcgctacacccggtctaacgaccgttgaaatagtgaccatgagtcatcaagccctcggcgacgttgcgggacggggcaacgagaagaaaccctctagcgttcgcgccctgtccatcgtcctgccaatcgtgttgctggtcttcttgtgcctcggggtgttcttgctatggaaaaattggaggctgaagaacatcaactctattaacttcgataaccctgtctaccagaaaaccactgaagatgaggtgcatatctgccataatcaggacgggtacagttacccaagccgacagatggtctccctggaggacgacgttgcctag

SEQ ID NO: 11541 - DNA, 2583 bp, Artificial Sequence
  derived and/or modified sequence
atgggaccctgggggtggaaactgcgctggactgtcgccctgctgttagccgctgctgggaccgcagtaggcgatcgatgtgaacggaatgaatttcagtgccaggacggtaaatgtatctcctataagtgggtctgcgatggtagcgccgaatgtcaagacgggagtgatgaatctcaggagacttgtttatctgtgacatgcaagtccggcgacttttcttgtggcggaagagtgaaccggtgtatcccccagttctggaggtgcgatggacaggtagattgcgataacgggtcggatgaacagggctgtcctcccaagacatgtagccaggatgaattccgatgccacgacggcaagtgtatttcacggcagtttgtgtgtgactctgatcgcgattgtcttgatggttctgacgaagcaagctgccccgtgctaacttgcggccctgcaagtttccagtgcaattcctctacatgtatcccccagctgtgggcttgtgataacgatccagactgtgaggacggatctgatgaatggccccagcgatgtagggggctgtacgtgtttcagggtgattcaagtccatgctctgcgtttgaattccattgccttagtggtgagtgcatccactcatcgtggcggtgtgacgggggaccagattgcaaggataagtcggatgaggaaaactgtgccgtggcaacttgccgtcccgatgaatttcagtgtagcgatggaaactgcattcatggatccaggcagtgtgatcgcgaatacgactgcaaagacatgagtgatgaggtgggttgtgtcaacgtgactctttgcgagggtccaaataagtttaaatgccattccggcgagtgtataacactggataaagtgtgcaacatggcacgggactgccgcgattggtccgatgagccaattaaggagtgcggcaccaatgagtgtctcgacaacaacggaggttgttcccatgtctgcaacgacctcaagataggttacgaatgtttatgccctgatggctttcagctggtggcacagcgaaggtgcgaagacatcgatgagtgtcaagaccctgacacctgcagccaactgtgtgttaacctcgaaggaggctacaagtgtcagtgcgaagaggggttccagctggaccctcacacaaaggcctgcaaggccgtgggaagtatcgcgtatttgtttttcactaaccgccacgaggtgcggaagatgactctcgaccgtagcgagtatacttcattgatccccaacctcaggaacgtagtcgccttagatactgaagttgcttccaacagaatatactggagtgatctttcacagcgtatgatttgcagcacgcagttagatcgtgcacacggagtgagctcatacgatactgtgatcagtcgtgatatccaggccccagacggactagcggtggactggatccattcaaacatctattggacagacagtgtgttaggcacggtcagcgttgctgacaccaaaggcgtcaagaggaagactttgttccgcgaaaacggaagcaaaccgagggctatcgtggttgaccccgtgcatggtttcatgtattggacggactggggaacccctgctaagatcaagaaagggggactgaacggcgtggacatctatagtttggtaaccgaaaacattcagtggccaaatggcattacgctcgatcttctgtccggccgattatattgggtggattccaagctgcattctatttcaagcattgatgtcaatggtggtaatcgcaagactatcctggaggacgaaaagaggctggcacatccctttagcctggccgtgtttgaggataaggtcttttggacagacatcattaatgaggcgatcttcagcgctaatcgcctgactggatcagatgtcaacctgctagccgagaacctcctgtctcccgaagacatggtactgtttcacaacctgacccaacctagaggcgtgaactggtgtgagcgcaccacgctctccaacgggggatgccagtacctgtgtcttccagctccgcagatcaaccctcattctcccaaattcacatgcgcgtgccccgacggcatgttactcgcccgagatatgagatcttgtctgaccgaggccgaggctgccgtcgccacccaagagacatctaccgtgcgactgaaggtgtcttctacagcggtgcggacacagcacacaacaacgagacccgtgcccgatacctccagattgcccggagcaacccccggtctgacaaccgtagagatcgtgacaatgtcccaccaggccctgggagacgtggctggcagaggaaacgaaaagaagcctagtagtgttcgtgccctgtccatcgtccttccaattgttctgctggtattcctctgtctcggggtgtttctgctttggaaaaactggaggctgaagaatataaactccattaattttgataatccagtctatcagaagaccactgaggacgaagtccacatctgccataaccaggatggctattcctaccctagcagacaaatggtgtctctggaagatgatgtggcttag

SEQ ID NO: 11542 - DNA, 2838 bp, Artificial Sequence
  derived and/or modified sequence
tgaggtaggccaggcgtacctccgaggttcttatcacaacgcagacggcaggtaccagggcctcgctctcgactaagggacattcatgaaagccctagtgtcatcctggggcctcctggagaagtacccggattccggtgtgcactgtggagacacctaaggccgcatttggtcttaggtggtgccctagcacccccagcaccaatcaagtttaccgagggtcctccagctacattaaaggcctccgttccttatgaagtagagacactgccacaaaatctgcccgcaccaccatggtcagcagccgagatcttctcgcacgtcggtgaccgttgtgagcggaacgagtttcagtgccaagacgggaagtgcatctcttataagtgggtttgcgatgggagcgccgaatgccaggatggttcagatgaatctcaggagacctgcctcagcgtaacctgcaagagcggcgacttcagctgtgggggtcgagttaacaggtgcattccacaattctggcgttgcgatgggcaagtggattgcgacaatggatccgacgagcaaggatgcccacccaagacgtgctcccaggatgagtttaggtgccatgatggaaagtgcatcagcaggcagttcgtctgcgactccgacagggactgtctggacggctccgacgaggcctcctgcccggtcctgacctgcggacccgcatcatttcagtgtaacagcagtacctgtattccgcagctctgggcttgcgataacgaccccgattgcgaagatgggtctgacgagtggccgcaaagatgtcgcggtttgtacgtctttcagggcgattctagtccctgtagcgcctttgagttccattgtctatcgggcgaatgtatccactccagttggagatgcgacgggggtcctgactgcaaggacaaatccgatgaagaaaactgtgcggtggcaacttgtaggccagatgaatttcagtgttcggatgggaattgtattcatggatcaagacagtgtgaccgggagtatgattgcaaagacatgtctgacgaagtgggttgcgttaatgttacattatgcgaaggtcccaataaattcaagtgtcactctggagagtgtattaccctcgataaagtgtgcaacatggcccgtgactgtcgggactggtcggatgagccaatcaaggagtgtggtacaaatgagtgccttgacaataacggcggatgttcccatgtgtgcaacgacttgaaaattggttatgagtgcctgtgccccgacgggttccagttggtagcacagcggaggtgcgaggatatagacgagtgccaggatcccgatacctgcagtcagctttgtgtgaacctcgaagggggttataaatgccagtgcgaggaagggtttcaacttgatccacatactaaagcatgtaaagctgtgggttctatcgcctatttgttcttcacaaaccggcatgaggtacggaaaatgacccttgaccggtccgagtatactagcctgattcccaacctcagaaatgtggtggcactagataccgaagttgctagcaacaggatctactggagtgatctcagtcagagaatgatatgcagcacacagttagatagggcacacggcgtgagttcgtacgacaccgtgatttctagagatatccaagcccctgatggactcgcagttgactggatccactcaaacatttactggaccgactccgtgctgggaacggtgagtgtggctgacacaaagggagttaagaggaaaaccctattcagggagaatggctctaaacccagggccatcgtagtggaccccgttcatggctttatgtactggactgactgggggacacctgccaagataaagaagggaggcctgaacggcgttgatatttactccctcgtgacggagaatatccagtggcccaacgggatcaccctggatctgttaagcggaaggttgtactgggtagacagcaaacttcattccatctcaagcattgacgtcaacggcggaaatagaaagactatccttgaggatgagaaacgcctcgcacacccattcagcctcgctgtctttgaagataaagttttttggaccgatatcatcaatgaagcgatcttctccgccaaccgcttaactggttctgatgttaatttgctggcggagaatctgctctctcctgaggacatggtactcttccacaatctgacccagccccgaggggttaattggtgcgaacggaccactctgtctaacggcggttgtcagtacttatgcctgcctgcgccacagataaatcctcatagccccaaatttacctgcgcttgcccagacggtatgcttctggccagggatatgaggagttgtttaactgaagcggaggccgctgtagccacccaagagaccagcacagtgcggctgaaggtgtcctccacagcagtgcggactcagcatacaacgactcggccagtgccagacacgtccagattaccaggtgccacacccggattgaccactgtcgagattgttaccatgagccatcaagctctgggggacgtggcagggaggggcaatgaaaaaaagccgtcttccgtcagagccctctcgattgtgctaccaattgtgctgctggttttcctgtgtcttggagtgtttctcctgtggaagaactggcgactgaagaacatcaactcaattaacttcgataaccccgtgtaccaaaaaactactgaggacgaagtccacatctgtcataaccaggacggctacagctatccaagtaggcagatggttagtctcgaagatgacgttgcatag

SEQ ID NO: 11543 - DNA, 3617 bp, Artificial Sequence
  derived and/or modified sequence
ctcttgcagtgaggtgaagacatttgaaaatcaccccactgcaaactcctccccctgctagaaacctcacattgaaatgctgtaaatgacgtgggccccgagtgcaatcgcgggaagccagggtttccagctaggacacagcaggtcgtgatccgggtcgggacactgcctggcagaggctgcgagcatggggccctggggctggaaattgcgctggaccgtcgccttgctcctcgccgcggcggggactgcagtgggcgacagatgcgaaagaaacgagttccagtgccaagacgggaaatgcatctcctacaagtgggtctgcgatggcagcgctgagtgccaggatggctctgatgagtcccaggagacgtgcttgtctgtcacctgcaaatccggggacttcagctgtgggggccgtgtcaaccgctgcattcctcagttctggaggtgcgatggccaagtggactgcgacaacggctcagacgagcaaggctgtccccccaagacgtgctcccaggacgagtttcgctgccacgatgggaagtgcatctctcggcagttcgtctgtgactcagaccgggactgcttggacggctcagacgaggcctcctgcccggtgctcacctgtggtcccgccagcttccagtgcaacagctccacctgcatcccccagctgtgggcctgcgacaacgaccccgactgcgaagatggctcggatgagtggccgcagcgctgtaggggtctttacgtgttccaaggggacagtagcccctgctcggccttcgagttccactgcctaagtggcgagtgcatccactccagctggcgctgtgatggtggccccgactgcaaggacaaatctgacgaggaaaactgcgctgtggccacctgtcgccctgacgaattccagtgctctgatggaaactgcatccatggcagccggcagtgtgaccgggaatatgactgcaaggacatgagcgatgaagttggctgcgttaatgtgacactctgcgagggacccaacaagttcaagtgtcacagcggcgaatgcatcaccctggacaaagtctgcaacatggctagagactgccgggactggtcagatgaacccatcaaagagtgcgggaccaacgaatgcttggacaacaacggcggctgttcccacgtctgcaatgaccttaagatcggctacgagtgcctgtgccccgacggcttccagctggtggcccagcgaagatgcgaagatatcgatgagtgtcaggatcccgacacctgcagccagctctgcgtgaacctggagggtggctacaagtgccagtgtgaggaaggcttccagctggacccccacacgaaggcctgcaaggctgtgggctccatcgcctacctcttcttcaccaaccggcacgaggtcaggaagatgacgctggaccggagcgagtacaccagcctcatccccaacctgaggaacgtggtcgctctggacacggaggtggccagcaatagaatctactggtctgacctgtcccagagaatgatctgcagcacccagcttgacagagcccacggcgtctcttcctatgacaccgtcatcagcagagacatccaggcccccgacgggctggctgtggactggatccacagcaacatctactggaccgactctgtcctgggcactgtctctgttgcggataccaagggcgtgaagaggaaaacgttattcagggagaacggctccaagccaagggccatcgtggtggatcctgttcatggcttcatgtactggactgactggggaactcccgccaagatcaagaaagggggcctgaatggtgtggacatctactcgctggtgactgaaaacattcagtggcccaatggcatcaccctagatctcctcagtggccgcctctactgggttgactccaaacttcactccatctcaagcatcgatgtcaacgggggcaaccggaagaccatcttggaggatgaaaagaggctggcccaccccttctccttggccgtctttgaggacaaagtattttggacagatatcatcaacgaagccattttcagtgccaaccgcctcacaggttccgatgtcaacttgttggctgaaaacctactgtccccagaggatatggttctcttccacaacctcacccagccaagaggagtgaactggtgtgagaggaccaccctgagcaatggcggctgccagtatctgtgcctccctgccccgcagatcaacccccactcgcccaagtttacctgcgcctgcccggacggcatgctgctggccagggacatgaggagctgcctcacagaggctgaggctgcagtggccacccaggagacatccaccgtcaggctaaaggtcagctccacagccgtaaggacacagcacacaaccacccgacctgttcccgacacctcccggctgcctggggccacccctgggctcaccacggtggagatagtgacaatgtctcaccaagctctgggcgacgttgctggcagaggaaatgagaagaagcccagtagcgtgagggctctgtccattgtcctccccatcgtgctcctcgtcttcctttgcctgggggtcttccttctatggaagaactggcggcttaagaacatcaacagcatcaactttgacaaccccgtctatcagaagaccacagaggatgaggtccacatttgccacaaccaggacggctacagctacccctcgagacagatggtcagtctggaggatgacgtggcgtgaacatctgcctggagtcccgtccctgcccagaacccttcctgagacctcgccggccttgttttattcaaagacagagaagaccaaagcattgcctgccagagctttgttttatatatttattcatctgggaggcagaacaggcttcggacagtgcccatgcaatggcttgggttgggattttggtttcttcctttcctcgtgaaggataagagaaacaggcccggggggaccaggatgacacctccatttctctccaggaagttttgagtttctctccaccgtgacacaatcctcaaacatggaagatgaaaggggaggggatgtcaggcccagagaagcaagtggctttcaacacacaacagcagatggcaccaacgggaccccctggccctgcctcatccaccaatctctaagccaaacccctaaactcaggagtcaacgtgtttacctcttctatgcaagccttgctagacagccaggttagcctttgccctgtcacccccgaatcatgacccacccagtgtctttcgaggtgggtttgtaccttccttaagccaggaaagggattcatggcgtcggaaatgatctggctgaatccgtggtggcaccgagaccaaactcattcaccaaatgatgccacttcccagaggcagagcctgagtcactggtcacccttaatatttattaagtgcctgagacacccggttaccttggccgtgaggacacgtggcctgcacccaggtgtggctgtcaggacaccagcctggtgcccatcctcccgacccctacccacttccattcccgtggtctccttgcactttctcagttcagagttgtacactgtgta

SEQ ID NO: 11544 - DNA, 5337 bp, Artificial Sequence
  derived and/or modified sequence
aggggaggcctggcgttcctccgcggttcctgtcacaaaggcgacgacaagtcccgggtccccggagccgcctccgcgacatacacgagtcgccctccgttatcctgggccctcctggcgaagtccccggtttccgctgtgctctgtggcgacacctccgtccccaccttgtcctggggggcgccctcgccccaccagccccgatcaagttcacagaggggcccccggccaccctcaaggcctcggttccttacgaggttgaaacgttgcctcagaatctccccgcccctccttggtctgcagccgagatcttcagccacgtgggcgacagatgcgaaagaaacgagttccagtgccaagacgggaaatgcatctcctacaagtgggtctgcgatggcagcgctgagtgccaggatggctctgatgagtcccaggagacgtgcttgtctgtcacctgcaaatccggggacttcagctgtgggggccgtgtcaaccgctgcattcctcagttctggaggtgcgatggccaagtggactgcgacaacggctcagacgagcaaggctgtccccccaagacgtgctcccaggacgagtttcgctgccacgatgggaagtgcatctctcggcagttcgtctgtgactcagaccgggactgcttggacggctcagacgaggcctcctgcccggtgctcacctgtggtcccgccagcttccagtgcaacagctccacctgcatcccccagctgtgggcctgcgacaacgaccccgactgcgaagatggctcggatgagtggccgcagcgctgtaggggtctttacgtgttccaaggggacagtagcccctgctcggccttcgagttccactgcctaagtggcgagtgcatccactccagctggcgctgtgatggtggccccgactgcaaggacaaatctgacgaggaaaactgcgctgtggccacctgtcgccctgacgaattccagtgctctgatggaaactgcatccatggcagccggcagtgtgaccgggaatatgactgcaaggacatgagcgatgaagttggctgcgttaatgtgacactctgcgagggacccaacaagttcaagtgtcacagcggcgaatgcatcaccctggacaaagtctgcaacatggctagagactgccgggactggtcagatgaacccatcaaagagtgcgggaccaacgaatgcttggacaacaacggcggctgttcccacgtctgcaatgaccttaagatcggctacgagtgcctgtgccccgacggcttccagctggtggcccagcgaagatgcgaagatatcgatgagtgtcaggatcccgacacctgcagccagctctgcgtgaacctggagggtggctacaagtgccagtgtgaggaaggcttccagctggacccccacacgaaggcctgcaaggctgtgggctccatcgcctacctcttcttcaccaaccggcacgaggtcaggaagatgacgctggaccggagcgagtacaccagcctcatccccaacctgaggaacgtggtcgctctggacacggaggtggccagcaatagaatctactggtctgacctgtcccagagaatgatctgcagcacccagcttgacagagcccacggcgtctcttcctatgacaccgtcatcagcagagacatccaggcccccgacgggctggctgtggactggatccacagcaacatctactggaccgactctgtcctgggcactgtctctgttgcggataccaagggcgtgaagaggaaaacgttattcagggagaacggctccaagccaagggccatcgtggtggatcctgttcatggcttcatgtactggactgactggggaactcccgccaagatcaagaaagggggcctgaatggtgtggacatctactcgctggtgactgaaaacattcagtggcccaatggcatcaccctagatctcctcagtggccgcctctactgggttgactccaaacttcactccatctcaagcatcgatgtcaacgggggcaaccggaagaccatcttggaggatgaaaagaggctggcccaccccttctccttggccgtctttgaggacaaagtattttggacagatatcatcaacgaagccattttcagtgccaaccgcctcacaggttccgatgtcaacttgttggctgaaaacctactgtccccagaggatatggttctcttccacaacctcacccagccaagaggagtgaactggtgtgagaggaccaccctgagcaatggcggctgccagtatctgtgcctccctgccccgcagatcaacccccactcgcccaagtttacctgcgcctgcccggacggcatgctgctggccagggacatgaggagctgcctcacagaggctgaggctgcagtggccacccaggagacatccaccgtcaggctaaaggtcagctccacagccgtaaggacacagcacacaaccacccgacctgttcccgacacctcccggctgcctggggccacccctgggctcaccacggtggagatagtgacaatgtctcaccaagctctgggcgacgttgctggcagaggaaatgagaagaagcccagtagcgtgagggctctgtccattgtcctccccatcgtgctcctcgtcttcctttgcctgggggtcttccttctatggaagaactggcggcttaagaacatcaacagcatcaactttgacaaccccgtctatcagaagaccacagaggatgaggtccacatttgccacaaccaggacggctacagctacccctcgagacagatggtcagtctggaggatgacgtggcgtgaacatctgcctggagtcccgtccctgcccagaacccttcctgagacctcgccggccttgttttattcaaagacagagaagaccaaagcattgcctgccagagctttgttttatatatttattcatctgggaggcagaacaggcttcggacagtgcccatgcaatggcttgggttgggattttggtttcttcctttcctcgtgaaggataagagaaacaggcccggggggaccaggatgacacctccatttctctccaggaagttttgagtttctctccaccgtgacacaatcctcaaacatggaagatgaaaggggaggggatgtcaggcccagagaagcaagtggctttcaacacacaacagcagatggcaccaacgggaccccctggccctgcctcatccaccaatctctaagccaaacccctaaactcaggagtcaacgtgtttacctcttctatgcaagccttgctagacagccaggttagcctttgccctgtcacccccgaatcatgacccacccagtgtctttcgaggtgggtttgtaccttccttaagccaggaaagggattcatggcgtcggaaatgatctggctgaatccgtggtggcaccgagaccaaactcattcaccaaatgatgccacttcccagaggcagagcctgagtcactggtcacccttaatatttattaagtgcctgagacacccggttaccttggccgtgaggacacgtggcctgcacccaggtgtggctgtcaggacaccagcctggtgcccatcctcccgacccctacccacttccattcccgtggtctccttgcactttctcagttcagagttgtacactgtgtacatttggcatttgtgttattattttgcactgttttctgtcgtgtgtgttgggatgggatcccaggccagggaaagcccgtgtcaatgaatgccggggacagagaggggcaggttgaccgggacttcaaagccgtgatcgtgaatatcgagaactgccattgtcgtctttatgtccgcccacctagtgcttccacttctatgcaaatgcctccaagccattcacttccccaatcttgtcgttgatgggtatgtgtttaaaacatgcacggtgaggccgggcgcagtggctcacgcctgtaatcccagcactttgggaggccgaggcgggtggatcatgaggtcaggagatcgagaccatcctggctaacacgtgaaaccccgtctctactaaaaatacaaaaaattagccgggcgtggtggcgggcacctgtagtcccagctactcgggaggctgaggcaggagaatggtgtgaacccgggaagcggagcttgcagtgagccgagattgcgccactgcagtccgcagtctggcctgggcgacagagcgagactccgtctcaaaaaaaaaaaacaaaaaaaaaccatgcatggtgcatcagcagcccatggcctctggccaggcatggcgaggctgaggtgggaggatggtttgagctcaggcatttgaggctgtcgtgagctatgattatgccactgctttccagcctgggcaacatagtaagaccccatctcttaaaaaatgaatttggccagacacaggtgcctcacgcctgtaatcccagcactttgggaggctgagctggatcacttgagttcaggagttggagaccaggcctgagcaacaaagcgagatcccatctctacaaaaaccaaaaagttaaaaatcagctgggtacggtggcacgtgcctgtgatcccagctacttgggaggctgaggcaggaggatcgcctgagcccaggaggtggaggttgcagtgagccatgatcgagccactgcactccagcctgggcaacagatgaagaccctatttcagaaatacaactataaaaaaataaataaatcctccagtctggatcgtttgacgggacttcaggttctttctgaaatcgccgtgttactgttgcactgatgtccggagagacagtgacagcctccgtcagactcccgcgtgaagatgtcacaagggattggcaattgtccccagggacaaaacactgtgtcccccccagtgcagggaaccgtgataagcctttctggtttcggagcacgtaaatgcgtccctgtacagatagtggggattttttgttatgtttgcactttgtatattggttgaaactgttatcacttatatatatatatatacacacatatatataaaatctatttatttttgcaaaccctggttgctgtatttgttcagtgactattctcggggccctgtgtagggggttattgcctctgaaatgcctcttctttatgtacaaagattatttgcacgaactggactgtgtgcaacgctttttgggagaatgatgtccccgttgtatgtatgagtggcttctgggagatgggtgtcactttttaaaccactgtatagaaggtttttgtagcctgaatgtcttactgtgatcaattaaatttcttaaatgaa

SEQ ID NO: 11545 - DNA, 2729 bp, Artificial Sequence
  derived and/or modified sequence
gggaaataagagagaaaagaagagtaagaagaaatataagagccaccatgggtccgtggggctggaagcttagatggacagtcgcgctcctccttgcagcagcaggaactgcggtcggagatcgatgcgagcgcaacgagttccaatgccaagatgggaagtgtatttcgtacaagtgggtctgcgatggatcagcggaatgtcaggacggaagcgatgagagccaagaaacatgcctctcagtgacatgcaagtcgggagacttctcgtgcggaggacgcgtaaacagatgtattccacagttttggcgctgcgatggtcaggtggactgcgacaacggttcagatgaacagggatgtcctccgaaaacgtgctcacaagacgagtttcgctgccatgatggaaagtgcatttcgcggcagttcgtatgtgattcggatcgggactgtctggacggctcggacgaagcgtcatgcccggtacttacttgcgggccagcctcattccaatgcaacagctcaacgtgcattccccagctgtgggcctgtgacaatgatcctgattgtgaggacggtagcgacgagtggccgcagagatgtaggggtttgtacgtattccaaggagactcaagcccctgttccgcctttgagtttcactgcctgtcgggtgaatgcatccactccagctggcgatgtgatggtgggcccgactgcaaagataagagcgacgaggagaattgcgcggtcgcgacgtgcagacccgatgagttccagtgctccgatggaaactgcatccacgggagccggcagtgtgatcgcgagtacgattgtaaagacatgtcagacgaggtcggatgcgtgaacgtcacgttgtgcgagggtccgaacaagtttaagtgccattcgggcgaatgtattacgctcgataaagtctgcaacatggcgcgagattgtagggattggtcagacgaacccatcaaggagtgcggcactaacgagtgtttggacaataacggcgggtgttcgcacgtctgcaatgaactcaaaattgggtatgagtgtctctgtcctgacggattccagctggtcgcgcagcgcagatgcgaggacatcgacgagtgccaggaccccgacacatgttcgcagttgtgtgtcaaccttgaaggagggtacaagtgccagtgcgaggagggatttcagcttgacccgcacacgaaagcatgtaaagcggtggggtccattgcgtatttgtttttcacaaacagacatgaagtgcggaagatgacccttgatcgcagcgaatatacgtcactgatccctaatcttaggaatgtcgtggcccttgacacggaggtagcatcaaatagaatctactggtccgacctctcacagagaatgatctgttcaacacagttggatcgggcgcacggggtgtcgtcgtacgatacggtaattagccgcgacatccaggcgccagacggactcgcggtcgactggatccatagcaacatctactggacagactccgtgttgggaaccgtatccgtagctgacacaaagggagtgaagcggaaaactctttttagagagaacggcagcaaaccgagagcaatcgtggtcgatccggtgcatggattcatgtattggaccgattggggaacgccagccaaaatcaagaaaggcggtttgaatggggtcgacatctactcgctggtgactgagaatattcagtggccaaacgggatcaccttggacttgttgtcggggaggttgtattgggtggactcaaagctccactcgatcagctcgatcgacgtgaacggcggaaataggaaaactattctcgaagatgagaaaagactggcccaccccttctcgctcgcggtgttcgaggacaaagtattttggacagacatcatcaacgaagcgatcttttcagccaaccgcctgacagggtcggatgtcaatctcttggccgaaaaccttctgagcccggaagatatggtcttgtttcacaatttgacccaacccagaggtgtgaattggtgcgaacggacgacattgtcgaacggaggttgccagtatctctgtctccctgcaccccagattaatccccattcacccaagttcacgtgtgcgtgcccagacggaatgcttcttgcgagggacatgagatcctgtctcaccgaagcggaagcggcagtggccacacaagagacttcgactgtccgccttaaagtgtcctcgacggcggtccgaactcagcatacgaccacacgacccgtgcccgatacctcgcggttgcccggagcaacaccggggttgacgacagtagaaatcgtaaccatgagccaccaggcacttggagatgtcgcaggcagaggcaatgagaagaaacccagctcggtcagagccctcagcatcgtgctgcctattgtgctgcttgtgtttctctgtttgggtgtgttcttgttgtggaagaactggcgccttaagaatatcaactcgattaacttcgataatccggtataccagaaaaccacagaggatgaagtgcatatttgtcacaaccaagatggctattcgtacccgtccaggcaaatggtatcacttgaggacgacgtggcctgataataggctgccttctgcggggcttgccttctggccatgcccttcttctctcccttgcacctgtacctcttggtctttgaataaagcctgagtaggaag

SEQ ID NO: 11546 - DNA, 2729 bp, Artificial Sequence
  derived and/or modified sequence
gggaaataagagagaaaagaagagtaagaagaaatataagagccaccatgggtccgtggggctggaagcttagatggacagtcgcgctcctccttgcagcagcaggaactgcggtcggagatcgatgcgagcgcaacgagttccaatgccaagatgggaagtgtatttcgtacaagtgggtctgcgatggatcagcggaatgtcaggacggaagcgatgagagccaagaaacatgcctctcagtgacatgcaagtcgggagacttctcgtgcggaggacgcgtaaacagatgtattccacagttttggcgctgcgatggtcaggtggactgcgacaacggttcagatgaacagggatgtcctccgaaaacgtgctcacaagacgagtttcgctgccatgatggaaagtgcatttcgcggcagttcgtatgtgattcggatcgggactgtctggacggctcggacgaagcgtcatgcccggtacttacttgcgggccagcctcattccaatgcaacagctcaacgtgcattccccagctgtgggcctgtgacaatgatcctgattgtgaggacggtagcgacgagtggccgcagagatgtaggggtttgtacgtattccaaggagactcaagcccctgttccgcctttgagtttcactgcctgtcgggtgaatgcatccactccagctggcgatgtgatggtgggcccgactgcaaagataagagcgacgaggagaattgcgcggtcgcgacgtgcagacccgatgagttccagtgctccgatggaaactgcatccacgggagccggcagtgtgatcgcgagtacgattgtaaagacatgtcagacgaggtcggatgcgtgaacgtcacgttgtgcgagggtccgaacaagtttaagtgccattcgggcgaatgtattacgctcgataaagtctgcaacatggcgcgagattgtagggattggtcagacgaacccatcaaggagtgcggcactaacgagtgtttggacaataacggcgggtgttcgcacgtctgcaatgatctcaaaattgggtatgagtgtgattgtcctgacggattccagctggtcgcgcagcgcagatgcgaggacatcgacgagtgccaggaccccgacacatgttcgcagttgtgtgtcaaccttgaaggagggtacaagtgccagtgcgaggagggatttcagcttgacccgcacacgaaagcatgtaaagcggtggggtccattgcgtatttgtttttcacaaacagacatgaagtgcggaagatgacccttgatcgcagcgaatatacgtcactgatccctaatcttaggaatgtcgtggcccttgacacggaggtagcatcaaatagaatctactggtccgacctctcacagagaatgatctgttcaacacagttggatcgggcgcacggggtgtcgtcgtacgatacggtaattagccgcgacatccaggcgccagacggactcgcggtcgactggatccatagcaacatctactggacagactccgtgttgggaaccgtatccgtagctgacacaaagggagtgaagcggaaaactctttttagagagaacggcagcaaaccgagagcaatcgtggtcgatccggtgcatggattcatgtattggaccgattggggaacgccagccaaaatcaagaaaggcggtttgaatggggtcgacatctactcgctggtgactgagaatattcagtggccaaacgggatcaccttggacttgttgtcggggaggttgtattgggtggactcaaagctccactcgatcagctcgatcgacgtgaacggcggaaataggaaaactattctcgaagatgagaaaagactggcccaccccttctcgctcgcggtgttcgaggacaaagtattttggacagacatcatcaacgaagcgatcttttcagccaaccgcctgacagggtcggatgtcaatctcttggccgaaaaccttctgagcccggaagatatggtcttgtttcacaatttgacccaacccagaggtgtgaattggtgcgaacggacgacattgtcgaacggaggttgccagtatctctgtctccctgcaccccagattaatccccattcacccaagttcacgtgtgcgtgcccagacggaatgcttcttgcgagggacatgagatcctgtctcaccgaagcggaagcggcagtggccacacaagagacttcgactgtccgccttaaagtgtcctcgacggcggtccgaactcagcatacgaccacacgacccgtgcccgatacctcgcggttgcccggagcaacaccggggttgacgacagtagaaatcgtaaccatgagccaccaggcacttggagatgtcgcaggcagaggcaatgagaagaaacccagctcggtcagagccctcagcatcgtgctgcctattgtgctgcttgtgtttctctgtttgggtgtgttcttgttgtggaagaactggcgccttaagaatatcaactcgattaacttcgataatccggtataccagaaaaccacagaggatgaagtgcatatttgtcacaaccaagatggctattcgtacccgtccaggcaaatggtatcacttgaggacgacgtggcctgataataggctgccttctgcggggcttgccttctggccatgcccttcttctctcccttgcacctgtacctcttggtctttgaataaagcctgagtaggaag

SEQ ID NO: 11547 - DNA, 2729 bp, Artificial Sequence
  derived and/or modified sequence
gggaaataagagagaaaagaagagtaagaagaaatataagagccaccatgggtccgtggggctggaagcttagatggacagtcgcgctcctccttgcagcagcaggaactgcggtcggagatcgatgcgagcgcaacgagttccaatgccaagatgggaagtgtatttcgtacaagtgggtctgcgatggatcagcggaatgtcaggacggaagcgatgagagccaagaaacatgcctctcagtgacatgcaagtcgggagacttctcgtgcggaggacgcgtaaacagatgtattccacagttttggcgctgcgatggtcaggtggactgcgacaacggttcagatgaacagggatgtcctccgaaaacgtgctcacaagacgagtttcgctgccatgatggaaagtgcatttcgcggcagttcgtatgtgattcggatcgggactgtctggacggctcggacgaagcgtcatgcccggtacttacttgcgggccagcctcattccaatgcaacagctcaacgtgcattccccagctgtgggcctgtgacaatgatcctgattgtgaggacggtagcgacgagtggccgcagagatgtaggggtttgtacgtattccaaggagactcaagcccctgttccgcctttgagtttcactgcctgtcgggtgaatgcatccactccagctggcgatgtgatggtgggcccgactgcaaagataagagcgacgaggagaattgcgcggtcgcgacgtgcagacccgatgagttccagtgctccgatggaaactgcatccacgggagccggcagtgtgatcgcgagtacgattgtaaagacatgtcagacgaggtcggatgcgtgaacgtcacgttgtgcgagggtccgaacaagtttaagtgccattcgggcgaatgtattacgctcgataaagtctgcaacatggcgcgagattgtagggattggtcagacgaacccatcaaggagtgcggcactgcagagtgtttggacaataacggcgggtgttcgcacgtctgcaatgatctcaaaattgggtatgagtgtctctgtcctgacggattccagctggtcgcgcagcgcagatgcgaggacatcgacgagtgccaggaccccgacacatgttcgcagttgtgtgtcaaccttgaaggagggtacaagtgccagtgcgaggagggatttcagcttgacccgcacacgaaagcatgtaaagcggtggggtccattgcgtatttgtttttcacaaacagacatgaagtgcggaagatgacccttgatcgcagcgaatatacgtcactgatccctaatcttaggaatgtcgtggcccttgacacggaggtagcatcaaatagaatctactggtccgacctctcacagagaatgatctgttcaacacagttggatcgggcgcacggggtgtcgtcgtacgatacggtaattagccgcgacatccaggcgccagacggactcgcggtcgactggatccatagcaacatctactggacagactccgtgttgggaaccgtatccgtagctgacacaaagggagtgaagcggaaaactctttttagagagaacggcagcaaaccgagagcaatcgtggtcgatccggtgcatggattcatgtattggaccgattggggaacgccagccaaaatcaagaaaggcggtttgaatggggtcgacatctactcgctggtgactgagaatattcagtggccaaacgggatcaccttggacttgttgtcggggaggttgtattgggtggactcaaagctccactcgatcagctcgatcgacgtgaacggcggaaataggaaaactattctcgaagatgagaaaagactggcccaccccttctcgctcgcggtgttcgaggacaaagtattttggacagacatcatcaacgaagcgatcttttcagccaaccgcctgacagggtcggatgtcaatctcttggccgaaaaccttctgagcccggaagatatggtcttgtttcacaatttgacccaacccagaggtgtgaattggtgcgaacggacgacattgtcgaacggaggttgccagtatctctgtctccctgcaccccagattaatccccattcacccaagttcacgtgtgcgtgcccagacggaatgcttcttgcgagggacatgagatcctgtctcaccgaagcggaagcggcagtggccacacaagagacttcgactgtccgccttaaagtgtcctcgacggcggtccgaactcagcatacgaccacacgacccgtgcccgatacctcgcggttgcccggagcaacaccggggttgacgacagtagaaatcgtaaccatgagccaccaggcacttggagatgtcgcaggcagaggcaatgagaagaaacccagctcggtcagagccctcagcatcgtgctgcctattgtgctgcttgtgtttctctgtttgggtgtgttcttgttgtggaagaactggcgccttaagaatatcaactcgattaacttcgataatccggtataccagaaaaccacagaggatgaagtgcatatttgtcacaaccaagatggctattcgtacccgtccaggcaaatggtatcacttgaggacgacgtggcctgataataggctgccttctgcggggcttgccttctggccatgcccttcttctctcccttgcacctgtacctcttggtctttgaataaagcctgagtaggaag

SEQ ID NO: 11548 - DNA, 2729 bp, Artificial Sequence
  derived and/or modified sequence
gggaaataagagagaaaagaagagtaagaagaaatataagagccaccatgggtccgtggggctggaagcttagatggacagtcgcgctcctccttgcagcagcaggaactgcggtcggagatcgatgcgagcgcaacgagttccaatgccaagatgggaagtgtatttcgtacaagtgggtctgcgatggatcagcggaatgtcaggacggaagcgatgagagccaagaaacatgcctctcagtgacatgcaagtcgggagacttctcgtgcggaggacgcgtaaacagatgtattccacagttttggcgctgcgatggtcaggtggactgcgacaacggttcagatgaacagggatgtcctccgaaaacgtgctcacaagacgagtttcgctgccatgatggaaagtgcatttcgcggcagttcgtatgtgattcggatcgggactgtctggacggctcggacgaagcgtcatgcccggtacttacttgcgggccagcctcattccaatgcaacagctcaacgtgcattccccagctgtgggcctgtgacaatgatcctgattgtgaggacggtagcgacgagtggccgcagagatgtaggggtttgtacgtattccaaggagactcaagcccctgttccgcctttgagtttcactgcctgtcgggtgaatgcatccactccagctggcgatgtgatggtgggcccgactgcaaagataagagcgacgaggagaattgcgcggtcgcgacgtgcagacccgatgagttccagtgctccgatggaaactgcatccacgggagccggcagtgtgatcgcgagtacgattgtaaagacatgtcagacgaggtcggatgcgtgaacgtcacgttgtgcgagggtccgaacaagtttaagtgccattcgggcgaatgtattacgctcgataaagtctgcaacatggcgcgagattgtagggattggtcagacgaacccatcaaggagtgcggcactaacgcatgtttggacaataacggcgggtgttcgcacgtctgcaatgatctcaaaattgggtatgagtgtctctgtcctgacggattccagctggtcgcgcagcgcagatgcgaggacatcgacgagtgccaggaccccgacacatgttcgcagttgtgtgtcaaccttgaaggagggtacaagtgccagtgcgaggagggatttcagcttgacccgcacacgaaagcatgtaaagcggtggggtccattgcgtatttgtttttcacaaacagacatgaagtgcggaagatgacccttgatcgcagcgaatatacgtcactgatccctaatcttaggaatgtcgtggcccttgacacggaggtagcatcaaatagaatctactggtccgacctctcacagagaatgatctgttcaacacagttggatcgggcgcacggggtgtcgtcgtacgatacggtaattagccgcgacatccaggcgccagacggactcgcggtcgactggatccatagcaacatctactggacagactccgtgttgggaaccgtatccgtagctgacacaaagggagtgaagcggaaaactctttttagagagaacggcagcaaaccgagagcaatcgtggtcgatccggtgcatggattcatgtattggaccgattggggaacgccagccaaaatcaagaaaggcggtttgaatggggtcgacatctactcgctggtgactgagaatattcagtggccaaacgggatcaccttggacttgttgtcggggaggttgtattgggtggactcaaagctccactcgatcagctcgatcgacgtgaacggcggaaataggaaaactattctcgaagatgagaaaagactggcccaccccttctcgctcgcggtgttcgaggacaaagtattttggacagacatcatcaacgaagcgatcttttcagccaaccgcctgacagggtcggatgtcaatctcttggccgaaaaccttctgagcccggaagatatggtcttgtttcacaatttgacccaacccagaggtgtgaattggtgcgaacggacgacattgtcgaacggaggttgccagtatctctgtctccctgcaccccagattaatccccattcacccaagttcacgtgtgcgtgcccagacggaatgcttcttgcgagggacatgagatcctgtctcaccgaagcggaagcggcagtggccacacaagagacttcgactgtccgccttaaagtgtcctcgacggcggtccgaactcagcatacgaccacacgacccgtgcccgatacctcgcggttgcccggagcaacaccggggttgacgacagtagaaatcgtaaccatgagccaccaggcacttggagatgtcgcaggcagaggcaatgagaagaaacccagctcggtcagagccctcagcatcgtgctgcctattgtgctgcttgtgtttctctgtttgggtgtgttcttgttgtggaagaactggcgccttaagaatatcaactcgattaacttcgataatccggtataccagaaaaccacagaggatgaagtgcatatttgtcacaaccaagatggctattcgtacccgtccaggcaaatggtatcacttgaggacgacgtggcctgataataggctgccttctgcggggcttgccttctggccatgcccttcttctctcccttgcacctgtacctcttggtctttgaataaagcctgagtaggaag

SEQ ID NO: 11549 - DNA, 2729 bp, Artificial Sequence
  derived and/or modified sequence
gggaaataagagagaaaagaagagtaagaagaaatataagagccaccatgggtccgtggggctggaagcttagatggacagtcgcgctcctccttgcagcagcaggaactgcggtcggagatcgatgcgagcgcaacgagttccaatgccaagatgggaagtgtatttcgtacaagtgggtctgcgatggatcagcggaatgtcaggacggaagcgatgagagccaagaaacatgcctctcagtgacatgcaagtcgggagacttctcgtgcggaggacgcgtaaacagatgtattccacagttttggcgctgcgatggtcaggtggactgcgacaacggttcagatgaacagggatgtcctccgaaaacgtgctcacaagacgagtttcgctgccatgatggaaagtgcatttcgcggcagttcgtatgtgattcggatcgggactgtctggacggctcggacgaagcgtcatgcccggtacttacttgcgggccagcctcattccaatgcaacagctcaacgtgcattccccagctgtgggcctgtgacaatgatcctgattgtgaggacggtagcgacgagtggccgcagagatgtaggggtttgtacgtattccaaggagactcaagcccctgttccgcctttgagtttcactgcctgtcgggtgaatgcatccactccagctggcgatgtgatggtgggcccgactgcaaagataagagcgacgaggagaattgcgcggtcgcgacgtgcagacccgatgagttccagtgctccgatggaaactgcatccacgggagccggcagtgtgatcgcgagtacgattgtaaagacatgtcagacgaggtcggatgcgtgaacgtcacgttgtgcgagggtccgaacaagtttaagtgccattcgggcgaatgtattacgctcgataaagtctgcaacatggcgcgagattgtagggattggtcagacgaacccatcaaggagtgcggcactaacgagtgtttggacaataacggcgggtgttcgcacgtctgcaatgatctcaaaattggggcagagtgtctctgtcctgacggattccagctggtcgcgcagcgcagatgcgaggacatcgacgagtgccaggaccccgacacatgttcgcagttgtgtgtcaaccttgaaggagggtacaagtgccagtgcgaggagggatttcagcttgacccgcacacgaaagcatgtaaagcggtggggtccattgcgtatttgtttttcacaaacagacatgaagtgcggaagatgacccttgatcgcagcgaatatacgtcactgatccctaatcttaggaatgtcgtggcccttgacacggaggtagcatcaaatagaatctactggtccgacctctcacagagaatgatctgttcaacacagttggatcgggcgcacggggtgtcgtcgtacgatacggtaattagccgcgacatccaggcgccagacggactcgcggtcgactggatccatagcaacatctactggacagactccgtgttgggaaccgtatccgtagctgacacaaagggagtgaagcggaaaactctttttagagagaacggcagcaaaccgagagcaatcgtggtcgatccggtgcatggattcatgtattggaccgattggggaacgccagccaaaatcaagaaaggcggtttgaatggggtcgacatctactcgctggtgactgagaatattcagtggccaaacgggatcaccttggacttgttgtcggggaggttgtattgggtggactcaaagctccactcgatcagctcgatcgacgtgaacggcggaaataggaaaactattctcgaagatgagaaaagactggcccaccccttctcgctcgcggtgttcgaggacaaagtattttggacagacatcatcaacgaagcgatcttttcagccaaccgcctgacagggtcggatgtcaatctcttggccgaaaaccttctgagcccggaagatatggtcttgtttcacaatttgacccaacccagaggtgtgaattggtgcgaacggacgacattgtcgaacggaggttgccagtatctctgtctccctgcaccccagattaatccccattcacccaagttcacgtgtgcgtgcccagacggaatgcttcttgcgagggacatgagatcctgtctcaccgaagcggaagcggcagtggccacacaagagacttcgactgtccgccttaaagtgtcctcgacggcggtccgaactcagcatacgaccacacgacccgtgcccgatacctcgcggttgcccggagcaacaccggggttgacgacagtagaaatcgtaaccatgagccaccaggcacttggagatgtcgcaggcagaggcaatgagaagaaacccagctcggtcagagccctcagcatcgtgctgcctattgtgctgcttgtgtttctctgtttgggtgtgttcttgttgtggaagaactggcgccttaagaatatcaactcgattaacttcgataatccggtataccagaaaaccacagaggatgaagtgcatatttgtcacaaccaagatggctattcgtacccgtccaggcaaatggtatcacttgaggacgacgtggcctgataataggctgccttctgcggggcttgccttctggccatgcccttcttctctcccttgcacctgtacctcttggtctttgaataaagcctgagtaggaag

SEQ ID NO: 11550 - DNA, 2729 bp, Artificial Sequence
  derived and/or modified sequence
gggaaataagagagaaaagaagagtaagaagaaatataagagccaccatgggtccgtggggctggaagcttagatggacagtcgcgctcctccttgcagcagcaggaactgcggtcggagatcgatgcgagcgcaacgagttccaatgccaagatgggaagtgtatttcgtacaagtgggtctgcgatggatcagcggaatgtcaggacggaagcgatgagagccaagaaacatgcctctcagtgacatgcaagtcgggagacttctcgtgcggaggacgcgtaaacagatgtattccacagttttggcgctgcgatggtcaggtggactgcgacaacggttcagatgaacagggatgtcctccgaaaacgtgctcacaagacgagtttcgctgccatgatggaaagtgcatttcgcggcagttcgtatgtgattcggatcgggactgtctggacggctcggacgaagcgtcatgcccggtacttacttgcgggccagcctcattccaatgcaacagctcaacgtgcattccccagctgtgggcctgtgacaatgatcctgattgtgaggacggtagcgacgagtggccgcagagatgtaggggtttgtacgtattccaaggagactcaagcccctgttccgcctttgagtttcactgcctgtcgggtgaatgcatccactccagctggcgatgtgatggtgggcccgactgcaaagataagagcgacgaggagaattgcgcggtcgcgacgtgcagacccgatgagttccagtgctccgatggaaactgcatccacgggagccggcagtgtgatcgcgagtacgattgtaaagacatgtcagacgaggtcggatgcgtgaacgtcacgttgtgcgagggtccgaacaagtttaagtgccattcgggcgaatgtattacgctcgataaagtctgcaacatggcgcgagattgtagggattggtcagacgaacccatcaaggagtgcggcactgcagcatgtttggacaataacggcgggtgttcgcacgtctgcaatgcactcaaaattggggcagagtgtctctgtcctgacggattccagctggtcgcgcagcgcagatgcgaggacatcgacgagtgccaggaccccgacacatgttcgcagttgtgtgtcaaccttgaaggagggtacaagtgccagtgcgaggagggatttcagcttgacccgcacacgaaagcatgtaaagcggtggggtccattgcgtatttgtttttcacaaacagacatgaagtgcggaagatgacccttgatcgcagcgaatatacgtcactgatccctaatcttaggaatgtcgtggcccttgacacggaggtagcatcaaatagaatctactggtccgacctctcacagagaatgatctgttcaacacagttggatcgggcgcacggggtgtcgtcgtacgatacggtaattagccgcgacatccaggcgccagacggactcgcggtcgactggatccatagcaacatctactggacagactccgtgttgggaaccgtatccgtagctgacacaaagggagtgaagcggaaaactctttttagagagaacggcagcaaaccgagagcaatcgtggtcgatccggtgcatggattcatgtattggaccgattggggaacgccagccaaaatcaagaaaggcggtttgaatggggtcgacatctactcgctggtgactgagaatattcagtggccaaacgggatcaccttggacttgttgtcggggaggttgtattgggtggactcaaagctccactcgatcagctcgatcgacgtgaacggcggaaataggaaaactattctcgaagatgagaaaagactggcccaccccttctcgctcgcggtgttcgaggacaaagtattttggacagacatcatcaacgaagcgatcttttcagccaaccgcctgacagggtcggatgtcaatctcttggccgaaaaccttctgagcccggaagatatggtcttgtttcacaatttgacccaacccagaggtgtgaattggtgcgaacggacgacattgtcgaacggaggttgccagtatctctgtctccctgcaccccagattaatccccattcacccaagttcacgtgtgcgtgcccagacggaatgcttcttgcgagggacatgagatcctgtctcaccgaagcggaagcggcagtggccacacaagagacttcgactgtccgccttaaagtgtcctcgacggcggtccgaactcagcatacgaccacacgacccgtgcccgatacctcgcggttgcccggagcaacaccggggttgacgacagtagaaatcgtaaccatgagccaccaggcacttggagatgtcgcaggcagaggcaatgagaagaaacccagctcggtcagagccctcagcatcgtgctgcctattgtgctgcttgtgtttctctgtttgggtgtgttcttgttgtggaagaactggcgccttaagaatatcaactcgattaacttcgataatccggtataccagaaaaccacagaggatgaagtgcatatttgtcacaaccaagatggctattcgtacccgtccaggcaaatggtatcacttgaggacgacgtggcctgataataggctgccttctgcggggcttgccttctggccatgcccttcttctctcccttgcacctgtacctcttggtctttgaataaagcctgagtaggaag

SEQ ID NO: 11551 - DNA, 2758 bp, Artificial Sequence
  derived and/or modified sequence
gggaaataagagagaaaagaagagtaagaagaaatataagagccaccatgagcaccgcggatctgatgcgtcgctgggtcatcgccctgctcctggctgctgccggagttgcagcagaagactcatgcagcaggaacgagttccagtgtagagacggaaaatgcatcgctagcaagtgggtgtgcgatggcagccccgagtgcccggatggctccgatgagtccccagagacatgcatgtctgtcacctgtcagtccaatcaattcagctgtggaggccgtgtcagccgatgcattcctgactcctggagatgtgatggacaggtagactgtgaaaatgactcagacgaacaaggctgtccccccaagacgtgctcccaggatgacttccgatgccaggatggcaagtgcatctccccgcagtttgtgtgtgatggagaccgagattgcctagatggctctgatgaggcccactgccaggccaccacttgtggccccgcccacttccgctgcaactcatccatatgcatccccagtctttgggcctgcgacggggatgtcgactgtgttgacggctccgatgagtggccacagaactgccagggccgagacacggcctccaaaggcgttagcagcccctgctcctccctggagttccactgtggtagcagtgagtgtatccatcgcagctgggtctgtgacggcgaggcagactgcaaggacaagtcagatgaggagcactgcgcggtggccacctgccgacctgatgaattccagtgtgcagatggctcctgcattcacggtagccgccagtgtgaccgtgaacatgactgcaaggacatgagcgacgagctcggctgcgtcaatgtgacacagtgtgatggccccaacaagttcaagtgtcacagtggggagtgcatcagcttggacaaggtgtgcgactccgcccgcgactgccaggactggtcggatgagcccatcaaggagtgcaagaccgcagagtgtttggacaacaatggtggctgttcccacatctgcaaggacctcaagattggctctgagtgcctgtgtcccagcggcttccggttggtggacctccacaggtgtgaagatattgacgagtgtcaggagccagacacctgcagccagctctgtgtgaacctggaaggcagctacaagtgtgagtgccaggccggcttccacatggacccacacaccagggtctgcaaggctgtgggctccataggctatctgctcttcaccaaccgccacgaggtccggaagatgaccctggaccgcagcgagtacaccagtctgctccccaacctgaagaatgtggtggctctcgacacggaggtgaccaacaatagaatctactggtccgacctgtcccaaaaaaagatctacagcgccctgatggaccaggcccctaacttgtcctacgacaccatcatcagtgaggacctgcatgcccctgacgggctggcggtagactggatccaccgcaacatctactggacagattcagtcccaggcagcgtatctgtggctgacaccaagggcgtaaagaggaggacactgttccaagaggcagggtccagacccagagccatcgtagtggaccctgtgcatggcttcatgtactggacagattggggaacacccgccaagatcaagaaagggggtttgaatggtgtggacatccactcactggtgaccgaaaacatccagtggccaaatggcatcacactagatctttccagtggccgtctctattgggttgattccaaactccactctatctccagcatcgatgtcaatgggggcaatcggaaaaccattttggaggatgagaaccggctggcccaccccttctccttggccatctatgaggacaaagtgtattggacagatgtcataaacgaagccattttcagtgccaatcgactcacgggttcagatgtgaatttggtggctgaaaacctcttgtccccggaggacattgtcctgttccacaaggtcacacagcctagaggggtgaactggtgtgagacaacagccctcctccccaatggtggttgccagtacctgtgcctgcccgccccacagatcggtccccactcgcccaaattcacctgcgcctgccctgatggcatgctgctggccaaggacatgcggagctgcctcacagaagtcgacactgtactgaccacccaggggacatccgccgtccggcctgtggtcaccgcatcagctaccaggccaccgaagcacagtgaggatctctcagctcccagtactcctaggcagcctgtggacaccccagggctcagcacagtggcgtcagtgacagtgtcccaccaagtccagggtgacatggctggcagagggaatgaggagcagccacatggtatgaggttcctgtccatcttcttccctattgcactggttgccctccttgtccttggggccgtcctgctgtggaggaactggcggctgaagaacatcaacagcataaactttgacaacccagtctaccagcgtaccacagaggacgagctccacattgcacgaagccaggatggctatacctacccctcaagacagatggtcagcctggaggacgatgtggcatgataataggctggagcctcggtggccatgcttcttgccccttgggcctccccccagcccctcctccccttcctgcacccgtacccccgtggtctttgaataaagtctgagtgggcggctctaga

SEQ ID NO: 11552 - DNA, 2758 bp, Artificial Sequence
  derived and/or modified sequence
gggaaataagagagaaaagaagagtaagaagaaatataagagccaccatgagcaccgcggatctgatgcgtcgctgggtcatcgccctgctcctggctgctgccggagttgcagcagaagactcatgcagcaggaacgagttccagtgtagagacggaaaatgcatcgctagcaagtgggtgtgcgatggcagccccgagtgcccggatggctccgatgagtccccagagacatgcatgtctgtcacctgtcagtccaatcaattcagctgtggaggccgtgtcagccgatgcattcctgactcctggagatgtgatggacaggtagactgtgaaaatgactcagacgaacaaggctgtccccccaagacgtgctcccaggatgacttccgatgccaggatggcaagtgcatctccccgcagtttgtgtgtgatggagaccgagattgcctagatggctctgatgaggcccactgccaggccaccacttgtggccccgcccacttccgctgcaactcatccatatgcatccccagtctttgggcctgcgacggggatgtcgactgtgttgacggctccgatgagtggccacagaactgccagggccgagacacggcctccaaaggcgttagcagcccctgctcctccctggagttccactgtggtagcagtgagtgtatccatcgcagctgggtctgtgacggcgaggcagactgcaaggacaagtcagatgaggagcactgcgcggtggccacctgccgacctgatgaattccagtgtgcagatggctcctgcattcacggtagccgccagtgtgaccgtgaacatgactgcaaggacatgagcgacgagctcggctgcgtcaatgtgacacagtgtgatggccccaacaagttcaagtgtcacagtggggagtgcatcagcttggacaaggtgtgcgactccgcccgcgactgccaggactggtcggatgagcccatcaaggagtgcaagaccaacgagtgtttggacaacaatggtggctgttcccacatctgcaaggacctcaagattggctctgagtgcgattgtcccagcggcttccggttggtggacctccacaggtgtgaagatattgacgagtgtcaggagccagacacctgcagccagctctgtgtgaacctggaaggcagctacaagtgtgagtgccaggccggcttccacatggacccacacaccagggtctgcaaggctgtgggctccataggctatctgctcttcaccaaccgccacgaggtccggaagatgaccctggaccgcagcgagtacaccagtctgctccccaacctgaagaatgtggtggctctcgacacggaggtgaccaacaatagaatctactggtccgacctgtcccaaaaaaagatctacagcgccctgatggaccaggcccctaacttgtcctacgacaccatcatcagtgaggacctgcatgcccctgacgggctggcggtagactggatccaccgcaacatctactggacagattcagtcccaggcagcgtatctgtggctgacaccaagggcgtaaagaggaggacactgttccaagaggcagggtccagacccagagccatcgtagtggaccctgtgcatggcttcatgtactggacagattggggaacacccgccaagatcaagaaagggggtttgaatggtgtggacatccactcactggtgaccgaaaacatccagtggccaaatggcatcacactagatctttccagtggccgtctctattgggttgattccaaactccactctatctccagcatcgatgtcaatgggggcaatcggaaaaccattttggaggatgagaaccggctggcccaccccttctccttggccatctatgaggacaaagtgtattggacagatgtcataaacgaagccattttcagtgccaatcgactcacgggttcagatgtgaatttggtggctgaaaacctcttgtccccggaggacattgtcctgttccacaaggtcacacagcctagaggggtgaactggtgtgagacaacagccctcctccccaatggtggttgccagtacctgtgcctgcccgccccacagatcggtccccactcgcccaaattcacctgcgcctgccctgatggcatgctgctggccaaggacatgcggagctgcctcacagaagtcgacactgtactgaccacccaggggacatccgccgtccggcctgtggtcaccgcatcagctaccaggccaccgaagcacagtgaggatctctcagctcccagtactcctaggcagcctgtggacaccccagggctcagcacagtggcgtcagtgacagtgtcccaccaagtccagggtgacatggctggcagagggaatgaggagcagccacatggtatgaggttcctgtccatcttcttccctattgcactggttgccctccttgtccttggggccgtcctgctgtggaggaactggcggctgaagaacatcaacagcataaactttgacaacccagtctaccagcgtaccacagaggacgagctccacattgcacgaagccaggatggctatacctacccctcaagacagatggtcagcctggaggacgatgtggcatgataataggctggagcctcggtggccatgcttcttgccccttgggcctccccccagcccctcctccccttcctgcacccgtacccccgtggtctttgaataaagtctgagtgggcggctctaga

SEQ ID NO: 11553 - DNA, 2758 bp, Artificial Sequence
  derived and/or modified sequence
gggaaataagagagaaaagaagagtaagaagaaatataagagccaccatgagcaccgcggatctgatgcgtcgctgggtcatcgccctgctcctggctgctgccggagttgcagcagaagactcatgcagcaggaacgagttccagtgtagagacggaaaatgcatcgctagcaagtgggtgtgcgatggcagccccgagtgcccggatggctccgatgagtccccagagacatgcatgtctgtcacctgtcagtccaatcaattcagctgtggaggccgtgtcagccgatgcattcctgactcctggagatgtgatggacaggtagactgtgaaaatgactcagacgaacaaggctgtccccccaagacgtgctcccaggatgacttccgatgccaggatggcaagtgcatctccccgcagtttgtgtgtgatggagaccgagattgcctagatggctctgatgaggcccactgccaggccaccacttgtggccccgcccacttccgctgcaactcatccatatgcatccccagtctttgggcctgcgacggggatgtcgactgtgttgacggctccgatgagtggccacagaactgccagggccgagacacggcctccaaaggcgttagcagcccctgctcctccctggagttccactgtggtagcagtgagtgtatccatcgcagctgggtctgtgacggcgaggcagactgcaaggacaagtcagatgaggagcactgcgcggtggccacctgccgacctgatgaattccagtgtgcagatggctcctgcattcacggtagccgccagtgtgaccgtgaacatgactgcaaggacatgagcgacgagctcggctgcgtcaatgtgacacagtgtgatggccccaacaagttcaagtgtcacagtggggagtgcatcagcttggacaaggtgtgcgactccgcccgcgactgccaggactggtcggatgagcccatcaaggagtgcaagaccaacgagtgtttggacaacaatggtggctgttcccacatctgcaaggacctcaagattggctctgagtgcctgtgtcccagcggcttccggttggtggacctccacaggtgtgaagatattgacgagtgtcaggagccagacacctgcagccagctctgtgtgaacctggaaggcagctacaagtgtgagtgccaggccggcttccacatggacccacacaccagggtctgcaaggctgtgggctccataggctatctgctcttcaccaaccgccacgaggtccggaagatgaccctggaccgcagcgagtacaccagtctgctccccaacctgaagaatgtggtggctctcgacacggaggtgaccaacaatagaatctactggtccgacctgtcccaaaaaaagatctacagcgccctgatggaccaggcccctaacttgtcctacgacaccatcatcagtgaggacctgcatgcccctgacgggctggcggtagactggatccaccgcaacatctactggacagattcagtcccaggcagcgtatctgtggctgacaccaagggcgtaaagaggaggacactgttccaagaggcagggtccagacccagagccatcgtagtggaccctgtgcatggcttcatgtactggacagattggggaacacccgccaagatcaagaaagggggtttgaatggtgtggacatccactcactggtgaccgaaaacatccagtggccaaatggcatcacactagatctttccagtggccgtctctattgggttgattccaaactccactctatctccagcatcgatgtcaatgggggcaatcggaaaaccattttggaggatgagaaccggctggcccaccccttctccttggccatctatgaggacaaagtgtattggacagatgtcataaacgaagccattttcagtgccaatcgactcacgggttcagatgtgaatttggtggctgaaaacctcttgtccccggaggacattgtcctgttccacaaggtcacacagcctagaggggtgaactggtgtgagacaacagccctcctccccaatggtggttgccagtacctgtgcctgcccgccccacagatcggtccccactcgcccaaattcacctgcgcctgccctgatggcatgctgctggccaaggacatgcggagctgcctcacagaagtcgacactgtactgaccacccaggggacatccgccgtccggcctgtggtcaccgcatcagctaccaggccaccgaagcacagtgaggatctctcagctcccagtactcctaggcagcctgtggacaccccagggctcagcacagtggcgtcagtgacagtgtcccaccaagtccagggtgacatggctggcagagggaatgaggagcagccacatggtatgaggttcctgtccatcttcttccctattgcactggttgccctccttgtccttggggccgtcctgctgtggaggaactggcggctgaagaacatcaacagcataaactttgacaacccagtctaccagcgtaccacagaggacgagctccacattgcacgaagccaggatggctatacctacccctcaagacagatggtcagcctggaggacgatgtggcatgataataggctggagcctcggtggccatgcttcttgccccttgggcctccccccagcccctcctccccttcctgcacccgtacccccgtggtctttgaataaagtctgagtgggcggctctaga

SEQ ID NO: 11554 - DNA, 2752 bp, Artificial Sequence
  derived and/or modified sequence
gggaaataagagagaaaagaagagtaagaagaaatataagagccaccatgggtccgtggggctggaagcttagatggacagtcgcgctcctccttgcagcagcaggaactgcggtcggagatcgatgcgagcgcaacgagttccaatgccaagatgggaagtgtatttcgtacaagtgggtctgcgatggatcagcggaatgtcaggacggaagcgatgagagccaagaaacatgcctctcagtgacatgcaagtcgggagacttctcgtgcggaggacgcgtaaacagatgtattccacagttttggcgctgcgatggtcaggtggactgcgacaacggttcagatgaacagggatgtcctccgaaaacgtgctcacaagacgagtttcgctgccatgatggaaagtgcatttcgcggcagttcgtatgtgattcggatcgggactgtctggacggctcggacgaagcgtcatgcccggtacttacttgcgggccagcctcattccaatgcaacagctcaacgtgcattccccagctgtgggcctgtgacaatgatcctgattgtgaggacggtagcgacgagtggccgcagagatgtaggggtttgtacgtattccaaggagactcaagcccctgttccgcctttgagtttcactgcctgtcgggtgaatgcatccactccagctggcgatgtgatggtgggcccgactgcaaagataagagcgacgaggagaattgcgcggtcgcgacgtgcagacccgatgagttccagtgctccgatggaaactgcatccacgggagccggcagtgtgatcgcgagtacgattgtaaagacatgtcagacgaggtcggatgcgtgaacgtcacgttgtgcgagggtccgaacaagtttaagtgccattcgggcgaatgtattacgctcgataaagtctgcaacatggcgcgagattgtagggattggtcagacgaacccatcaaggagtgcggcactgctgagtgtttggacaataacggcgggtgttcgcacgtctgcaatgatctcaaaattgggtatgagtgtctgtgtcctgacggattccagctggtcgcgcagcgcagatgcgaggacatcgacgagtgccaggaccccgacacatgttcgcagttgtgtgtcaaccttgaaggagggtacaagtgccagtgcgaggagggatttcagcttgacccgcacacgaaagcatgtaaagcggtggggtccattgcgtatttgtttttcacaaacagacatgaagtgcggaagatgacccttgatcgcagcgaatatacgtcactgatccctaatcttaggaatgtcgtggcccttgacacggaggtagcatcaaatagaatctactggtccgacctctcacagagaatgatctgttcaacacagttggatcgggcgcacggggtgtcgtcgtacgatacggtaattagccgcgacatccaggcgccagacggactcgcggtcgactggatccatagcaacatctactggacagactccgtgttgggaaccgtatccgtagctgacacaaagggagtgaagcggaaaactctttttagagagaacggcagcaaaccgagagcaatcgtggtcgatccggtgcatggattcatgtattggaccgattggggaacgccagccaaaatcaagaaaggcggtttgaatggggtcgacatctactcgctggtgactgagaatattcagtggccaaacgggatcaccttggacttgttgtcggggaggttgtattgggtggactcaaagctccactcgatcagctcgatcgacgtgaacggcggaaataggaaaactattctcgaagatgagaaaagactggcccaccccttctcgctcgcggtgttcgaggacaaagtattttggacagacatcatcaacgaagcgatcttttcagccaaccgcctgacagggtcggatgtcaatctcttggccgaaaaccttctgagcccggaagatatggtcttgtttcacaatttgacccaacccagaggtgtgaattggtgcgaacggacgacattgtcgaacggaggttgccagtatctctgtctccctgcaccccagattaatccccattcacccaagttcacgtgtgcgtgcccagacggaatgcttcttgcgagggacatgagatcctgtctcaccgaagcggaagcggcagtggccacacaagagacttcgactgtccgccttaaagtgtcctcgacggcggtccgaactcagcatacgaccacacgacccgtgcccgatacctcgcggttgcccggagcaacaccggggttgacgacagtagaaatcgtaaccatgagccaccaggcacttggagatgtcgcaggcagaggcaatgagaagaaacccagctcggtcagagccctcagcatcgtgctgcctattgtgctgcttgtgtttctctgtttgggtgtgttcttgttgtggaagaactggcgccttaagaatatcaactcgattaacttcgataatccggtataccagcgcaccacagaggatgaagtgcatattgcccacaaccaagatggctattcgtacccgtccaggcaaatggtatcacttgaggacgacgtggcctgataataggctggagcctcggtggccatgcttcttgccccttgggcctccccccagcccctcctccccttcctgcacccgtacccccgtggtctttgaataaagtctgagtgggcggctctaga

SEQ ID NO: 11555 - DNA, 2752 bp, Artificial Sequence
  derived and/or modified sequence
gggaaataagagagaaaagaagagtaagaagaaatataagagccaccatgggtccgtggggctggaagcttagatggacagtcgcgctcctccttgcagcagcaggaactgcggtcggagatcgatgcgagcgcaacgagttccaatgccaagatgggaagtgtatttcgtacaagtgggtctgcgatggatcagcggaatgtcaggacggaagcgatgagagccaagaaacatgcctctcagtgacatgcaagtcgggagacttctcgtgcggaggacgcgtaaacagatgtattccacagttttggcgctgcgatggtcaggtggactgcgacaacggttcagatgaacagggatgtcctccgaaaacgtgctcacaagacgagtttcgctgccatgatggaaagtgcatttcgcggcagttcgtatgtgattcggatcgggactgtctggacggctcggacgaagcgtcatgcccggtacttacttgcgggccagcctcattccaatgcaacagctcaacgtgcattccccagctgtgggcctgtgacaatgatcctgattgtgaggacggtagcgacgagtggccgcagagatgtaggggtttgtacgtattccaaggagactcaagcccctgttccgcctttgagtttcactgcctgtcgggtgaatgcatccactccagctggcgatgtgatggtgggcccgactgcaaagataagagcgacgaggagaattgcgcggtcgcgacgtgcagacccgatgagttccagtgctccgatggaaactgcatccacgggagccggcagtgtgatcgcgagtacgattgtaaagacatgtcagacgaggtcggatgcgtgaacgtcacgttgtgcgagggtccgaacaagtttaagtgccattcgggcgaatgtattacgctcgataaagtctgcaacatggcgcgagattgtagggattggtcagacgaacccatcaaggagtgcggcactaacgagtgtttggacaataacggcgggtgttcgcacgtctgcaatgatctcaaaattgggtatgagtgtgattgtcctgacggattccagctggtcgcgcagcgcagatgcgaggacatcgacgagtgccaggaccccgacacatgttcgcagttgtgtgtcaaccttgaaggagggtacaagtgccagtgcgaggagggatttcagcttgacccgcacacgaaagcatgtaaagcggtggggtccattgcgtatttgtttttcacaaacagacatgaagtgcggaagatgacccttgatcgcagcgaatatacgtcactgatccctaatcttaggaatgtcgtggcccttgacacggaggtagcatcaaatagaatctactggtccgacctctcacagagaatgatctgttcaacacagttggatcgggcgcacggggtgtcgtcgtacgatacggtaattagccgcgacatccaggcgccagacggactcgcggtcgactggatccatagcaacatctactggacagactccgtgttgggaaccgtatccgtagctgacacaaagggagtgaagcggaaaactctttttagagagaacggcagcaaaccgagagcaatcgtggtcgatccggtgcatggattcatgtattggaccgattggggaacgccagccaaaatcaagaaaggcggtttgaatggggtcgacatctactcgctggtgactgagaatattcagtggccaaacgggatcaccttggacttgttgtcggggaggttgtattgggtggactcaaagctccactcgatcagctcgatcgacgtgaacggcggaaataggaaaactattctcgaagatgagaaaagactggcccaccccttctcgctcgcggtgttcgaggacaaagtattttggacagacatcatcaacgaagcgatcttttcagccaaccgcctgacagggtcggatgtcaatctcttggccgaaaaccttctgagcccggaagatatggtcttgtttcacaatttgacccaacccagaggtgtgaattggtgcgaacggacgacattgtcgaacggaggttgccagtatctctgtctccctgcaccccagattaatccccattcacccaagttcacgtgtgcgtgcccagacggaatgcttcttgcgagggacatgagatcctgtctcaccgaagcggaagcggcagtggccacacaagagacttcgactgtccgccttaaagtgtcctcgacggcggtccgaactcagcatacgaccacacgacccgtgcccgatacctcgcggttgcccggagcaacaccggggttgacgacagtagaaatcgtaaccatgagccaccaggcacttggagatgtcgcaggcagaggcaatgagaagaaacccagctcggtcagagccctcagcatcgtgctgcctattgtgctgcttgtgtttctctgtttgggtgtgttcttgttgtggaagaactggcgccttaagaatatcaactcgattaacttcgataatccggtataccagcgcaccacagaggatgaagtgcatattgcccacaaccaagatggctattcgtacccgtccaggcaaatggtatcacttgaggacgacgtggcctgataataggctggagcctcggtggccatgcttcttgccccttgggcctccccccagcccctcctccccttcctgcacccgtacccccgtggtctttgaataaagtctgagtgggcggctctaga

SEQ ID NO: 11556 - DNA, 2752 bp, Artificial Sequence
  derived and/or modified sequence
gggaaataagagagaaaagaagagtaagaagaaatataagagccaccatgggtccgtggggctggaagcttagatggacagtcgcgctcctccttgcagcagcaggaactgcggtcggagatcgatgcgagcgcaacgagttccaatgccaagatgggaagtgtatttcgtacaagtgggtctgcgatggatcagcggaatgtcaggacggaagcgatgagagccaagaaacatgcctctcagtgacatgcaagtcgggagacttctcgtgcggaggacgcgtaaacagatgtattccacagttttggcgctgcgatggtcaggtggactgcgacaacggttcagatgaacagggatgtcctccgaaaacgtgctcacaagacgagtttcgctgccatgatggaaagtgcatttcgcggcagttcgtatgtgattcggatcgggactgtctggacggctcggacgaagcgtcatgcccggtacttacttgcgggccagcctcattccaatgcaacagctcaacgtgcattccccagctgtgggcctgtgacaatgatcctgattgtgaggacggtagcgacgagtggccgcagagatgtaggggtttgtacgtattccaaggagactcaagcccctgttccgcctttgagtttcactgcctgtcgggtgaatgcatccactccagctggcgatgtgatggtgggcccgactgcaaagataagagcgacgaggagaattgcgcggtcgcgacgtgcagacccgatgagttccagtgctccgatggaaactgcatccacgggagccggcagtgtgatcgcgagtacgattgtaaagacatgtcagacgaggtcggatgcgtgaacgtcacgttgtgcgagggtccgaacaagtttaagtgccattcgggcgaatgtattacgctcgataaagtctgcaacatggcgcgagattgtagggattggtcagacgaacccatcaaggagtgcggcactaacgagtgtttggacaataacggcgggtgttcgcacgtctgcaatgatctcaaaattgggtatgagtgtctgtgtcctgacggattccagctggtcgcgcagcgcagatgcgaggacatcgacgagtgccaggaccccgacacatgttcgcagttgtgtgtcaaccttgaaggagggtacaagtgccagtgcgaggagggatttcagcttgacccgcacacgaaagcatgtaaagcggtggggtccattgcgtatttgtttttcacaaacagacatgaagtgcggaagatgacccttgatcgcagcgaatatacgtcactgatccctaatcttaggaatgtcgtggcccttgacacggaggtagcatcaaatagaatctactggtccgacctctcacagagaatgatctgttcaacacagttggatcgggcgcacggggtgtcgtcgtacgatacggtaattagccgcgacatccaggcgccagacggactcgcggtcgactggatccatagcaacatctactggacagactccgtgttgggaaccgtatccgtagctgacacaaagggagtgaagcggaaaactctttttagagagaacggcagcaaaccgagagcaatcgtggtcgatccggtgcatggattcatgtattggaccgattggggaacgccagccaaaatcaagaaaggcggtttgaatggggtcgacatctactcgctggtgactgagaatattcagtggccaaacgggatcaccttggacttgttgtcggggaggttgtattgggtggactcaaagctccactcgatcagctcgatcgacgtgaacggcggaaataggaaaactattctcgaagatgagaaaagactggcccaccccttctcgctcgcggtgttcgaggacaaagtattttggacagacatcatcaacgaagcgatcttttcagccaaccgcctgacagggtcggatgtcaatctcttggccgaaaaccttctgagcccggaagatatggtcttgtttcacaatttgacccaacccagaggtgtgaattggtgcgaacggacgacattgtcgaacggaggttgccagtatctctgtctccctgcaccccagattaatccccattcacccaagttcacgtgtgcgtgcccagacggaatgcttcttgcgagggacatgagatcctgtctcaccgaagcggaagcggcagtggccacacaagagacttcgactgtccgccttaaagtgtcctcgacggcggtccgaactcagcatacgaccacacgacccgtgcccgatacctcgcggttgcccggagcaacaccggggttgacgacagtagaaatcgtaaccatgagccaccaggcacttggagatgtcgcaggcagaggcaatgagaagaaacccagctcggtcagagccctcagcatcgtgctgcctattgtgctgcttgtgtttctctgtttgggtgtgttcttgttgtggaagaactggcgccttaagaatatcaactcgattaacttcgataatccggtataccagcggaccacagaggatgaagtgcatattgcacacaaccaagatggctattcgtacccgtccaggcaaatggtatcacttgaggacgacgtggcctgataataggctggagcctcggtggccatgcttcttgccccttgggcctccccccagcccctcctccccttcctgcacccgtacccccgtggtctttgaataaagtctgagtgggcggctctaga

SEQ ID NO: 11557 - DNA, 2752 bp, Artificial Sequence
  derived and/or modified sequence
gggaaataagagagaaaagaagagtaagaagaaatataagagccaccatgagcaccgcggatctgatgcgtcgctgggtcatcgccctgctcctggctgctgccggagttgcagcagaagactcatgcagcaggaacgagttccagtgtagagacggaaaatgcatcgctagcaagtgggtgtgcgatggcagccccgagtgcccggatggctccgatgagtccccagagacatgcatgtctgtcacctgtcagtccaatcaattcagctgtggaggccgtgtcagccgatgcattcctgactcctggagatgtgatggacaggtagactgtgaaaatgactcagacgaacaaggctgtccccccaagacgtgctcccaggatgacttccgatgccaggatggcaagtgcatctccccgcagtttgtgtgtgatggagaccgagattgcctagatggctctgatgaggcccactgccaggccaccacttgtggccccgcccacttccgctgcaactcatccatatgcatccccagtctttgggcctgcgacggggatgtcgactgtgttgacggctccgatgagtggccacagaactgccagggccgagacacggcctccaaaggcgttagcagcccctgctcctccctggagttccactgtggtagcagtgagtgtatccatcgcagctgggtctgtgacggcgaggcagactgcaaggacaagtcagatgaggagcactgcgcggtggccacctgccgacctgatgaattccagtgtgcagatggctcctgcattcacggtagccgccagtgtgaccgtgaacatgactgcaaggacatgagcgacgagctcggctgcgtcaatgtgacacagtgtgatggccccaacaagttcaagtgtcacagtggggagtgcatcagcttggacaaggtgtgcgactccgcccgcgactgccaggactggtcggatgagcccatcaaggagtgcaagaccaacgagtgtttggacaacaatggtggctgttcccacatctgcaaggacctcaagattggctctgagtgcctgtgtcccagcggcttccggttggtggacctccacaggtgtgaagatattgacgagtgtcaggagccagacacctgcagccagctctgtgtgaacctggaaggcagctacaagtgtgagtgccaggccggcttccacatggacccacacaccagggtctgcaaggctgtgggctccataggctatctgctcttcaccaaccgccacgaggtccggaagatgaccctggaccgcagcgagtacaccagtctgctccccaacctgaagaatgtggtggctctcgacacggaggtgaccaacaatagaatctactggtccgacctgtcccaaaaaaagatctacagcgccctgatggaccaggcccctaacttgtcctacgacaccatcatcagtgaggacctgcatgcccctgacgggctggcggtagactggatccaccgcaacatctactggacagattcagtcccaggcagcgtatctgtggctgacaccaagggcgtaaagaggaggacactgttccaagaggcagggtccagacccagagccatcgtagtggaccctgtgcatggcttcatgtactggacagattggggaacacccgccaagatcaagaaagggggtttgaatggtgtggacatccactcactggtgaccgaaaacatccagtggccaaatggcatcacactagatctttccagtggccgtctctattgggttgattccaaactccactctatctccagcatcgatgtcaatgggggcaatcggaaaaccattttggaggatgagaaccggctggcccaccccttctccttggccatctatgaggacaaagtgtattggacagatgtcataaacgaagccattttcagtgccaatcgactcacgggttcagatgtgaatttggtggctgaaaacctcttgtccccggaggacattgtcctgttccacaaggtcacacagcctagaggggtgaactggtgtgagacaacagccctcctccccaatggtggttgccagtacctgtgcctgcccgccccacagatcggtccccactcgcccaaattcacctgcgcctgccctgatggcatgctgctggccaaggacatgcggagctgcctcacagaagtcgacactgtactgaccacccaggggacatccgccgtccggcctgtggtcaccgcatcagctaccaggccaccgaagcacagtgaggatctctcagctcccagtactcctaggcagcctgtggacaccccagggctcagcacagtggcgtcagtgacagtgtcccaccaagtccagggtgacatggctggcagagggaatgaggagcagccacatggtatgaggttcctgtccatcttcttccctattgcactggttgccctccttgtccttggggccgtcctgctgtggaggaactggcggctgaagaacatcaacagcataaactttgacaacccagtctaccagaagaccacagaggacgagctccacatttgccgaagccaggatggctatacctacccctcaagacagatggtcagcctggaggacgatgtggcatgataataggctggagcctcggtggccatgcttcttgccccttgggcctccccccagcccctcctccccttcctgcacccgtacccccgtggtctttgaataaagtctgagtgggcggc

SEQ ID NO: 11558 - DNA, 5292 bp, Artificial Sequence
  derived and/or modified sequence
ctcttgcagtgaggtgaagacatttgaaaatcaccccactgcaaactcctccccctgctagaaacctcacattgaaatgctgtaaatgacgtgggccccgagtgcaatcgcgggaagccagggtttccagctaggacacagcaggtcgtgatccgggtcgggacactgcctggcagaggctgcgagcatggggccctggggctggaaattgcgctggaccgtcgccttgctcctcgccgcggcggggactgcagtgggcgacagatgcgaaagaaacgagttccagtgccaagacgggaaatgcatctcctacaagtgggtctgcgatggcagcgctgagtgccaggatggctctgatgagtcccaggagacgtgcttgtctgtcacctgcaaatccggggacttcagctgtgggggccgtgtcaaccgctgcattcctcagttctggaggtgcgatggccaagtggactgcgacaacggctcagacgagcaaggctgtccccccaagacgtgctcccaggacgagtttcgctgccacgatgggaagtgcatctctcggcagttcgtctgtgactcagaccgggactgcttggacggctcagacgaggcctcctgcccggtgctcacctgtggtcccgccagcttccagtgcaacagctccacctgcatcccccagctgtgggcctgcgacaacgaccccgactgcgaagatggctcggatgagtggccgcagcgctgtaggggtctttacgtgttccaaggggacagtagcccctgctcggccttcgagttccactgcctaagtggcgagtgcatccactccagctggcgctgtgatggtggccccgactgcaaggacaaatctgacgaggaaaactgcgctgtggccacctgtcgccctgacgaattccagtgctctgatggaaactgcatccatggcagccggcagtgtgaccgggaatatgactgcaaggacatgagcgatgaagttggctgcgttaatgtgacactctgcgagggacccaacaagttcaagtgtcacagcggcgaatgcatcaccctggacaaagtctgcaacatggctagagactgccgggactggtcagatgaacccatcaaagagtgcgggaccaacgaatgcttggacaacaacggcggctgttcccacgtctgcaatgaccttaagatcggctacgagtgcctgtgccccgacggcttccagctggtggcccagcgaagatgcgaagatatcgatgagtgtcaggatcccgacacctgcagccagctctgcgtgaacctggagggtggctacaagtgccagtgtgaggaaggcttccagctggacccccacacgaaggcctgcaaggctgtgggctccatcgcctacctcttcttcaccaaccggcacgaggtcaggaagatgacgctggaccggagcgagtacaccagcctcatccccaacctgaggaacgtggtcgctctggacacggaggtggccagcaatagaatctactggtctgacctgtcccagagaatgatctgcagcacccagcttgacagagcccacggcgtctcttcctatgacaccgtcatcagcagagacatccaggcccccgacgggctggctgtggactggatccacagcaacatctactggaccgactctgtcctgggcactgtctctgttgcggataccaagggcgtgaagaggaaaacgttattcagggagaacggctccaagccaagggccatcgtggtggatcctgttcatggcttcatgtactggactgactggggaactcccgccaagatcaagaaagggggcctgaatggtgtggacatctactcgctggtgactgaaaacattcagtggcccaatggcatcaccctagatctcctcagtggccgcctctactgggttgactccaaacttcactccatctcaagcatcgatgtcaacgggggcaaccggaagaccatcttggaggatgaaaagaggctggcccaccccttctccttggccgtctttgaggacaaagtattttggacagatatcatcaacgaagccattttcagtgccaaccgcctcacaggttccgatgtcaacttgttggctgaaaacctactgtccccagaggatatggttctcttccacaacctcacccagccaagaggagtgaactggtgtgagaggaccaccctgagcaatggcggctgccagtatctgtgcctccctgccccgcagatcaacccccactcgcccaagtttacctgcgcctgcccggacggcatgctgctggccagggacatgaggagctgcctcacagaggctgaggctgcagtggccacccaggagacatccaccgtcaggctaaaggtcagctccacagccgtaaggacacagcacacaaccacccgacctgttcccgacacctcccggctgcctggggccacccctgggctcaccacggtggagatagtgacaatgtctcaccaagctctgggcgacgttgctggcagaggaaatgagaagaagcccagtagcgtgagggctctgtccattgtcctccccatcgtgctcctcgtcttcctttgcctgggggtcttccttctatggaagaactggcggcttaagaacatcaacagcatcaactttgacaaccccgtctatcagaagaccacagaggatgaggtccacatttgccacaaccaggacggctacagctacccctcgagacagatggtcagtctggaggatgacgtggcgtgaacatctgcctggagtcccgtccctgcccagaacccttcctgagacctcgccggccttgttttattcaaagacagagaagaccaaagcattgcctgccagagctttgttttatatatttattcatctgggaggcagaacaggcttcggacagtgcccatgcaatggcttgggttgggattttggtttcttcctttcctcgtgaaggataagagaaacaggcccggggggaccaggatgacacctccatttctctccaggaagttttgagtttctctccaccgtgacacaatcctcaaacatggaagatgaaaggggaggggatgtcaggcccagagaagcaagtggctttcaacacacaacagcagatggcaccaacgggaccccctggccctgcctcatccaccaatctctaagccaaacccctaaactcaggagtcaacgtgtttacctcttctatgcaagccttgctagacagccaggttagcctttgccctgtcacccccgaatcatgacccacccagtgtctttcgaggtgggtttgtaccttccttaagccaggaaagggattcatggcgtcggaaatgatctggctgaatccgtggtggcaccgagaccaaactcattcaccaaatgatgccacttcccagaggcagagcctgagtcactggtcacccttaatatttattaagtgcctgagacacccggttaccttggccgtgaggacacgtggcctgcacccaggtgtggctgtcaggacaccagcctggtgcccatcctcccgacccctacccacttccattcccgtggtctccttgcactttctcagttcagagttgtacactgtgtacatttggcatttgtgttattattttgcactgttttctgtcgtgtgtgttgggatgggatcccaggccagggaaagcccgtgtcaatgaatgccggggacagagaggggcaggttgaccgggacttcaaagccgtgatcgtgaatatcgagaactgccattgtcgtctttatgtccgcccacctagtgcttccacttctatgcaaatgcctccaagccattcacttccccaatcttgtcgttgatgggtatgtgtttaaaacatgcacggtgaggccgggcgcagtggctcacgcctgtaatcccagcactttgggaggccgaggcgggtggatcatgaggtcaggagatcgagaccatcctggctaacacgtgaaaccccgtctctactaaaaatacaaaaaattagccgggcgtggtggcgggcacctgtagtcccagctactcgggaggctgaggcaggagaatggtgtgaacccgggaagcggagcttgcagtgagccgagattgcgccactgcagtccgcagtctggcctgggcgacagagcgagactccgtctcaaaaaaaaaaaacaaaaaaaaaccatgcatggtgcatcagcagcccatggcctctggccaggcatggcgaggctgaggtgggaggatggtttgagctcaggcatttgaggctgtcgtgagctatgattatgccactgctttccagcctgggcaacatagtaagaccccatctcttaaaaaatgaatttggccagacacaggtgcctcacgcctgtaatcccagcactttgggaggctgagctggatcacttgagttcaggagttggagaccaggcctgagcaacaaagcgagatcccatctctacaaaaaccaaaaagttaaaaatcagctgggtacggtggcacgtgcctgtgatcccagctacttgggaggctgaggcaggaggatcgcctgagcccaggaggtggaggttgcagtgagccatgatcgagccactgcactccagcctgggcaacagatgaagaccctatttcagaaatacaactataaaaaaataaataaatcctccagtctggatcgtttgacgggacttcaggttctttctgaaatcgccgtgttactgttgcactgatgtccggagagacagtgacagcctccgtcagactcccgcgtgaagatgtcacaagggattggcaattgtccccagggacaaaacactgtgtcccccccagtgcagggaaccgtgataagcctttctggtttcggagcacgtaaatgcgtccctgtacagatagtggggattttttgttatgtttgcactttgtatattggttgaaactgttatcacttatatatatatatatacacacatatatataaaatctatttatttttgcaaaccctggttgctgtatttgttcagtgactattctcggggccctgtgtagggggttattgcctctgaaatgcctcttctttatgtacaaagattatttgcacgaactggactgtgtgcaacgctttttgggagaatgatgtccccgttgtatgtatgagtggcttctgggagatgggtgtcactttttaaaccactgtatagaaggtttttgtagcctgaatgtcttactgtgatcaattaaatttcttaaatgaaccaatttgtctaaaaaaaaaaa

SEQ ID NO: 11559 - DNA, 4549 bp, Artificial Sequence
  derived and/or modified sequence
gcagactcctcccccgcctggaaacctcgcccctagtactgggaatgactctgggcgtgcggcgtagtttgcagccgggacaccgtgaggcttgcgagcccagattcgcagccgagacaccgtggggcccgcgatccagtgtttgcagcgggaacatttcggggtctgtgatccgagtgaggacgcaacgcagaagctaaggatgagcaccgcggatctgatgcgtcgctgggtcatcgccctgctcctggctgctgccggagttgcagcagaagactcatgcagcaggaacgagttccagtgtagagacggaaaatgcatcgctagcaagtgggtgtgcgatggcagccccgagtgcccggatggctccgatgagtccccagagacatgcatgtctgtcacctgtcagtccaatcaattcagctgtggaggccgtgtcagccgatgcattcctgactcctggagatgtgatggacaggtagactgtgaaaatgactcagacgaacaaggctgtccccccaagacgtgctcccaggatgacttccgatgccaggatggcaagtgcatctccccgcagtttgtgtgtgatggagaccgagattgcctagatggctctgatgaggcccactgccaggccaccacttgtggccccgcccacttccgctgcaactcatccatatgcatccccagtctttgggcctgcgacggggatgtcgactgtgttgacggctccgatgagtggccacagaactgccagggccgagacacggcctccaaaggcgttagcagcccctgctcctccctggagttccactgtggtagcagtgagtgtatccatcgcagctgggtctgtgacggcgaggcagactgcaaggacaagtcagatgaggagcactgcgcggtggccacctgccgacctgatgaattccagtgtgcagatggctcctgcattcacggtagccgccagtgtgaccgtgaacatgactgcaaggacatgagcgacgagctcggctgcgtcaatgtgacacagtgtgatggccccaacaagttcaagtgtcacagtggggagtgcatcagcttggacaaggtgtgcgactccgcccgcgactgccaggactggtcggatgagcccatcaaggagtgcaagaccaacgagtgtttggacaacaatggtggctgttcccacatctgcaaggacctcaagattggctctgagtgcctgtgtcccagcggcttccggttggtggacctccacaggtgtgaagatattgacgagtgtcaggagccagacacctgcagccagctctgtgtgaacctggaaggcagctacaagtgtgagtgccaggccggcttccacatggacccacacaccagggtctgcaaggctgtgggctccataggctatctgctcttcaccaaccgccacgaggtccggaagatgaccctggaccgcagcgagtacaccagtctgctccccaacctgaagaatgtggtggctctcgacacggaggtgaccaacaatagaatctactggtccgacctgtcccaaaaaaagatctacagcgccctgatggaccaggcccctaacttgtcctacgacaccatcatcagtgaggacctgcatgcccctgacgggctggcggtagactggatccaccgcaacatctactggacagattcagtcccaggcagcgtatctgtggctgacaccaagggcgtaaagaggaggacactgttccaagaggcagggtccagacccagagccatcgtagtggaccctgtgcatggcttcatgtactggacagattggggaacacccgccaagatcaagaaagggggtttgaatggtgtggacatccactcactggtgaccgaaaacatccagtggccaaatggcatcacactagatctttccagtggccgtctctattgggttgattccaaactccactctatctccagcatcgatgtcaatgggggcaatcggaaaaccattttggaggatgagaaccggctggcccaccccttctccttggccatctatgaggacaaagtgtattggacagatgtcataaacgaagccattttcagtgccaatcgactcacgggttcagatgtgaatttggtggctgaaaacctcttgtccccggaggacattgtcctgttccacaaggtcacacagcctagaggggtgaactggtgtgagacaacagccctcctccccaatggtggttgccagtacctgtgcctgcccgccccacagatcggtccccactcgcccaaattcacctgcgcctgccctgatggcatgctgctggccaaggacatgcggagctgcctcacagaagtcgacactgtactgaccacccaggggacatccgccgtccggcctgtggtcaccgcatcagctaccaggccaccgaagcacagtgaggatctctcagctcccagtactcctaggcagcctgtggacaccccagggctcagcacagtggcgtcagtgacagtgtcccaccaagtccagggtgacatggctggcagagggaatgaggagcagccacatggtatgaggttcctgtccatcttcttccctattgcactggttgccctccttgtccttggggccgtcctgctgtggaggaactggcggctgaagaacatcaacagcataaactttgacaacccagtctaccagaagaccacagaggacgagctccacatttgccgaagccaggatggctatacctacccctcaagacagatggtcagcctggaggacgatgtggcatgagcagccgggagagccgtctctttccgggatccattgccaagcttaggcagaaaagacactctctccagacctccccatccagcactggtcctgccacctccctgggctctgtgttgctcaaagcaagataagagcaaagctgggctgggggccaagctcagctgcctgtctgccccaggttctgttttatatatttattgtctggggacagaaaaggctactggctgtgcttgaaattcgaattctgcctgggaatttttttttttctcccatcttcatttccttggaagccaaataggctgtcccagaagcttctgaattctactcttttcaacactaacacggaggaggaagagacccacccaggcagagagaagcctgctggacatgagacagcaggtactactgaccgggtcctgggtaccatagccagtccctaacctcaggacttcctgcattgaccttcatcccagagccttcctgcctgactctgccgcccccatcagaagccaggaaagtgactcgtgacattcggtactgatcttgctggatcttgaggccggcagctgccagtgatggatacccgctcatgcctttgccaaaacgtcacccgttcctggagggacaagcccaagtcgccattctcccttaatatttatcaagtgcctgagacaactggttgccttgctcaggagtcctggcctgctcagtgtcctgctgctcaggggtggccggcaggacccctgtcctgtgcccagcccccgagtctccgagtgaggcttgcacttctctctgcgcacttttcccgttctgtgctgggcacccacgtggtccacatttgtactcctaggttgcactgaccctggtgcattggatgggacctcaggccggaagtggccccgaatcattgaccacagaagataattgccaggctccaagcatccattgccttcttcagtactggggggaactcagggcctctgtctggtgtttagttagtctgtttgtttgtttgtttgtttgtttgtttggtggtttctggctctgcacagcagagttgtttagctcctctggtaacgtcatcctctctcacagagacatccagcctgctgaaggggagagatggggcgaggggagggatacacgcatggtttctcaggtgtggtggcacttggctttaatcctatgctcaagaggaagaggtgggcacatgtctgaggtccaagcctacatagtgagaccttatatatctaaaaaccaaaagaaatcccagactatttggtgggacttggaagaatacttagaaattgccacagatttgtcacatgggtaacctaagaagacagtggtggccttacttggattcctgggtagatccacctgtccactactcaagacacaagggcacactgcccagcccactgggacacttgtaaagagctctgtaatgtgccgatggcacctggctcggttttcattctgtatattcaaggatatcacacatatgtattaaatctatttatttttgcaaaccctgattgctgcacctctctgcaatttctccaggttaggctggggtgatactctgggatgctctgtatacaaagatgatttgaatgggctgatctcaggcctgtcctgtgcgttgctttgagtgggtgggaactgctttgaaacccttgttcagatgtttttataggctgaaaatatcatactgtgatggattaaattcttttttggaaaaaaaaaaaaaaaaaa

SEQ ID NO: 11560 - RNA, 2726 nt, Artificial Sequence
  derived and/or modified sequence
gggaaauaagagagaaaagaagaguaagaagaaauauaagagccaccauggguccguggggcuggaagcuuagauggacagucgcgcuccuccuugcagcagcaggaacugcggucggagaucgaugcgagcgcaacgaguuccaaugccaagaugggaaguguauuucguacaagugggucugcgauggaucagcggaaugucaggacggaagcgaugagagccaagaaacaugccucucagugacaugcaagucgggagacuucucgugcggaggacgcguaaacagauguauuccacaguuuuggcgcugcgauggucagguggacugcgacaacgguucagaugaacagggauguccuccgaaaacgugcucacaagacgaguuucgcugccaugauggaaagugcauuucgcggcaguucguaugugauucggaucgggacugucuggacggcucggacgaagcgucaugcccgguacuuacuugcgggccagccucauuccaaugcaacagcucaacgugcauuccccagcugugggccugugacaaugauccugauugugaggacgguagcgacgaguggccgcagagauguagggguuuguacguauuccaaggagacucaagccccuguuccgccuuugaguuucacugccugucgggugaaugcauccacuccagcuggcgaugugauggugggcccgacugcaaagauaagagcgacgaggagaauugcgcggucgcgacgugcagacccgaugaguuccagugcuccgauggaaacugcauccacgggagccggcagugugaucgcgaguacgauuguaaagacaugucagacgaggucggaugcgugaacgucacguugugcgaggguccgaacaaguuuaagugccauucgggcgaauguauuacgcucgauaaagucugcaacauggcgcgagauuguagggauuggucagacgaacccaucaaggagugcggcacuaacgaguguuuggacaauaacggcggguguucgcacgucugcaaugaucucaaaauuggguaugagugucucuguccugacggauuccagcuggucgcgcagcgcagaugcgaggacaucgacgagugccaggaccccgacacauguucgcaguugugugucaaccuugaaggaggguacaagugccagugcgaggagggauuucagcuugacccgcacacgaaagcauguaaagcggugggguccauugcguauuuguuuuucacaaacagacaugaagugcggaagaugacccuugaucgcagcgaauauacgucacugaucccuaaucuuaggaaugucguggcccuugacacggagguagcaucaaauagaaucuacugguccgaccucucacagagaaugaucuguucaacacaguuggaucgggcgcacggggugucgucguacgauacgguaauuagccgcgacauccaggcgccagacggacucgcggucgacuggauccauagcaacaucuacuggacagacuccguguugggaaccguauccguagcugacacaaagggagugaagcggaaaacucuuuuuagagagaacggcagcaaaccgagagcaaucguggucgauccggugcauggauucauguauuggaccgauuggggaacgccagccaaaaucaagaaaggcgguuugaauggggucgacaucuacucgcuggugacugagaauauucaguggccaaacgggaucaccuuggacuuguugucggggagguuguauuggguggacucaaagcuccacucgaucagcucgaucgacgugaacggcggaaauaggaaaacuauucucgaagaugagaaaagacuggcccaccccuucucgcucgcgguguucgaggacaaaguauuuuggacagacaucaucaacgaagcgaucuuuucagccaaccgccugacagggucggaugucaaucucuuggccgaaaaccuucugagcccggaagauauggucuuguuucacaauuugacccaacccagaggugugaauuggugcgaacggacgacauugucgaacggagguugccaguaucucugucucccugcaccccagauuaauccccauucacccaaguucacgugugcgugcccagacggaaugcuucuugcgagggacaugagauccugucucaccgaagcggaagcggcaguggccacacaagagacuucgacuguccgccuuaaaguguccucgacggcgguccgaacucagcauacgaccacacgacccgugcccgauaccucgcgguugcccggagcaacaccgggguugacgacaguagaaaucguaaccaugagccaccaggcacuuggagaugucgcaggcagaggcaaugagaagaaacccagcucggucagagcccucagcaucgugcugccuauugugcugcuuguguuucucuguuuggguguguucuuguuguggaagaacuggcgccuuaagaauaucaacucgauuaacuucgauaauccgguauaccagaaaaccacagaggaugaagugcauauuugucacaaccaagauggcuauucguacccguccaggcaaaugguaucacuugaggacgacguggccugauaagcugccuucugcggggcuugccuucuggccaugcccuucuucucucccuugcaccuguaccucuuggucuuugaauaaagccugaguaggaag

SEQ ID NO: 11561 - RNA, 2729 nt, Artificial Sequence
  derived and/or modified sequence
gggaaauaagagagaaaagaagaguaagaagaaauauaagagccaccauggguccguggggcuggaagcuuagauggacagucgcgcuccuccuugcagcagcaggaacugcggucggagaucgaugcgagcgcaacgaguuccaaugccaagaugggaaguguauuucguacaagugggucugcgauggaucagcggaaugucaggacggaagcgaugagagccaagaaacaugccucucagugacaugcaagucgggagacuucucgugcggaggacgcguaaacagauguauuccacaguuuuggcgcugcgauggucagguggacugcgacaacgguucagaugaacagggauguccuccgaaaacgugcucacaagacgaguuucgcugccaugauggaaagugcauuucgcggcaguucguaugugauucggaucgggacugucuggacggcucggacgaagcgucaugcccgguacuuacuugcgggccagccucauuccaaugcaacagcucaacgugcauuccccagcugugggccugugacaaugauccugauugugaggacgguagcgacgaguggccgcagagauguagggguuuguacguauuccaaggagacucaagccccuguuccgccuuugaguuucacugccugucgggugaaugcauccacuccagcuggcgaugugauggugggcccgacugcaaagauaagagcgacgaggagaauugcgcggucgcgacgugcagacccgaugaguuccagugcuccgauggaaacugcauccacgggagccggcagugugaucgcgaguacgauuguaaagacaugucagacgaggucggaugcgugaacgucacguugugcgaggguccgaacaaguuuaagugccauucgggcgaauguauuacgcucgauaaagucugcaacauggcgcgagauuguagggauuggucagacgaacccaucaaggagugcggcacuaacgaguguuuggacaauaacggcggguguucgcacgucugcaaugaacucaaaauuggguaugagugucucuguccugacggauuccagcuggucgcgcagcgcagaugcgaggacaucgacgagugccaggaccccgacacauguucgcaguugugugucaaccuugaaggaggguacaagugccagugcgaggagggauuucagcuugacccgcacacgaaagcauguaaagcggugggguccauugcguauuuguuuuucacaaacagacaugaagugcggaagaugacccuugaucgcagcgaauauacgucacugaucccuaaucuuaggaaugucguggcccuugacacggagguagcaucaaauagaaucuacugguccgaccucucacagagaaugaucuguucaacacaguuggaucgggcgcacggggugucgucguacgauacgguaauuagccgcgacauccaggcgccagacggacucgcggucgacuggauccauagcaacaucuacuggacagacuccguguugggaaccguauccguagcugacacaaagggagugaagcggaaaacucuuuuuagagagaacggcagcaaaccgagagcaaucguggucgauccggugcauggauucauguauuggaccgauuggggaacgccagccaaaaucaagaaaggcgguuugaauggggucgacaucuacucgcuggugacugagaauauucaguggccaaacgggaucaccuuggacuuguugucggggagguuguauuggguggacucaaagcuccacucgaucagcucgaucgacgugaacggcggaaauaggaaaacuauucucgaagaugagaaaagacuggcccaccccuucucgcucgcgguguucgaggacaaaguauuuuggacagacaucaucaacgaagcgaucuuuucagccaaccgccugacagggucggaugucaaucucuuggccgaaaaccuucugagcccggaagauauggucuuguuucacaauuugacccaacccagaggugugaauuggugcgaacggacgacauugucgaacggagguugccaguaucucugucucccugcaccccagauuaauccccauucacccaaguucacgugugcgugcccagacggaaugcuucuugcgagggacaugagauccugucucaccgaagcggaagcggcaguggccacacaagagacuucgacuguccgccuuaaaguguccucgacggcgguccgaacucagcauacgaccacacgacccgugcccgauaccucgcgguugcccggagcaacaccgggguugacgacaguagaaaucguaaccaugagccaccaggcacuuggagaugucgcaggcagaggcaaugagaagaaacccagcucggucagagcccucagcaucgugcugccuauugugcugcuuguguuucucuguuuggguguguucuuguuguggaagaacuggcgccuuaagaauaucaacucgauuaacuucgauaauccgguauaccagaaaaccacagaggaugaagugcauauuugucacaaccaagauggcuauucguacccguccaggcaaaugguaucacuugaggacgacguggccugauaauaggcugccuucugcggggcuugccuucuggccaugcccuucuucucucccuugcaccuguaccucuuggucuuugaauaaagccugaguaggaag

SEQ ID NO: 11562 - RNA, 2729 nt, Artificial Sequence
  derived and/or modified sequence
gggaaauaagagagaaaagaagaguaagaagaaauauaagagccaccauggguccguggggcuggaagcuuagauggacagucgcgcuccuccuugcagcagcaggaacugcggucggagaucgaugcgagcgcaacgaguuccaaugccaagaugggaaguguauuucguacaagugggucugcgauggaucagcggaaugucaggacggaagcgaugagagccaagaaacaugccucucagugacaugcaagucgggagacuucucgugcggaggacgcguaaacagauguauuccacaguuuuggcgcugcgauggucagguggacugcgacaacgguucagaugaacagggauguccuccgaaaacgugcucacaagacgaguuucgcugccaugauggaaagugcauuucgcggcaguucguaugugauucggaucgggacugucuggacggcucggacgaagcgucaugcccgguacuuacuugcgggccagccucauuccaaugcaacagcucaacgugcauuccccagcugugggccugugacaaugauccugauugugaggacgguagcgacgaguggccgcagagauguagggguuuguacguauuccaaggagacucaagccccuguuccgccuuugaguuucacugccugucgggugaaugcauccacuccagcuggcgaugugauggugggcccgacugcaaagauaagagcgacgaggagaauugcgcggucgcgacgugcagacccgaugaguuccagugcuccgauggaaacugcauccacgggagccggcagugugaucgcgaguacgauuguaaagacaugucagacgaggucggaugcgugaacgucacguugugcgaggguccgaacaaguuuaagugccauucgggcgaauguauuacgcucgauaaagucugcaacauggcgcgagauuguagggauuggucagacgaacccaucaaggagugcggcacuaacgaguguuuggacaauaacggcggguguucgcacgucugcaaugaucucaaaauuggguaugagugugauuguccugacggauuccagcuggucgcgcagcgcagaugcgaggacaucgacgagugccaggaccccgacacauguucgcaguugugugucaaccuugaaggaggguacaagugccagugcgaggagggauuucagcuugacccgcacacgaaagcauguaaagcggugggguccauugcguauuuguuuuucacaaacagacaugaagugcggaagaugacccuugaucgcagcgaauauacgucacugaucccuaaucuuaggaaugucguggcccuugacacggagguagcaucaaauagaaucuacugguccgaccucucacagagaaugaucuguucaacacaguuggaucgggcgcacggggugucgucguacgauacgguaauuagccgcgacauccaggcgccagacggacucgcggucgacuggauccauagcaacaucuacuggacagacuccguguugggaaccguauccguagcugacacaaagggagugaagcggaaaacucuuuuuagagagaacggcagcaaaccgagagcaaucguggucgauccggugcauggauucauguauuggaccgauuggggaacgccagccaaaaucaagaaaggcgguuugaauggggucgacaucuacucgcuggugacugagaauauucaguggccaaacgggaucaccuuggacuuguugucggggagguuguauuggguggacucaaagcuccacucgaucagcucgaucgacgugaacggcggaaauaggaaaacuauucucgaagaugagaaaagacuggcccaccccuucucgcucgcgguguucgaggacaaaguauuuuggacagacaucaucaacgaagcgaucuuuucagccaaccgccugacagggucggaugucaaucucuuggccgaaaaccuucugagcccggaagauauggucuuguuucacaauuugacccaacccagaggugugaauuggugcgaacggacgacauugucgaacggagguugccaguaucucugucucccugcaccccagauuaauccccauucacccaaguucacgugugcgugcccagacggaaugcuucuugcgagggacaugagauccugucucaccgaagcggaagcggcaguggccacacaagagacuucgacuguccgccuuaaaguguccucgacggcgguccgaacucagcauacgaccacacgacccgugcccgauaccucgcgguugcccggagcaacaccgggguugacgacaguagaaaucguaaccaugagccaccaggcacuuggagaugucgcaggcagaggcaaugagaagaaacccagcucggucagagcccucagcaucgugcugccuauugugcugcuuguguuucucuguuuggguguguucuuguuguggaagaacuggcgccuuaagaauaucaacucgauuaacuucgauaauccgguauaccagaaaaccacagaggaugaagugcauauuugucacaaccaagauggcuauucguacccguccaggcaaaugguaucacuugaggacgacguggccugauaauaggcugccuucugcggggcuugccuucuggccaugcccuucuucucucccuugcaccuguaccucuuggucuuugaauaaagccugaguaggaag

SEQ ID NO: 11563 - RNA, 2729 nt, Artificial Sequence
  derived and/or modified sequence
gggaaauaagagagaaaagaagaguaagaagaaauauaagagccaccauggguccguggggcuggaagcuuagauggacagucgcgcuccuccuugcagcagcaggaacugcggucggagaucgaugcgagcgcaacgaguuccaaugccaagaugggaaguguauuucguacaagugggucugcgauggaucagcggaaugucaggacggaagcgaugagagccaagaaacaugccucucagugacaugcaagucgggagacuucucgugcggaggacgcguaaacagauguauuccacaguuuuggcgcugcgauggucagguggacugcgacaacgguucagaugaacagggauguccuccgaaaacgugcucacaagacgaguuucgcugccaugauggaaagugcauuucgcggcaguucguaugugauucggaucgggacugucuggacggcucggacgaagcgucaugcccgguacuuacuugcgggccagccucauuccaaugcaacagcucaacgugcauuccccagcugugggccugugacaaugauccugauugugaggacgguagcgacgaguggccgcagagauguagggguuuguacguauuccaaggagacucaagccccuguuccgccuuugaguuucacugccugucgggugaaugcauccacuccagcuggcgaugugauggugggcccgacugcaaagauaagagcgacgaggagaauugcgcggucgcgacgugcagacccgaugaguuccagugcuccgauggaaacugcauccacgggagccggcagugugaucgcgaguacgauuguaaagacaugucagacgaggucggaugcgugaacgucacguugugcgaggguccgaacaaguuuaagugccauucgggcgaauguauuacgcucgauaaagucugcaacauggcgcgagauuguagggauuggucagacgaacccaucaaggagugcggcacugcagaguguuuggacaauaacggcggguguucgcacgucugcaaugaucucaaaauuggguaugagugucucuguccugacggauuccagcuggucgcgcagcgcagaugcgaggacaucgacgagugccaggaccccgacacauguucgcaguugugugucaaccuugaaggaggguacaagugccagugcgaggagggauuucagcuugacccgcacacgaaagcauguaaagcggugggguccauugcguauuuguuuuucacaaacagacaugaagugcggaagaugacccuugaucgcagcgaauauacgucacugaucccuaaucuuaggaaugucguggcccuugacacggagguagcaucaaauagaaucuacugguccgaccucucacagagaaugaucuguucaacacaguuggaucgggcgcacggggugucgucguacgauacgguaauuagccgcgacauccaggcgccagacggacucgcggucgacuggauccauagcaacaucuacuggacagacuccguguugggaaccguauccguagcugacacaaagggagugaagcggaaaacucuuuuuagagagaacggcagcaaaccgagagcaaucguggucgauccggugcauggauucauguauuggaccgauuggggaacgccagccaaaaucaagaaaggcgguuugaauggggucgacaucuacucgcuggugacugagaauauucaguggccaaacgggaucaccuuggacuuguugucggggagguuguauuggguggacucaaagcuccacucgaucagcucgaucgacgugaacggcggaaauaggaaaacuauucucgaagaugagaaaagacuggcccaccccuucucgcucgcgguguucgaggacaaaguauuuuggacagacaucaucaacgaagcgaucuuuucagccaaccgccugacagggucggaugucaaucucuuggccgaaaaccuucugagcccggaagauauggucuuguuucacaauuugacccaacccagaggugugaauuggugcgaacggacgacauugucgaacggagguugccaguaucucugucucccugcaccccagauuaauccccauucacccaaguucacgugugcgugcccagacggaaugcuucuugcgagggacaugagauccugucucaccgaagcggaagcggcaguggccacacaagagacuucgacuguccgccuuaaaguguccucgacggcgguccgaacucagcauacgaccacacgacccgugcccgauaccucgcgguugcccggagcaacaccgggguugacgacaguagaaaucguaaccaugagccaccaggcacuuggagaugucgcaggcagaggcaaugagaagaaacccagcucggucagagcccucagcaucgugcugccuauugugcugcuuguguuucucuguuuggguguguucuuguuguggaagaacuggcgccuuaagaauaucaacucgauuaacuucgauaauccgguauaccagaaaaccacagaggaugaagugcauauuugucacaaccaagauggcuauucguacccguccaggcaaaugguaucacuugaggacgacguggccugauaauaggcugccuucugcggggcuugccuucuggccaugcccuucuucucucccuugcaccuguaccucuuggucuuugaauaaagccugaguaggaag

SEQ ID NO: 11564 - RNA, 2729 nt, Artificial Sequence
  derived and/or modified sequence
gggaaauaagagagaaaagaagaguaagaagaaauauaagagccaccauggguccguggggcuggaagcuuagauggacagucgcgcuccuccuugcagcagcaggaacugcggucggagaucgaugcgagcgcaacgaguuccaaugccaagaugggaaguguauuucguacaagugggucugcgauggaucagcggaaugucaggacggaagcgaugagagccaagaaacaugccucucagugacaugcaagucgggagacuucucgugcggaggacgcguaaacagauguauuccacaguuuuggcgcugcgauggucagguggacugcgacaacgguucagaugaacagggauguccuccgaaaacgugcucacaagacgaguuucgcugccaugauggaaagugcauuucgcggcaguucguaugugauucggaucgggacugucuggacggcucggacgaagcgucaugcccgguacuuacuugcgggccagccucauuccaaugcaacagcucaacgugcauuccccagcugugggccugugacaaugauccugauugugaggacgguagcgacgaguggccgcagagauguagggguuuguacguauuccaaggagacucaagccccuguuccgccuuugaguuucacugccugucgggugaaugcauccacuccagcuggcgaugugauggugggcccgacugcaaagauaagagcgacgaggagaauugcgcggucgcgacgugcagacccgaugaguuccagugcuccgauggaaacugcauccacgggagccggcagugugaucgcgaguacgauuguaaagacaugucagacgaggucggaugcgugaacgucacguugugcgaggguccgaacaaguuuaagugccauucgggcgaauguauuacgcucgauaaagucugcaacauggcgcgagauuguagggauuggucagacgaacccaucaaggagugcggcacuaacgcauguuuggacaauaacggcggguguucgcacgucugcaaugaucucaaaauuggguaugagugucucuguccugacggauuccagcuggucgcgcagcgcagaugcgaggacaucgacgagugccaggaccccgacacauguucgcaguugugugucaaccuugaaggaggguacaagugccagugcgaggagggauuucagcuugacccgcacacgaaagcauguaaagcggugggguccauugcguauuuguuuuucacaaacagacaugaagugcggaagaugacccuugaucgcagcgaauauacgucacugaucccuaaucuuaggaaugucguggcccuugacacggagguagcaucaaauagaaucuacugguccgaccucucacagagaaugaucuguucaacacaguuggaucgggcgcacggggugucgucguacgauacgguaauuagccgcgacauccaggcgccagacggacucgcggucgacuggauccauagcaacaucuacuggacagacuccguguugggaaccguauccguagcugacacaaagggagugaagcggaaaacucuuuuuagagagaacggcagcaaaccgagagcaaucguggucgauccggugcauggauucauguauuggaccgauuggggaacgccagccaaaaucaagaaaggcgguuugaauggggucgacaucuacucgcuggugacugagaauauucaguggccaaacgggaucaccuuggacuuguugucggggagguuguauuggguggacucaaagcuccacucgaucagcucgaucgacgugaacggcggaaauaggaaaacuauucucgaagaugagaaaagacuggcccaccccuucucgcucgcgguguucgaggacaaaguauuuuggacagacaucaucaacgaagcgaucuuuucagccaaccgccugacagggucggaugucaaucucuuggccgaaaaccuucugagcccggaagauauggucuuguuucacaauuugacccaacccagaggugugaauuggugcgaacggacgacauugucgaacggagguugccaguaucucugucucccugcaccccagauuaauccccauucacccaaguucacgugugcgugcccagacggaaugcuucuugcgagggacaugagauccugucucaccgaagcggaagcggcaguggccacacaagagacuucgacuguccgccuuaaaguguccucgacggcgguccgaacucagcauacgaccacacgacccgugcccgauaccucgcgguugcccggagcaacaccgggguugacgacaguagaaaucguaaccaugagccaccaggcacuuggagaugucgcaggcagaggcaaugagaagaaacccagcucggucagagcccucagcaucgugcugccuauugugcugcuuguguuucucuguuuggguguguucuuguuguggaagaacuggcgccuuaagaauaucaacucgauuaacuucgauaauccgguauaccagaaaaccacagaggaugaagugcauauuugucacaaccaagauggcuauucguacccguccaggcaaaugguaucacuugaggacgacguggccugauaauaggcugccuucugcggggcuugccuucuggccaugcccuucuucucucccuugcaccuguaccucuuggucuuugaauaaagccugaguaggaag

SEQ ID NO: 11565 - RNA, 2729 nt, Artificial Sequence
  derived and/or modified sequence
gggaaauaagagagaaaagaagaguaagaagaaauauaagagccaccauggguccguggggcuggaagcuuagauggacagucgcgcuccuccuugcagcagcaggaacugcggucggagaucgaugcgagcgcaacgaguuccaaugccaagaugggaaguguauuucguacaagugggucugcgauggaucagcggaaugucaggacggaagcgaugagagccaagaaacaugccucucagugacaugcaagucgggagacuucucgugcggaggacgcguaaacagauguauuccacaguuuuggcgcugcgauggucagguggacugcgacaacgguucagaugaacagggauguccuccgaaaacgugcucacaagacgaguuucgcugccaugauggaaagugcauuucgcggcaguucguaugugauucggaucgggacugucuggacggcucggacgaagcgucaugcccgguacuuacuugcgggccagccucauuccaaugcaacagcucaacgugcauuccccagcugugggccugugacaaugauccugauugugaggacgguagcgacgaguggccgcagagauguagggguuuguacguauuccaaggagacucaagccccuguuccgccuuugaguuucacugccugucgggugaaugcauccacuccagcuggcgaugugauggugggcccgacugcaaagauaagagcgacgaggagaauugcgcggucgcgacgugcagacccgaugaguuccagugcuccgauggaaacugcauccacgggagccggcagugugaucgcgaguacgauuguaaagacaugucagacgaggucggaugcgugaacgucacguugugcgaggguccgaacaaguuuaagugccauucgggcgaauguauuacgcucgauaaagucugcaacauggcgcgagauuguagggauuggucagacgaacccaucaaggagugcggcacuaacgaguguuuggacaauaacggcggguguucgcacgucugcaaugaucucaaaauuggggcagagugucucuguccugacggauuccagcuggucgcgcagcgcagaugcgaggacaucgacgagugccaggaccccgacacauguucgcaguugugugucaaccuugaaggaggguacaagugccagugcgaggagggauuucagcuugacccgcacacgaaagcauguaaagcggugggguccauugcguauuuguuuuucacaaacagacaugaagugcggaagaugacccuugaucgcagcgaauauacgucacugaucccuaaucuuaggaaugucguggcccuugacacggagguagcaucaaauagaaucuacugguccgaccucucacagagaaugaucuguucaacacaguuggaucgggcgcacggggugucgucguacgauacgguaauuagccgcgacauccaggcgccagacggacucgcggucgacuggauccauagcaacaucuacuggacagacuccguguugggaaccguauccguagcugacacaaagggagugaagcggaaaacucuuuuuagagagaacggcagcaaaccgagagcaaucguggucgauccggugcauggauucauguauuggaccgauuggggaacgccagccaaaaucaagaaaggcgguuugaauggggucgacaucuacucgcuggugacugagaauauucaguggccaaacgggaucaccuuggacuuguugucggggagguuguauuggguggacucaaagcuccacucgaucagcucgaucgacgugaacggcggaaauaggaaaacuauucucgaagaugagaaaagacuggcccaccccuucucgcucgcgguguucgaggacaaaguauuuuggacagacaucaucaacgaagcgaucuuuucagccaaccgccugacagggucggaugucaaucucuuggccgaaaaccuucugagcccggaagauauggucuuguuucacaauuugacccaacccagaggugugaauuggugcgaacggacgacauugucgaacggagguugccaguaucucugucucccugcaccccagauuaauccccauucacccaaguucacgugugcgugcccagacggaaugcuucuugcgagggacaugagauccugucucaccgaagcggaagcggcaguggccacacaagagacuucgacuguccgccuuaaaguguccucgacggcgguccgaacucagcauacgaccacacgacccgugcccgauaccucgcgguugcccggagcaacaccgggguugacgacaguagaaaucguaaccaugagccaccaggcacuuggagaugucgcaggcagaggcaaugagaagaaacccagcucggucagagcccucagcaucgugcugccuauugugcugcuuguguuucucuguuuggguguguucuuguuguggaagaacuggcgccuuaagaauaucaacucgauuaacuucgauaauccgguauaccagaaaaccacagaggaugaagugcauauuugucacaaccaagauggcuauucguacccguccaggcaaaugguaucacuugaggacgacguggccugauaauaggcugccuucugcggggcuugccuucuggccaugcccuucuucucucccuugcaccuguaccucuuggucuuugaauaaagccugaguaggaag

SEQ ID NO: 11566 - RNA, 2729 nt, Artificial Sequence
  derived and/or modified sequence
gggaaauaagagagaaaagaagaguaagaagaaauauaagagccaccauggguccguggggcuggaagcuuagauggacagucgcgcuccuccuugcagcagcaggaacugcggucggagaucgaugcgagcgcaacgaguuccaaugccaagaugggaaguguauuucguacaagugggucugcgauggaucagcggaaugucaggacggaagcgaugagagccaagaaacaugccucucagugacaugcaagucgggagacuucucgugcggaggacgcguaaacagauguauuccacaguuuuggcgcugcgauggucagguggacugcgacaacgguucagaugaacagggauguccuccgaaaacgugcucacaagacgaguuucgcugccaugauggaaagugcauuucgcggcaguucguaugugauucggaucgggacugucuggacggcucggacgaagcgucaugcccgguacuuacuugcgggccagccucauuccaaugcaacagcucaacgugcauuccccagcugugggccugugacaaugauccugauugugaggacgguagcgacgaguggccgcagagauguagggguuuguacguauuccaaggagacucaagccccuguuccgccuuugaguuucacugccugucgggugaaugcauccacuccagcuggcgaugugauggugggcccgacugcaaagauaagagcgacgaggagaauugcgcggucgcgacgugcagacccgaugaguuccagugcuccgauggaaacugcauccacgggagccggcagugugaucgcgaguacgauuguaaagacaugucagacgaggucggaugcgugaacgucacguugugcgaggguccgaacaaguuuaagugccauucgggcgaauguauuacgcucgauaaagucugcaacauggcgcgagauuguagggauuggucagacgaacccaucaaggagugcggcacugcagcauguuuggacaauaacggcggguguucgcacgucugcaaugcacucaaaauuggggcagagugucucuguccugacggauuccagcuggucgcgcagcgcagaugcgaggacaucgacgagugccaggaccccgacacauguucgcaguugugugucaaccuugaaggaggguacaagugccagugcgaggagggauuucagcuugacccgcacacgaaagcauguaaagcggugggguccauugcguauuuguuuuucacaaacagacaugaagugcggaagaugacccuugaucgcagcgaauauacgucacugaucccuaaucuuaggaaugucguggcccuugacacggagguagcaucaaauagaaucuacugguccgaccucucacagagaaugaucuguucaacacaguuggaucgggcgcacggggugucgucguacgauacgguaauuagccgcgacauccaggcgccagacggacucgcggucgacuggauccauagcaacaucuacuggacagacuccguguugggaaccguauccguagcugacacaaagggagugaagcggaaaacucuuuuuagagagaacggcagcaaaccgagagcaaucguggucgauccggugcauggauucauguauuggaccgauuggggaacgccagccaaaaucaagaaaggcgguuugaauggggucgacaucuacucgcuggugacugagaauauucaguggccaaacgggaucaccuuggacuuguugucggggagguuguauuggguggacucaaagcuccacucgaucagcucgaucgacgugaacggcggaaauaggaaaacuauucucgaagaugagaaaagacuggcccaccccuucucgcucgcgguguucgaggacaaaguauuuuggacagacaucaucaacgaagcgaucuuuucagccaaccgccugacagggucggaugucaaucucuuggccgaaaaccuucugagcccggaagauauggucuuguuucacaauuugacccaacccagaggugugaauuggugcgaacggacgacauugucgaacggagguugccaguaucucugucucccugcaccccagauuaauccccauucacccaaguucacgugugcgugcccagacggaaugcuucuugcgagggacaugagauccugucucaccgaagcggaagcggcaguggccacacaagagacuucgacuguccgccuuaaaguguccucgacggcgguccgaacucagcauacgaccacacgacccgugcccgauaccucgcgguugcccggagcaacaccgggguugacgacaguagaaaucguaaccaugagccaccaggcacuuggagaugucgcaggcagaggcaaugagaagaaacccagcucggucagagcccucagcaucgugcugccuauugugcugcuuguguuucucuguuuggguguguucuuguuguggaagaacuggcgccuuaagaauaucaacucgauuaacuucgauaauccgguauaccagaaaaccacagaggaugaagugcauauuugucacaaccaagauggcuauucguacccguccaggcaaaugguaucacuugaggacgacguggccugauaauaggcugccuucugcggggcuugccuucuggccaugcccuucuucucucccuugcaccuguaccucuuggucuuugaauaaagccugaguaggaag

SEQ ID NO: 11567 - protein, 1011 aa, Artificial Sequence
  derived and/or modified sequence
MGAYARASGVCARGCLDSAGPWTMSRALRPPLPPLCFFLLLLAAAGARAGGYETCPTVQPNMLNVHLLPHTHDDVGWLKTVDQYFYGIKNDIQHAGVQYILDSVISALLADPTRRFIYVEIAFFSRWWHQQTNATQEVVRDLVRQGRLEFANGGWVMNDEAATHYGAIVDQMTLGLRFLEDTFGNDGRPRVAWHIDPFGHSREQASLFAQMGFDGFFFGRLDYQDKWVRMQKLEMEQVWRASTSLKPPTADLFTGVLPNGYNPPRNLCWDVLCVDQPLVEDPRSPEYNAKELVDYFLNVATAQGRYYRTNHTVMTMGSDFQYENANMWFKNLDKLIRLVNAQQAKGSSVHVLYSTPACYLWELNKANLTWSVKHDDFFPYADGPHQFWTGYFSSRPALKRYERLSYNFLQVCNQLEALVGLAANVGPYGSGDSAPLNEAMAVLQHHDAVSGTSRQHVANDYARQLAAGWGPCEVLLSNALARLRGFKDHFTFCQQLNISICPLSQTAARFQVIVYNPLGRKVNWMVRLPVSEGVFVVKDPNGRTVPSDVVIFPSSDSQAHPPELLFSASLPALGFSTYSVAQVPRWKPQARAPQPIPRRSWSPALTIENEHIRATFDPDTGLLMEIMNMNQQLLLPVRQTFFWYNASIGDNESDQASGAYIFRPNQQKPLPVSRWAQIHLVKTPLVQEVHQNFSAWCSQVVRLYPGQRHLELEWSVGPIPVGDTWGKEVISRFDTPLETKGRFYTDSNGREILERRRDYRPTWKLNQTEPVAGNYYPVNTRIYITDGNMQLTVLTDRSQGGSSLRDGSLELMVHRRLLKDDGRGVSEPLMENGSGAWVRGRHLVLLDTAQAAAAGHRLLAEQEVLAPQVVLAPGGGAAYNLGAPPRTQFSGLRRDLPPSVHLLTLASWGPEMVLLRLEHQFAVGEDSGRNLSAPVTLNLRDLFSTFTITRLQETTLVANQLREAASRLKWTTNTGPTPHQTPYQLDPANITLEPMEIRTFLASVQWKEVDG

SEQ ID NO: 11568 - protein, 950 aa, Artificial Sequence
  derived and/or modified sequence
MLNVHLLPHTHDDVGWLKTVDQYFYGIKNDIQHAGVQYILDSVISALLADPTRRFIYVEIAFFSRWWHQQTNATQEVVRDLVRQGRLEFANGGWVMNDEAATHYGAIVDQMTLGLRFLEDTFGNDGRPRVAWHIDPFGHSREQASLFAQMGFDGFFFGRLDYQDKWVRMQKLEMEQVWRASTSLKPPTADLFTGVLPNGYNPPRNLCWDVLCVDQPLVEDPRSPEYNAKELVDYFLNVATAQGRYYRTNHTVMTMGSDFQYENANMWFKNLDKLIRLVNAQQAKGSSVHVLYSTPACYLWELNKANLTWSVKHDDFFPYADGPHQFWTGYFSSRPALKRYERLSYNFLQVCNQLEALVGLAANVGPYGSGDSAPLNEAMAVLQHHDAVSGTSRQHVANDYARQLAAGWGPCEVLLSNALARLRGFKDHFTFCQQLNISICPLSQTAARFQVIVYNPLGRKVNWMVRLPVSEGVFVVKDPNGRTVPSDVVIFPSSDSQAHPPELLFSASLPALGFSTYSVAQVPRWKPQARAPQPIPRRSWSPALTIENEHIRATFDPDTGLLMEIMNMNQQLLLPVRQTFFWYNASIGDNESDQASGAYIFRPNQQKPLPVSRWAQIHLVKTPLVQEVHQNFSAWCSQVVRLYPGQRHLELEWSVGPIPVGDTWGKEVISRFDTPLETKGRFYTDSNGREILERRRDYRPTWKLNQTEPVAGNYYPVNTRIYITDGNMQLTVLTDRSQGGSSLRDGSLELMVHRRLLKDDGRGVSEPLMENGSGAWVRGRHLVLLDTAQAAAAGHRLLAEQEVLAPQVVLAPGGGAAYNLGAPPRTQFSGLRRDLPPSVHLLTLASWGPEMVLLRLEHQFAVGEDSGRNLSAPVTLNLRDLFSTFTITRLQETTLVANQLREAASRLKWTTNTGPTPHQTPYQLDPANITLEPMEIRTFLASVQWKEVDG

SEQ ID NO: 11569 - DNA, 3033 bp, Artificial Sequence
  derived and/or modified sequence
atgggcgcctacgcccgcgccagcggcgtgtgcgcccgcggctgcctggacagcgccggcccctggaccatgagccgcgccctgcgcccccccctgccccccctgtgcttcttcctgctgctgctggccgccgccggcgcccgcgccggcggctacgagacctgccccaccgtgcagcccaacatgctgaacgtgcacctgctgccccacacccacgacgacgtgggctggctgaagaccgtggaccagtacttctacggcatcaagaacgacatccagcacgccggcgtgcagtacatcctggacagcgtgatcagcgccctgctggccgaccccacccgccgcttcatctacgtggagatcgccttcttcagccgctggtggcaccagcagaccaacgccacccaggaggtggtgcgcgacctggtgcgccagggccgcctggagttcgccaacggcggctgggtgatgaacgacgaggccgccacccactacggcgccatcgtggaccagatgaccctgggcctgcgcttcctggaggacaccttcggcaacgacggccgcccccgcgtggcctggcacatcgaccccttcggccacagccgcgagcaggccagcctgttcgcccagatgggcttcgacggcttcttcttcggccgcctggactaccaggacaagtgggtgcgcatgcagaagctggagatggagcaggtgtggcgcgccagcaccagcctgaagccccccaccgccgacctgttcaccggcgtgctgcccaacggctacaaccccccccgcaacctgtgctgggacgtgctgtgcgtggaccagcccctggtggaggacccccgcagccccgagtacaacgccaaggagctggtggactacttcctgaacgtggccaccgcccagggccgctactaccgcaccaaccacaccgtgatgaccatgggcagcgacttccagtacgagaacgccaacatgtggttcaagaacctggacaagctgatccgcctggtgaacgcccagcaggccaagggcagcagcgtgcacgtgctgtacagcacccccgcctgctacctgtgggagctgaacaaggccaacctgacctggagcgtgaagcacgacgacttcttcccctacgccgacggcccccaccagttctggaccggctacttcagcagccgccccgccctgaagcgctacgagcgcctgagctacaacttcctgcaggtgtgcaaccagctggaggccctggtgggcctggccgccaacgtgggcccctacggcagcggcgacagcgcccccctgaacgaggccatggccgtgctgcagcaccacgacgccgtgagcggcaccagccgccagcacgtggccaacgactacgcccgccagctggccgccggctggggcccctgcgaggtgctgctgagcaacgccctggcccgcctgcgcggcttcaaggaccacttcaccttctgccagcagctgaacatcagcatctgccccctgagccagaccgccgcccgcttccaggtgatcgtgtacaaccccctgggccgcaaggtgaactggatggtgcgcctgcccgtgagcgagggcgtgttcgtggtgaaggaccccaacggccgcaccgtgcccagcgacgtggtgatcttccccagcagcgacagccaggcccacccccccgagctgctgttcagcgccagcctgcccgccctgggcttcagcacctacagcgtggcccaggtgccccgctggaagccccaggcccgcgccccccagcccatcccccgccgcagctggagccccgccctgaccatcgagaacgagcacatccgcgccaccttcgaccccgacaccggcctgctgatggagatcatgaacatgaaccagcagctgctgctgcccgtgcgccagaccttcttctggtacaacgccagcatcggcgacaacgagagcgaccaggccagcggcgcctacatcttccgccccaaccagcagaagcccctgcccgtgagccgctgggcccagatccacctggtgaagacccccctggtgcaggaggtgcaccagaacttcagcgcctggtgcagccaggtggtgcgcctgtaccccggccagcgccacctggagctggagtggagcgtgggccccatccccgtgggcgacacctggggcaaggaggtgatcagccgcttcgacacccccctggagaccaagggccgcttctacaccgacagcaacggccgcgagatcctggagcgccgccgcgactaccgccccacctggaagctgaaccagaccgagcccgtggccggcaactactaccccgtgaacacccgcatctacatcaccgacggcaacatgcagctgaccgtgctgaccgaccgcagccagggcggcagcagcctgcgcgacggcagcctggagctgatggtgcaccgccgcctgctgaaggacgacggccgcggcgtgagcgagcccctgatggagaacggcagcggcgcctgggtgcgcggccgccacctggtgctgctggacaccgcccaggccgccgccgccggccaccgcctgctggccgagcaggaggtgctggccccccaggtggtgctggcccccggcggcggcgccgcctacaacctgggcgcccccccccgcacccagttcagcggcctgcgccgcgacctgccccccagcgtgcacctgctgaccctggccagctggggccccgagatggtgctgctgcgcctggagcaccagttcgccgtgggcgaggacagcggccgcaacctgagcgcccccgtgaccctgaacctgcgcgacctgttcagcaccttcaccatcacccgcctgcaggagaccaccctggtggccaaccagctgcgcgaggccgccagccgcctgaagtggaccaccaacaccggccccaccccccaccagaccccctaccagctggaccccgccaacatcaccctggagcccatggagatccgcaccttcctggccagcgtgcagtggaaggaggtggacggc

SEQ ID NO: 11570 - DNA, 3033 bp, Artificial Sequence
  derived and/or modified sequence
atgggtgcttatgctcgagccagtggggtgtgtgcgagagggtgcctggacagcgcaggcccctggacgatgtcccgcgctctgagaccccccctgccaccactttgtttcttcttgctgctgctcgctgctgctggggccagagccggtggctacgaaacctgtcccactgtgcagccaaatatgctgaacgtgcatttgttgccccatacacacgacgatgtggggtggctcaagacagtcgatcagtatttttatggtattaaaaacgacatccagcacgccggggtgcaatatattttggatagtgtgatctctgcgcttttggccgatccaacgcgccggttcatttacgtggaaatcgccttctttagtaggtggtggcaccagcagacaaacgccacccaggaagtcgtgcgggacctggtcagacagggacgattggaattcgctaatggcggctgggtgatgaatgacgaagctgcaacacattatggagccatagtggatcagatgactctgggcctgcgcttcttggaggacacctttggcaatgatggaaggccccgcgtagcctggcatattgacccctttgggcactcacgagagcaggctagtctctttgcccagatggggtttgatggcttcttctttggtcgccttgattaccaagacaagtgggtccgcatgcagaaactcgagatggagcaggtatggcgcgcttctacgagcttgaagccgccaactgctgacctgttcaccggtgtactgccaaatggctacaaccctccgagaaatttgtgctgggacgtgctgtgtgtggaccagccactggtcgaagatcctaggagccctgaatacaacgctaaggagctcgtagactatttcctgaatgttgcaacagcgcagggccggtactacaggactaatcatacagtgatgaccatgggcagtgactttcaatacgaaaatgctaatatgtggttcaaaaatctggacaagcttataagactcgtgaatgctcaacaggccaaaggctcctcagtccacgtcctgtactccactcccgcctgctacctgtgggaattgaataaggccaatcttacctggagtgtaaaacatgatgatttctttccctacgccgatggccctcatcagttttggacagggtactttagctcaaggcctgccctcaagcggtatgagagattgtcatacaatttccttcaagtgtgtaatcaactcgaggccctggtcggacttgccgctaacgtcggtccctatggatctggcgactccgcacccctgaatgaggctatggcggtacttcagcaccacgatgccgtgagcgggacaagccgccaacacgtggccaatgattacgccagacagctggctgcgggatggggaccgtgtgaggtgctgctttctaatgctcttgcaaggctgaggggcttcaaggaccactttaccttctgtcagcagctgaacatttctatctgtccactgtcacagactgcggctaggttccaagtcattgtttataatcctcttggacggaaggtgaactggatggtgcgcctgccagtctcagaaggggtattcgtcgtgaaagaccccaatggtaggacagtcccttccgatgttgtgatattccccagctctgactctcaggcccatccacccgagctcctgtttagtgcctctctgcctgccctcgggtttagcacctatagtgtggcccaagtgccaaggtggaagccgcaggctcgggccccccagccaattcccaggagatcttggagtcccgctctgaccatcgagaacgaacacattcgagctacttttgaccctgacaccggactccttatggaaatcatgaatatgaatcagcagctgttgctgcctgtgcggcagaccttcttttggtacaacgcaagcatcggggacaacgagagtgaccaggctagcggcgcttacatttttcgacctaatcagcagaaaccactgcctgtgtcccggtgggctcagatccacctcgtcaagacgcctctggtgcaggaagtacaccagaactttagtgcatggtgtagccaggtggtgagactctacccaggtcagaggcatctcgaactggagtggtccgtaggccccatacccgttggtgacacgtgggggaaggaggtaatatctaggttcgatacccctctggagacaaagggcagattttatacggatagtaacggcagggagatcctcgagcggcggcgggattataggccaacctggaagctgaaccagacagagcccgtagccggaaactactaccctgtgaataccaggatttacatcactgacggcaacatgcagctgactgtgctgacagatcgaagtcagggtggttcttctcttagagatggctccttggagttgatggtacaccggcggctgctgaaagatgacggccgaggcgtgtctgaacctttgatggagaacggatctggggcctgggtccgcggcaggcacctggtgctgttggataccgcccaggccgccgcagcggggcacaggctgctggctgaacaggaggtcttggcacctcaggtggtactggcccccggaggaggtgcggcgtataacctgggcgctcctccccgcacgcagttctctggactgcgacgagacttgccgccttcagtgcacctgctcaccttggcctcctggggcccggaaatggtgctgctgcgactggagcatcaattcgctgtgggagaggactcagggaggaatttgtctgctccggtgactctgaatctgcgcgacctgtttagtacgtttactatcacccggttgcaggaaacgacgcttgtggcaaatcagttgcgggaggctgcctctcgactcaaatggaccacaaataccggacccacgcctcatcagaccccctatcaacttgaccctgctaacataacactggagcctatggaaatacgcaccttccttgctagcgtgcagtggaaggaggtggatggc

SEQ ID NO: 11571 - DNA, 3033 bp, Artificial Sequence
  derived and/or modified sequence
atgggcgcctacgctcgcgcatcgggggtgtgtgctagaggctgtctggactctgcaggcccttggactatgtcgcgcgccctcagacctccgctgcccccgctgtgctttttcctcctgctgctggcggctgcgggtgccagagccggcgggtacgaaacctgccccaccgtacagcccaatatgctgaatgtgcacttgcttccccacacccacgacgatgttggctggctcaagaccgttgatcaatatttctacgggatcaagaatgatattcagcacgccggagtgcagtacatcttggattcggtgatcagtgccctgctcgctgatccgactagacggtttatttatgtagagatagcctttttctctcggtggtggcaccagcagacaaacgcaacccaggaagttgtgagagatctggttcgccaggggagactggaattcgcaaatgggggatgggtcatgaatgatgaggccgctacacactatggcgctatagtagatcagatgactctaggactacgctttttagaagacacattcggcaacgacgggagacctcgggtcgcctggcacattgacccatttggccactcccgggagcaggcaagccttttcgcccagatgggcttcgatggattttttttcggtagattggattatcaggataagtgggtgagaatgcagaaacttgaaatggagcaggtgtggcgagccagcacaagtctcaagcccccaaccgccgacctttttaccggagttttgcctaatggctacaatccaccaaggaacttatgctgggatgtgctttgcgtagaccaacctttggtggaggaccctagatcacctgagtacaacgcgaaagaactagttgactatttcttgaacgttgcaacagcccagggtaggtactaccgtaccaaccacacagtgatgaccatggggtccgacttccagtatgagaatgctaatatgtggtttaagaatctagacaagcttatcaggctggtcaatgcgcagcaggccaaggggtcgtccgtgcacgtcctttattcaacaccggcctgttacctttgggaactgaataaggcgaatctgacatggtccgtgaagcatgatgattttttcccatatgcggacggaccacaccagttctggacagggtatttctcgagtagacccgcccttaaaaggtatgaacgtctgagctataacttccttcaggtttgcaatcagctcgaggccctcgtgggcctagctgccaacgtcgggccatacggttcgggtgattcagcacccttgaacgaagctatggccgtgctccagcaccacgatgcagtgtcaggtacatctcggcagcacgtcgcaaacgattatgcccgacagttggccgcaggatggggaccatgcgaagtgctgctgagtaatgcactcgcccggctccgggggttcaaggaccacttcaccttctgtcaacagctgaatatctccatttgtcctctaagccagactgctgcccgctttcaggtgatagtgtacaacccgctaggcaggaaggtgaattggatggtccggctgcccgtgagcgagggggtgttcgtagtgaaagaccccaatggcagaacagtcccaagcgacgtcgttatctttccgtcttcagattcccaggctcatccccccgagctgctattttccgcatctttgcccgccctcggcttttctacatactcggtcgcacaggtgccacggtggaagcctcaggctagggcacctcagccaataccacggcgatcttggagcccagcactgacaatagagaatgagcatatcagggcaacattcgacccagatactggcctcctgatggagatcatgaatatgaatcagcagctgttgctgccagtcagacagacatttttttggtacaacgctagtataggggataacgaatctgaccaggcgagcggggcgtatatcttccggcctaaccaacagaaacctctgcccgtttcaagatgggcccagatccacttggtgaagacccctctggtgcaggaggtgcaccagaatttttctgcgtggtgctcccaggttgtaaggctgtatccagggcagcgccatcttgagctcgagtggagcgtgggaccaataccagtgggagatacctggggcaaggaggttataagtcgattcgatactccacttgagacaaagggacgcttttatactgattcaaacggaagagagattctggaacgacgacgggattaccggcccacttggaagctcaaccagaccgaacctgttgctggcaactattatcccgtaaacacaagaatctacatcactgatggcaacatgcagctgacagtgctgactgatcgctctcaaggggggtcaagtctcagagacggctctctcgagttgatggtgcacaggcggcttctgaaggatgatggcagaggtgtgagcgaaccgctgatggagaatgggtccggtgcctgggtacggggacgccacttagtgctcctggataccgcccaagccgctgcagcaggccatcgcctgctggccgaacaagaagtccttgccccgcaggtggttcttgctccaggcgggggggccgcatataacctcggggctccaccccgcacccagttttccggcttgaggagagatctgcctccaagcgtgcacctcctgactctcgccagctggggtccggagatggtgctgttgaggctggaacaccagtttgcggtgggcgaagacagcggtcggaatctgagcgcacctgtcacactaaacctgcgggatctgtttagcactttcaccataactcgcctgcaggagacaacgctggtcgctaaccaacttagagaggcggcaagccgactgaagtggaccaccaacacagggcccaccccgcaccaaacgccctaccagttggaccctgcgaacatcactcttgaacccatggagatcaggacgttcctcgcctccgtccaatggaaagaagttgacggc

SEQ ID NO: 11572 - DNA, 3033 bp, Artificial Sequence
  derived and/or modified sequence
atgggagcatacgcacgggcaagcggtgtgtgtgcacgcggctgcctcgattccgcaggcccctggacgatgtccagagctttgcggccgcccctgccgccactgtgttttttcctgctgctccttgcagcagcgggtgcacgcgcgggaggctacgaaacctgccctactgtccagcccaatatgcttaatgtgcatctgttgccccacactcatgatgatgtgggatggcttaaaactgtggatcagtacttctatggtatcaaaaacgatatacaacatgctggagtgcagtacattctggactcagttatctcggctcttctggccgatccaactaggcgattcatatacgtcgaaattgctttctttagcagatggtggcatcaacagactaacgccacccaagaggtggtgcgcgacctggtccgtcaggggagactcgaatttgcaaatggcggatgggtcatgaacgatgaagcggctacccactatggagctattgtggatcaaatgaccctgggacttagattcctggaagatacttttgggaatgacggtcggcctagagtcgcatggcacatcgacccctttgggcattcgagagagcaggcaagcctgtttgcgcaaatggggttcgacgggttctttttcgggcggctggattaccaggataaatgggtgcgcatgcaaaagttggagatggagcaggtctggcgcgcaagcacctcacttaagccacctaccgccgatctgttcaccggagtgctgcccaacgggtacaacccaccaaggaatctgtgttgggacgtcctttgcgtggatcagccactggtggaggatcctcgatctccagagtacaatgcaaaggaactcgtcgactatttcctcaatgtggcgaccgcacaagggcggtactacagaaccaatcataccgtcatgaccatgggatcggattttcaatacgaaaatgcgaatatgtggttcaagaatcttgataagctcatccgacttgtcaacgcgcaacaggccaagggctcgtccgtgcacgtgttgtactccactcctgcatgttacctttgggaactgaacaaggcaaatcttacctggtcagtcaagcatgatgacttttttccttacgccgatggaccgcatcaattttggactggctacttttcttcacgaccagcccttaaacgctacgagagactgagctacaactttcttcaagtgtgcaaccagcttgaggcactcgtgggcctggctgcaaacgtgggaccatacggctcaggagatagcgccccacttaacgaggcaatggctgtcctgcagcatcatgacgccgtctctggaacttccaggcaacatgtggccaatgactacgcccgccagctggctgccgggtggggaccttgcgaagttttgttgtcgaacgcgcttgccagacttcgtgggtttaaggaccattttactttttgccaacagctgaatatcagcatctgtcccctctcgcagactgcagcaagattccaggtcatcgtgtacaacccacttggacgcaaggtgaattggatggtgcgactcccagtgtcggaaggtgtctttgtggtcaaagaccctaatggtcggaccgtgccctccgatgtggtcatttttccttcctcagattcacaagcccatcctcccgagctgctgttcagcgcatccctgccagcccttggcttttcaacgtattcagtggcccaggtccctaggtggaagccccaggcacgcgcaccacaaccaatacccagaagatcgtggtcgcctgcactgactattgaaaatgaacatattcgggcaactttcgaccctgataccggattgcttatggaaatcatgaacatgaatcaacaactgctcctccctgtgagacaaacttttttctggtacaatgcgtcgataggcgataatgaatcggaccaagcctccggagcatacattttcaggccaaaccaacagaagcctctccccgtgtcgcgatgggcacaaattcacctggtgaaaactccactggtacaggaagtgcaccagaacttctcggcatggtgctcccaagtggtcagattgtacccgggacagagacacctggaactggaatggtcagttggtcccattccggtgggagatacttggggaaaggaggtcatttcgcgctttgatactcctctcgaaacgaagggacgattttacaccgatagcaacggacgcgaaattctcgaaaggagaagagattacagacctacctggaagctcaatcaaaccgaaccagtggccggaaactactaccccgtgaatacccgcatttacatcactgatggaaacatgcagctgactgtcctgaccgatagatcccaaggagggtcatcccttagagatggatcgctggaactgatggtgcatagacgcctgctgaaggatgatggacgaggcgtgagcgaaccacttatggaaaacggaagcggggcttgggtcagaggtcggcacttggtgcttctggacacggcacaagcagcggcggcagggcaccgccttctggcagaacaagaagtccttgcaccacaagttgtgctggctccaggaggaggcgccgcgtacaacctcggagctcctccaagaactcagtttagcggccttcgacgcgacctgccgccctccgtgcacctgctgacccttgcatcgtggggccctgaaatggtgcttttgcgtttggagcatcaatttgctgtgggtgaggactccgggaggaacctctccgcacctgtcactctcaaccttagggacctgtttagcacttttactattacccggcttcaggaaaccacccttgtcgcaaaccagcttcgtgaggcagcttcccgtttgaaatggaccaccaataccggacctactccccatcaaaccccttaccaactggatcccgcaaacataactcttgaaccaatggagatcagaacgtttctggcgtcagtccaatggaaggaggtcgatggt

SEQ ID NO: 11573 - DNA, 3033 bp, Artificial Sequence
  derived and/or modified sequence
atgggagcttacgcccgggccagcggagtctgcgcgcgcggatgtttggattccgcggggccgtggaccatgagccgcgcactgcgccctccactgccgccattgtgtttcttcttgctgttgctggccgcggcgggagcccgagctggagggtacgagacttgcccaaccgtccagccaaacatgctcaacgtgcacctgttgcctcatactcatgacgacgtgggatggcttaagaccgtcgaccagtacttttacggcatcaaaaacgacatccaacatgcaggagtccagtacatcctggactcggtcatcagcgcgctgttggccgatccgacgcggcgctttatctacgtggaaatagcgttctttagccggtggtggcaccagcagaccaacgctacccaggaggtcgtcagagatcttgtgaggcagggacggttggagttcgccaacggtggttgggtgatgaacgacgaggccgctacccattacggcgcgatcgtggatcaaatgaccttgggactgagattcctggaggataccttcgggaacgatggacgaccccgggtggcatggcacatcgacccattcggccattcccgcgagcaagcatccctgttcgcccagatggggtttgatggattcttcttcggacggctggattaccaagataagtgggtccgcatgcaaaaactggagatggaacaggtctggcgggcgagcacctcgctgaagccccctaccgccgatctgttcaccggtgtcttgcccaatggctacaatccaccgagaaatctgtgttgggatgtgttgtgtgttgatcaacccttggtcgaggacccaagatccccggagtataacgccaaagagctggtggattacttcttgaacgtggcgaccgcacagggacggtactatcggactaatcacaccgtgatgaccatgggatccgatttccaatacgaaaacgctaatatgtggttcaagaatctggacaagctcatcaggctcgtcaatgcccaacaggcaaagggttcaagcgtgcatgtcctttatagcacccccgcctgctacctctgggagctgaacaaggctaacttgacttggtccgtgaagcacgatgacttctttccttacgcagatggaccgcatcagttttggactggatacttctcgtctcgtcctgctctcaagcgctacgaaaggctgagctataacttcctccaggtttgtaatcaattggaagccctggtgggactggcggccaatgtggggccatacggatcgggtgacagtgcccccttgaacgaagccatggccgtgctccaacaccacgatgctgtctcggggacttcaagacagcacgtggccaacgattacgcgagacaactggcggccggctggggaccgtgcgaagtgctgctgagcaacgccctggcccgcctgcgcggtttcaaagatcattttactttctgccagcagctgaacatcagcatatgcccgctcagtcagaccgcggctcgctttcaagtgatcgtgtacaacccgcttggccgaaaagtgaactggatggtgcggctgccggtgtccgaaggggtgttcgtggtcaaggacccaaatggccggactgtgccatcggatgttgtgatcttcccatcaagcgactcgcaggcccacccacccgaactgctgttttcagcgtccctgcctgcgcttggtttttcgacgtactcagtggcacaggttccgagatggaagccacaggccagagccccgcagccaatccctcggcggtcgtggtcgccggccctcactatcgaaaacgagcatatccgcgccaccttcgacccagacaccggactgctcatggagattatgaatatgaatcagcaactcctgctgcctgtgcgacagaccttcttctggtacaatgctagcatcggggacaacgaaagcgaccaggcttccggagcttatatctttcgtccaaatcaacaaaagcctctgccggtgtcacgctgggctcagatccatctggtgaaaacccccctggtccaggaagtgcatcagaatttctctgcttggtgcagccaagtggtgagactgtacccggggcaaagacacctcgagctggaatggtcagtgggccctatcccagtcggagatacttggggaaaggaagtgatctcaaggtttgacaccccgctggaaaccaaaggccgcttctacaccgattcgaacggcagggagatccttgagcgccgccgcgactacaggcctacctggaaactgaatcaaactgaaccggtcgccggcaactactatcctgtgaacaccagaatctacatcactgatggaaatatgcagctcaccgtgctcaccgatcgctcacagggcggatcgtccctgcgggacggatcactcgagctcatggtgcaccgccgcctcctgaaagacgacggtcgcggagtgtcagaaccgttgatggagaacggaagcggcgcgtgggtccgaggccgccacctcgtgctgctcgacaccgcccaagccgcggcggcgggtcatagactcctggctgaacaggaggtcttggcgcctcaggtggtcctggcgccgggaggaggcgcggcttacaatctgggggcgccgccgcggacccagttctcagggctgcgccgcgacctgcccccgagcgtgcacctcctcacccttgcttcgtggggcccagaaatggtcctcctcagactggaacatcagtttgcagtgggagaagattcaggaagaaacttgtcggccccggtcacccttaacctgcgcgacctgttctccactttcaccatcaccaggctgcaagaaaccactctcgtcgcaaaccagctgcgggaagccgcttcaaggctgaagtggaccactaacactggcccgactccacaccagactccttaccagcttgacccggcaaacattaccctcgagccgatggaaatccggactttcttggcgtcagttcaatggaaggaggtggacgga

SEQ ID NO: 11574 - DNA, 3033 bp, Artificial Sequence
  derived and/or modified sequence
atgggcgcatacgcgagggcttcaggagtgtgtgcccgcggttgccttgattccgcaggaccatggactatgtccagggcacttagacctcctcttcctcctctgtgtttcttccttctcctgcttgcagccgcaggggcacgcgctggtggttacgaaacttgtcctactgtgcagccaaatatgctgaacgtgcatcttcttcctcacacccacgatgatgtgggatggctgaaaactgtggaccagtacttttatggcattaagaatgacattcagcatgcgggagtgcaatacatcctggactcggtgataagcgccctgctggcagatccgacccgccgctttatctacgtcgagattgcgttcttttcgagatggtggcaccaacaaacgaacgccactcaggaagtcgtgagagatctcgtgcgccagggtaggttggaattcgccaacgggggatgggtcatgaacgatgaagcagcaacccactacggtgccatcgtcgatcaaatgacccttgggctgcgttttctcgaagatacctttggtaatgatggtagaccacgcgtggcatggcatattgatcctttcggtcactcccgcgaacaagcatcgctctttgcacagatgggctttgacggctttttcttcggtcgtctcgattaccaggataagtgggtccgcatgcaaaaacttgagatggaacaagtctggagagcgtccacctcactcaaaccaccaacggcagatctgtttacgggagtcctcccgaatggctacaacccacctagaaacttgtgttgggacgtgctttgcgtcgatcaacctctggtggaagatcctagatcgcctgaatacaacgctaaagagcttgtcgactacttcctgaacgtggcaaccgcacaagggcgctactaccgcaccaatcacactgtgatgaccatggggagcgacttccaatacgaaaacgcaaatatgtggttcaagaacctggacaagttgatccggctcgtgaacgcccagcaagcgaagggttcgagcgtacatgtgctgtactcaactccagcatgttacttgtgggagctgaataaggcaaatctgacttggtcggtgaagcatgacgactttttcccttacgcggatgggccacaccaattctggactggttacttctcctcccgacccgcactgaaacgctacgagagactgtcctacaactttctgcaggtgtgcaaccaattggaggcgctggtgggactggccgccaatgtgggtccgtacggatccggggattctgccccgctcaatgaagctatggcagtccttcagcatcatgacgcggtgtcaggcactagccgtcaacatgtcgcaaacgattatgcacgccagcttgcagccggatggggaccatgtgaagtccttctgtcaaatgcgcttgcacgactccgaggatttaaggaccattttactttttgtcaacaactgaacatttccatttgtcctcttagccaaaccgcagcacggttccaggtgattgtgtacaatccactgggccggaaggtcaattggatggtgcgcctcccggtgagcgagggcgtctttgttgtgaaagacccaaacgggaggactgtgcctagcgatgtcgtcatttttccatcatcagactcccaggcgcaccccccagaacttctcttctcagcctctctgccggcactcggcttcagcacctactccgtcgcacaggtgcctagatggaaaccacaagccagagcacctcaacctatcccgagaaggtcgtggtcgcctgcccttaccatcgaaaatgaacatattcgggccacgtttgatcctgatactggacttcttatggagatcatgaacatgaaccagcagctgctcctgcctgtccggcagacctttttctggtacaatgcttccatcggtgataatgaatcggatcaggcctccggagcatacatctttaggcctaaccaacaaaagcctctgcctgtgtcgaggtgggcgcaaattcatcttgtgaaaacgccacttgtccaggaagtgcatcaaaactttagcgcatggtgttcgcaagtcgtcagactgtacccaggtcaacgccatcttgaactggaatggtcggtcggacctatccccgtcggagatacgtggggaaaggaagtgatctcgcgattcgacacccccctggaaaccaagggtcgcttttacaccgactccaacggtcgcgaaatcctcgaacgccgccgtgattacagaccgacctggaaactcaaccagaccgagccagtggcaggaaactactaccctgtgaacactcggatttacattactgatggcaacatgcagctgacggtgcttaccgatcgttcccaggggggatccagcttgagagatggttcgctcgagcttatggtccatcgccgacttctgaaggacgacggaagaggagtgtcagaacctcttatggaaaacggttcgggtgcctgggtgagaggccgacatctggtcctgctggatacggctcaagcggcagcagccggccaccggcttctggcggaacaggaggtacttgcacctcaggttgtccttgcaccgggtggtggagccgcatacaaccttggagcaccacctcgcacccaattttccggactgagacgcgatctgccaccaagtgtgcatttgctcactcttgcatcttggggacccgaaatggtgctgctcaggctggaacatcaatttgccgtgggagaggattccgggcgaaatctcagcgcccccgtgaccctcaatttgagggatctcttcagcaccttcaccattaccagactgcaagaaaccactctcgtcgcaaaccaactgcgcgaagccgcatctcgacttaagtggaccactaacactggcccaaccccacatcagaccccgtaccaacttgatccagcgaatatcacccttgagcccatggagattagaacctttttggcctccgtgcagtggaaagaagtggatggt

SEQ ID NO: 11575 - DNA, 3033 bp, Artificial Sequence
  derived and/or modified sequence
atgggagcctacgctagggcctctggtgtgtgcgcccggggctgcctggactccgctggtccctggactatgtcgcgcgcgctgcgccctccgttgcccccgctgtgctttttcctgctcctcctggccgccgccggagccagggccggaggatacgagacttgcccgactgtgcagcctaacatgcttaacgtgcacctgctgccgcatacccatgacgacgtcggatggctcaagaccgtggatcagtacttctacggaatcaagaacgacattcagcacgcgggagtgcagtacatcctggattcggtgatctcggccctgctggctgacccgactagacgcttcatctacgtggagatagccttcttctcaaggtggtggcatcagcaaaccaatgccactcaagaggttgtgcgggacctggtgcgccaagggcggctggagttcgccaatggaggatgggtgatgaatgacgaggcggccacccactacggggctatcgtggaccagatgacgctgggtttgcgcttccttgaggacaccttcggcaatgacggcagaccacgggtcgcgtggcacatcgaccctttcgggcatagcagagagcaggccagcctgtttgcccagatgggttttgacggattcttcttcggtagactggactatcaagataagtgggtgcgcatgcaaaagctggaaatggagcaggtgtggcgcgcctcaaccagcctgaaaccgcctaccgcggacctctttaccggagtgttgccgaatggttacaatccgccgcgcaacctgtgctgggatgtcctgtgcgtcgatcaaccgcttgtcgaggacccacggtcacctgagtacaatgcaaaggaacttgtggactacttccttaacgtcgcgactgcgcagggacgatactacagaaccaatcacactgtcatgactatgggatccgacttccagtacgagaatgcaaacatgtggtttaagaatctggacaagttgattaggttggtgaatgcgcagcaagcaaagggatcgtcggtgcacgtgctctacagcaccccagcctgttacttgtgggaactgaataaagcaaacctgacgtggagcgtgaagcatgacgacttctttccatacgccgacggacctcatcagttctggactggttacttctcgagccggcccgcacttaagcggtacgaaagactgtcgtacaatttcctccaggtctgcaaccagctcgaggcactcgtgggcctcgcggcgaacgtcggtccctacggaagcggcgattcagcgccgttgaacgaagccatggccgtgcttcagcaccatgacgcggtcagtggaaccagccggcagcacgtggcgaacgattatgccagacaactggccgctgggtggggaccatgtgaagtgctcctctccaatgccctcgcccgattgcggggcttcaaggaccatttcaccttctgccagcaacttaacatctccatctgccctctgtcccaaaccgcggccaggtttcaagtgatcgtgtacaacccgttgggacggaaagtgaattggatggtgcggctgcccgtctcggagggggttttcgtggtgaaggatccgaatggacggaccgtcccgtcagatgtcgtgattttcccatcgtcggactcgcaggcccatcctccggagctcctgtttagcgcttcattgccagcactcggattctccacctacagcgtggcccaagtcccccggtggaagcctcaagcccgggctccacagcctatcccacgcagatcgtggtcacctgccctgactatcgaaaatgaacatatccgggctaccttcgacccagacaccggattgctcatggagatcatgaacatgaaccagcagctgctcctgccagtgagacagacctttttctggtacaacgctagcattggtgacaacgaatccgaccaggcgtcgggcgcctacatctttcgccccaatcaacagaagccactgcctgtgtccaggtgggcccaaattcacctggtgaaaacccccctggtgcaggaagtgcatcagaacttttcggcctggtgcagccaggtggtcagactttaccccgggcagcggcatctggaattggaatggtccgtcggcccaatcccggtaggagacacctggggtaaagaggtgatctcgcgcttcgataccccgctggagactaaaggccggttctacaccgactcgaacggacgggaaatcttggaacggagacgcgactaccgaccgacttggaaactgaatcaaaccgagccggttgctggaaactattacccggtgaacacccgcatctatatcacggacgggaacatgcagctgactgtgctgactgaccggtcccaaggaggctcttccttgcgcgacggctcgctggagcttatggtccaccgcaggctgctcaaagatgacgggaggggcgtgtcggagccgctcatggagaacggctcgggtgcctgggtgcgcggaaggcatctggtgctcttggacaccgcgcaggccgccgccgccggccaccgtctgctcgccgaacaagaggtcctggctccgcaagtggtgctggcaccgggcggtggagcagcctacaatctcggcgccccgcctcgcactcaattctcgggcctccggcgggacctgccgccttcggtccatttgctcactcttgcgtcatggggaccggagatggtcctcctgagactggaacaccagttcgcggtgggagaagattcaggaaggaatctgtcagcccccgtgactctgaacctccgtgatctgttctccactttcactattaccagactgcaggaaaccaccctcgtcgccaatcagctgcgcgaggcagcttccaggctgaagtggacgacgaacaccggacccaccccgcaccaaaccccttaccagctggatcctgccaacatcaccctggaaccaatggaaattcggacttttctggcatcagtgcaatggaaggaagtggatgga

SEQ ID NO: 11576 - DNA, 3033 bp, Artificial Sequence
  derived and/or modified sequence
atgggggcctacgcccgtgcctctggagtttgcgcccgcgggtgtctagattcggcgggcccgtggaccatgtcccgtgctctgcgccctcccctaccacccctgtgtttctttctgctgctgcttgcggccgctggggcccgcgcgggaggatatgaaacttgcccaacggtccaacctaatatgctcaacgttcatctccttcctcacacacatgacgatgttggctggttgaaaacagtcgaccagtacttttacgggattaaaaatgacatccagcacgccggggtgcaatacattttggattccgtgatttccgctttgcttgccgaccctacccgaagatttatctacgtggaaatagcttttttctcacggtggtggcatcagcaaaccaatgcgacgcaggaggtggttcgcgatttagttcgccagggcagattggaatttgccaacggcggctgggttatgaacgatgaggcagccacacattacggagccattgtggaccagatgactctcgggttaagatttctcgaggacacatttggaaatgacggcaggcctcgggttgcctggcatattgacccattcggccacagccgcgagcaggcatcactgtttgcccaaatgggttttgacgggttcttttttgggcgtttggactaccaagacaagtgggtaaggatgcagaaattggaaatggagcaggtatggagggcttcaacatccctgaagccacccacagccgatctgtttactggcgtgctgccaaatgggtataacccccctcgtaatctgtgttgggatgtgctttgcgttgatcagcccctggtggaggatcctagatcccccgaatacaatgccaaggagctcgtcgactatttcctgaacgtagctacggcgcaggggcggtattacaggacgaaccataccgtgatgaccatgggtagcgactttcagtacgagaatgccaatatgtggttcaaaaacttggacaaactgattcgccttgtgaacgcacaacaagccaaaggctccagcgtccacgtcttatactccacacctgcttgttacctctgggagctcaacaaagccaatctgacctggagtgtgaaacacgacgatttctttccgtacgccgacgggcctcatcagttttggaccggatatttcagctcccggcctgcactcaagcggtacgaaagattatcttataatttcttgcaagtttgcaatcagttagaagcgctggtcggattggctgccaatgtgggcccatacggcagcggtgattcagcgcctctgaatgaagctatggcagtgctacaacatcatgacgctgtctccgggactagtcggcagcatgtggcgaacgattatgcacgccagctggccgctggatggggcccatgcgaagtactgctttctaatgctctcgcacgtctccgggggtttaaagatcactttactttctgtcaacagttgaatatcagcatctgccctctaagccaaaccgctgctagattccaggtcattgtgtacaacccactgggtaggaaggtgaactggatggtgcgccttcccgtctccgagggggtgtttgtcgtgaaagaccccaacggtaggaccgttccgtcagatgtggtaatattcccgtcctctgattctcaggctcatccgcctgagctactgtttagcgctagtttaccagccctgggattcagtacttattccgtcgcccaagttcctcggtggaagccgcaagctagggcaccacaaccaattcccaggcgtagctggagccctgccctgaccatcgagaatgaacacatccgagctacattcgaccccgacacaggtctgctgatggagatcatgaatatgaaccagcaacttctgctccctgtcaggcagacatttttctggtacaatgcctccataggggacaatgagtcggatcaagcatcaggtgcttacattttccggcccaatcaacagaagcccctgcctgtctcacggtgggcccagattcatctggtgaaaactcctcttgttcaggaagtgcatcagaacttctccgcctggtgcagccaagttgtgcgcctgtatccgggccaaaggcacctcgagctcgagtggagcgtggggcccatacctgtaggtgatacctggggaaaggaggtaatatcccggttcgacaccccattagagacaaagggcaggttctacacagatagcaatggaagagagattctggagcggcggcgggattaccgccctacctggaaactaaaccaaacagagccggtggccggcaattattatcctgtcaacacccggatctatattacagacggaaacatgcaacttacagtgctcacagatcgttctcaggggggatcaagtctgcgagacgggtcactcgagctgatggtgcacaggagactcctcaaggatgatggcaggggggtgtccgaaccactcatggagaacggttctggggcctgggtgagaggaaggcacctagtgctgttggatacggctcaggcggccgccgccggtcataggctcctcgctgagcaggaggtgttagctccccaggtcgtcctggctccgggtggaggggccgcttataatttaggcgcaccccctaggacacagtttagcggtctacggcgagacctgccaccatcggtgcatctactgactctggcttcttggggaccagagatggtcctgctgaggttggagcatcagttcgccgtgggcgaggactccggtcgaaatctgtctgcgccagtgacgctaaatttgcgcgatctttttagcacattcacaattacccgcctgcaggagaccaccctcgtcgccaaccagctcagagaggcggcttctcgcttgaagtggaccacgaacactggccccaccccacaccaaactccttatcagctggaccctgccaacattaccctggagcccatggagattcggacgtttctggccagtgttcagtggaaagaagtggatgga

SEQ ID NO: 11577 - DNA, 3033 bp, Artificial Sequence
  derived and/or modified sequence
atgggagcttatgcccgagcctcaggcgtgtgcgcccgcggttgtctcgacagtgcggggccgtggactatgtctcgggctctgcggccccctttgcctccattgtgcttcttcctgctcttactggcagcagctggggctcgagcaggcgggtacgaaacctgccccacagtccagccaaatatgctgaatgtgcacctgctcccacacacccacgatgacgtggggtggctgaaaacagtcgatcagtacttctacgggatcaaaaacgacatccagcacgccggcgtccaatacatactggattcggtgattagcgccctgctcgccgaccctacacgaaggttcatctacgtagaaattgcgttcttctcccggtggtggcatcagcaaactaatgcaactcaggaggtcgtccgggacctggtgaggcaagggagactcgagttcgccaacggagggtgggtgatgaatgatgaagccgccacacactacggtgccattgttgatcaaatgacccttgggctaagattcctggaggatacatttgggaacgacgggcgcccccgggttgcatggcacatcgatcctttcggacactcacgagagcaggcgtctttgttcgcccaaatgggctttgatgggttctttttcggaaggctcgactatcaggataagtgggttaggatgcagaagctggagatggagcaggtttggagagccagcaccagccttaaaccacctactgccgatctctttaccggagtgctgcccaacgggtacaatcctccccggaacctatgttgggacgttctgtgcgtggatcagcccctagtggaagatccccgttctccagaatacaacgcaaaggagctggtggactacttcctgaatgtggctaccgctcagggaagatattatcggaccaatcacaccgtgatgacgatggggagcgattttcagtatgagaacgccaacatgtggttcaaaaatctcgacaaactgatccgcttggtgaacgcgcagcaggccaaaggttccagtgtgcatgtgctgtatagcacccccgcttgttatctgtgggagctgaacaaggctaacctgacatggtctgttaagcacgatgatttcttcccatatgcagatgggccacatcagttttggactggttatttcagttcacggccagcacttaagaggtacgagcggctctcctacaattttttgcaggtctgcaatcaattggaggctctggtcggactcgcagccaacgtgggaccctatggatctggcgattccgctcccctcaacgaggccatggcagtactacagcaccacgatgctgtttccggtacctctcgccagcatgttgctaacgactatgcccgccagctggccgccggatggggcccttgtgaagtccttctgtccaatgctcttgctaggctgcgagggtttaaagatcacttcaccttctgtcagcagctcaacatcagtatttgccccctgtctcaaactgcggctagattccaagtaatcgtgtataacccgcttggtcgcaaagtgaactggatggtgcgattgcctgtgtcagagggagtgttcgtcgtcaaagaccccaatggtaggacagtgccatcagatgttgtgatcttccctagctctgactcacaggcccaccccccggagctactgttcagcgcgtccctgcctgccttgggcttttcaacttactctgttgcccaggttccacgctggaaaccacaggctagagcaccccagccaatccctcgaagatcttggtcaccggctctgacaatcgaaaatgagcacatcagagccaccttcgatccagacaccggcctcctgatggagatcatgaatatgaaccagcaactcttgctccccgttagacaaacttttttttggtataacgcctccatcggtgacaatgagtctgatcaggccagtggcgcctacattttcaggccaaatcaacagaagcctctccctgtgagccgctgggcccagatccatctggtcaagaccccattagtgcaggaggtgcatcagaatttctccgcctggtgtagccaggtagtacgcttgtatcctgggcagcgccacctcgagctggagtggagcgtgggaccaatccctgttggggatacctgggggaaagaagtgatctcaagatttgacactccacttgaaacaaagggccgtttctatacggattcaaatgggcgggagatcctcgagaggagacgtgattaccgcccaacgtggaagctgaaccaaaccgagccagtcgcgggcaattattatccggtgaataccagaatttatataacagacggaaacatgcagctgaccgtgctcaccgacaggagccagggaggctcttcacttagggatggcagtctggagctaatggtgcatcgaagattgctgaaagatgatggaaggggcgtgtctgaaccccttatggagaatggctctggcgcctgggtgcgaggaagacacctggtcctgctcgacacggcccaggcagccgccgctggccacaggcttctcgcagaacaagaagttttagctcctcaagttgtgttagcccccggaggcggggctgcctataatttgggggccccgccaaggacccagttttcaggcttgaggcgggacctgccccctagcgttcatctgctaaccctggcctcctgggggcctgagatggtcctcctaaggctggaacatcagtttgccgtgggagaagatagcggaaggaatctgagcgcgcccgttacgctgaatctacgagaccttttctccactttcactatcacccgtttacaggaaacaacactggtggccaaccagttgagggaggctgctagtcgactgaagtggacgaccaacacagggcctacaccccatcagacgccatatcaattagaccccgccaatatcacattggagccgatggaaattcggacatttttagcttctgtgcaatggaaggaggtggatgga

SEQ ID NO: 11578 - DNA, 3033 bp, Artificial Sequence
  derived and/or modified sequence
atgggggcatacgctcgagcaagcggcgtgtgtgctagggggtgtctggacagtgctgggccgtggaccatgtctagagctctccggccgccacttcccccattatgcttcttcctgttgcttttggccgcagcaggagcgcgggccgggggttacgaaacctgccccacagtacagcctaacatgttaaatgttcacctgctccctcacacacacgacgacgtcggatggctgaagaccgtggatcagtatttctatggaatcaaaaacgatattcagcacgccggcgttcagtatatccttgacagcgtgatttcggccctgcttgccgatcctacgcggagattcatctatgtagagattgccttcttttcacgctggtggcaccaacagactaacgccacccaggaggtggtccgggatctggtgaggcaaggacgactagagttcgcaaatggcggttgggttatgaatgatgaggccgctacgcactacggggcaattgtggaccagatgaccctggggctgcggtttctcgaggacaccttcggaaacgatggccggccgagggtggcctggcacatcgacccctttggacacagtagagaacaagcttcattattcgcccaaatggggttcgacgggttttttttcgggcggctggattatcaagacaagtgggtgagaatgcagaagctggagatggaacaggtgtggcgtgccagtacatcgctcaagcctccgaccgcagacctgttcaccggagtgttgcctaacggttacaatccaccacgaaatctgtgctgggacgtcctttgcgtagaccagcccttagtcgaagacccaagatcccctgaatataacgccaaagagctggttgactattttttgaatgtagctacagctcaggggagatattacaggactaatcacacagtgatgacgatgggctcagacttccaatatgaaaatgctaatatgtggtttaagaatctggataagcttattagactggtgaacgctcagcaggccaagggctcttcggtgcacgttttatatagtacgcctgcctgttatctgtgggagctcaataaggccaatctgacgtggagcgtgaagcatgatgacttcttcccttacgccgatggaccgcatcagttctggaccggttactttagctctcgccctgctttgaaacgatatgaaaggctttcctacaactttctgcaggtgtgcaatcagctcgaggcgctggtgggacttgccgcgaatgttggcccatatggctcgggagattccgctccacttaacgaggccatggctgtcctccagcatcatgatgccgtctccgggacatccaggcaacacgttgccaacgactacgccagacagctggcagccggttggggtccatgcgaggtgctgctgagcaatgcgttggcacggctccggggctttaaagaccatttcactttctgtcagcagttgaatatttctatctgtccgttaagccagaccgctgctcgcttccaggtgattgtgtacaatcctctgggacgcaaggttaattggatggtacggctccccgtgagcgagggagtattcgtcgtaaaagatcctaatggaaggactgtgcccagtgatgtggttatctttccttcgtctgactcacaggctcatcccccggagctgctgtttagtgcctccctgcccgcgttgggcttctctacgtatagcgttgcccaggtgcctaggtggaaaccccaggcacgggcccctcagcccattccaagacgctcctggtcaccagcgctcacaattgagaatgaacacatccgagcaactttcgaccccgacaccggccttctgatggagatcatgaatatgaaccagcagctcctcctgcccgttaggcagactttcttttggtacaatgcgagcatcggtgacaacgagtcagaccaggcttccggtgcctacatttttaggcctaatcagcagaaacctctgcccgtctccagatgggcacagattcatctcgtgaagacccccttggtgcaggaggtgcaccagaacttctccgcttggtgttcacaggtagtcaggttatatccaggacagaggcacctggagttggaatggtcagtggggccaattccagtaggggacacatggggtaaggaggtgatctccagatttgataccccgctggagaccaaaggacgcttttatacagacagtaacgggagagaaatactagagcggagaagagactaccgtcccacatggaagctgaaccagacagagccagtggcaggcaactactatcctgttaacacacgcatatatatcaccgacggcaacatgcagctgacagtactgactgatagatctcagggcggttcttccctgcgggacggatctctggaattgatggtgcaccggcgcctgctcaaggatgacggaagaggcgtctctgagcctctgatggaaaatggcagcggcgcatgggtccgtggccgacatctagtccttttggacacggcccaggctgccgcagctggccaccgactgctggcggagcaggaggtgctggcaccacaagttgtcttggccccgggaggtggggctgcctacaatttgggggcaccacctaggactcagttcagtgggcttcgtcgcgacctcccacccagcgtgcacctgctcacactcgcctcttgggggccagagatggtactgttaagattggagcaccagttcgctgtaggagaagattcagggcgaaaccttagtgcgccggtgactctgaaccttagagacctgttctcgacgttcaccattacccgccttcaagaaaccacattggtggccaatcagctgcgggaggcggcgagtcggcttaagtggaccacaaacaccggtcccacacctcaccagaccccgtaccagttggatccggctaatatcacccttgaacctatggaaatcaggacatttctggcaagcgtccagtggaaggaggttgatgga

SEQ ID NO: 11579 - DNA, 3033 bp, Artificial Sequence
  derived and/or modified sequence
atgggtgcgtacgctcgtgcatctggggtctgtgcaaggggatgtctggattcagcggggccttggactatgagccgtgctttgcgccctccattgccaccactctgttttttccttcttctgctggcagcagcaggtgcacgcgccggaggctacgaaacctgccctactgtgcaaccaaatatgctgaatgtgcatctgctgccccatacccatgatgatgtgggttggttgaaaactgtggatcagtacttttatggcattaagaacgatattcaacatgcgggcgtgcagtacattctggacagcgtgatttccgcactcctggcagatcctactcggcgtttcatttatgttgaaattgccttcttttcccggtggtggcatcaacagaccaacgcaacccaagaggtcgtgagagatctggtccgccaaggacgactggaattcgcaaacggaggttgggtcatgaacgacgaggccgcaactcattacggggcaattgtggatcaaatgaccctggggctccggtttcttgaagatacttttggaaatgatggacggcctcgagttgcatggcacattgaccccttcggccattccagggaacaagcgtccctgtttgctcaaatgggattcgacggatttttcttcggaaggctcgattaccaagataagtgggtgagaatgcagaaactggaaatggaacaggtgtggcgcgcttcgacttccctgaagcctcccactgctgacctttttactggtgtgctgcctaacggctacaacccacctagaaacctgtgttgggacgtgctctgtgtggaccagcccctggtggaagatcctcggtcccctgagtacaacgcaaaggaacttgtcgactactttcttaatgtggcaactgcccagggaagatactaccgcactaaccatactgtcatgaccatgggatcggatttccaatacgagaatgcaaatatgtggttcaagaacttggacaagctcattcggctggtgaatgcacagcaagcaaaaggatcaagcgtgcatgtcctctactcgaccccagcatgctacctttgggaactgaataaggcgaatcttacttggagcgtgaagcatgacgatttcttcccttatgcagatggacctcaccaattttggaccggttacttttcctcacggcctgcacttaaacgctacgaacgcctgtcatataactttctccaggtgtgtaaccaacttgaagcacttgtgggccttgcagcaaacgtggggccatacggttcgggcgattctgcaccacttaatgaagcaatggcggtgctccaacatcatgatgcagtgtcgggaacctcgcgccagcatgtggcaaatgactatgcgagacaactcgcagcagggtggggtccttgtgaagtgctgctttccaacgctctggcgcgcctccggggatttaaggaccatttcaccttttgtcaacaactgaacatctccatctgtcctctgtcgcagactgcagccagatttcaggtcatcgtgtataacccccttggaaggaaagtgaactggatggtgagactgcctgtgtccgaaggagtctttgtggtgaaggaccctaatggccgaactgtcccatcagatgtggtcatatttccctcgtcggacagccaagcccatccgcctgaacttcttttctcggcaagcctgcccgcgctgggtttttcgacctacagcgtggcacaagtccctagatggaagccacaggcacgggccccacaacctattcctagacgctcgtggagccctgcgctgactattgaaaatgaacacatcagagccacctttgacccagataccggacttctcatggagatcatgaatatgaatcaacagcttctgctgcccgtgcgacagactttcttttggtacaatgcatcgatcggcgacaatgaatctgatcaagcctcgggtgcttacatcttcagacctaaccaacaaaagccattgccagtctcgcggtgggcgcaaatacatctggtgaaaactccgttggtgcaggaagtccaccaaaacttttcagcatggtgtagccaggtggtgcgtctgtaccctgggcaacggcatcttgagctggaatggtccgtgggtcctatccctgtcggagatacctggggtaaggaagtcatttcaagatttgacactccactcgaaaccaagggacgtttctacaccgattcaaatggaagagaaattcttgagagaaggcgggattaccgccccacttggaaactgaaccaaaccgaaccagtggccgggaattactaccctgtcaacaccagaatttacattaccgatggcaacatgcagcttaccgtgcttactgatagatcacaaggaggatcgtcgcttcgggacggatcgcttgaactgatggtgcaccgacgtctgctcaaggacgacggacgcggagtgagcgaaccgctcatggaaaacggttccggtgcatgggtgagaggccggcatctggtcctccttgacactgctcaagccgcggcagcaggacaccggctcctggccgaacaggaagtgctggcaccacaggtggttctcgcacctggaggtggcgcagcatacaatctgggagcgcctccacggactcagttttccggtctgcgcagggatctccccccatcagtgcatctcctgactttggcatcgtggggacctgaaatggtgctcctccggttggagcatcaatttgcggtgggagaagattccgggcggaatctgtcagcccccgtgacgcttaaccttcgcgacctcttttccaccttcactataactcgtctccaggaaacgaccctggtcgcgaaccaactgcgggaagcagcatcccgactcaagtggaccactaacaccggtcctaccccccaccagaccccataccaacttgatcctgccaatatcacgctcgaaccgatggagattaggacgtttctcgcgtccgtccaatggaaggaagtggatggt

SEQ ID NO: 11580 - DNA, 3033 bp, Artificial Sequence
  derived and/or modified sequence
atgggagcctatgcgcgcgcgtcaggggtgtgtgcgcgcggttgcctggactccgccggcccgtggactatgtcgagggcacttcggccgccgctgcctcccctctgcttctttcttctgttgttggccgccgccggggctcgggcgggtggatatgaaacctgcccgaccgtccagcctaacatgctcaacgtgcacctgctgccacatacgcacgatgatgtgggttggttgaaaactgttgatcaatacttctacggaatcaagaatgacatccagcacgcaggagttcaatacatcctggattccgtaatttccgcactgttggctgatccgactcgccgcttcatctacgtggaaatcgccttcttctcccgctggtggcatcagcagacgaatgccacccaagaagtggtgcgggacctggtccggcaggggagactggaattcgccaacggcggatgggtcatgaacgacgaagcggccactcactacggcgcaatagtcgaccaaatgaccctgggacttcgcttcctcgaggatactttcggaaatgacggacgccctcgagtcgcctggcacattgacccgtttggacactcccgggagcaggcctctctgtttgcacagatgggattcgacggctttttcttcggacgcctggattaccaagacaaatgggtccgcatgcagaagctggagatggaacaggtgtggagagcgtcgacctcgctgaagccaccaacggcagacctctttactggcgtgctgcctaacgggtacaacccgccgcgcaatctgtgttgggatgtgctgtgcgtcgatcagccgcttgtggaagatcctcgctccccggaatacaacgcgaaggagctcgtggattactttctgaacgtggctacggcccaggggcggtactaccgcaccaaccacactgtcatgaccatgggaagcgacttccagtacgagaatgcaaatatgtggtttaagaacctcgataagctcatcaggcttgtgaacgcccagcaagccaagggctcgagcgtgcatgtgctgtactccaccccggcatgctacctctgggagttgaacaaggcaaatctgacctggagcgtaaagcatgatgatttctttccctacgcggacggaccgcaccagttctggaccggatatttctcatcgcgacccgccctgaagcgctacgagaggctgagctacaatttcttgcaggtttgcaatcaactggaggcccttgtcggattggccgcaaacgtcggtccatacggaagtggcgactcggcacccctcaatgaggccatggcggtgctgcaacatcatgacgcagtgagcgggacctcccggcagcatgtggcgaacgattacgcgcggcagctggcggccggatgggggccgtgcgaggtgctgctctccaacgccctcgcacgcttgcgaggcttcaaagaccattttaccttttgtcagcaactcaacatatcgatttgccctctgagccaaactgctgccagatttcaggtgatcgtctacaatcctctgggaagaaaggtgaattggatggtgcgtctcccggtgtccgaaggcgtgttcgtcgtcaaggacccaaatggcaggactgtgccatctgatgtggtgatcttcccgtcgagcgactcacaggctcacccaccggaactcctgtttagtgcctccttgcccgctctgggtttctccacctattctgtggcccaggtgccgcggtggaagccacaggcccgcgccccacaaccgatccctcggcggagctggtcgccggccctgactatcgaaaacgagcacatcagggcgaccttcgatcctgacaccggccttctcatggaaatcatgaacatgaaccagcagctgctcctcccagtgagacagactttcttttggtacaacgcctcaattggagacaacgaatcggaccaggcttcgggtgcctacatcttcagacccaatcagcaaaaaccgctgccagtctccaggtgggcacagatccacttggtaaaaaccccgctggtccaggaggtacatcagaacttctcggcgtggtgcagccaagtggtgcgcctttaccccgggcagagacatcttgagttggaatggtcggtgggtccaatcccggttggagacacttggggaaaggaggtgatctcacgcttcgacaccccccttgaaaccaagggtagattctacactgactcgaacggccgagaaatcctcgaacggcgtcgcgactacagaccgacctggaaactgaaccaaactgaaccagtggctgggaactactaccctgtgaatactcggatctacattacggatggcaatatgcaactgaccgtgttgactgatagatcacagggcggaagctcgctcagggatggctccctcgagctgatggtgcaccgtcggctgttgaaggatgacggtcgaggggtgtcagaaccgctcatggaaaatggatcgggggcgtgggtgcggggcagacacctcgttctcctcgacaccgctcaggcggccgcagcaggacaccgcctcctggcggagcaagaggtcctggccccacaagtggtccttgctccgggaggtggagcggcttacaatctgggagcgccaccacggactcaattcagcggactccggagggacctgccgccttcagtgcatctgttgaccctggccagctggggaccagagatggtacttctgcggttggaacaccagttcgcggtgggagaggactcaggaaggaacctctccgctcctgtcactctcaacctgcgtgaccttttctccactttcactattacgagactgcaggaaacgacgctcgtcgctaaccaacttcgtgaggccgcttcgcgcctgaaatggaccactaatactggccctaccccccaccaaactccgtatcaactcgacccggccaacatcaccctcgagccaatggaaatcagaaccttccttgcatccgtgcagtggaaggaagttgatggg

SEQ ID NO: 11581 - DNA, 3033 bp, Artificial Sequence
  derived and/or modified sequence
atgggagcatacgccagagcatcaggtgtgtgcgcccggggatgccttgactcggcaggaccgtggaccatgtcgagggcgctcagacctccgttgcccccgctgtgtttcttcctgctgttgcttgcagcggccggggccagagcaggtggttacgaaacctgcccgactgtgcaaccaaacatgctgaatgtccatctcctcccacacacgcatgacgatgtgggatggctcaagactgtggaccagtacttttacggaatcaaaaatgacatccagcatgccggggtgcagtacatcctcgactcagtgatctccgcacttttggcagatccaacgcgacggttcatctacgtggaaatcgcttttttctcgcggtggtggcatcaacaaactaacgccacccaggaggtggtgagggacctcgttagacaaggccgcctggagttcgctaacggaggatgggtgatgaacgatgaggcggccacccactatggggctatcgtggatcagatgactctggggctccggttcctcgaggacactttcggcaatgacggccgcccgcgggtcgcctggcatatcgaccccttcggtcacagcagggagcaagcctcgctgttcgcccaaatgggattcgatggatttttcttcggacgcctggattaccaggacaagtgggtgcggatgcagaagttggagatggaacaggtgtggcgggcttccacttcccttaagccccctaccgcagatctgttcactggagtccttccaaatggctacaatccacctcgcaacctgtgctgggacgtgctctgcgttgatcaaccactggtggaggacccccgctcgccggagtacaacgcgaaggaattggtcgactacttcctgaacgtggccactgcccagggaaggtactaccggactaaccacactgtgatgacgatgggctcagatttccagtacgaaaacgcgaatatgtggttcaaaaacctggacaaactgatccggctggtgaacgcgcaacaggcgaagggatcgtcggtgcacgtgctttactccactcctgcttgctatctgtgggaacttaacaaggcgaatcttacctggtcagtgaagcacgatgacttttttccgtacgctgacggccctcaccaattctggaccgggtatttcagctcccggccggccctgaagcggtacgaaaggctctcgtacaactttctgcaagtttgcaaccagctggaggctttggttggactggctgccaacgtgggcccgtacggctcgggcgactccgctccgctcaacgaagcgatggccgtgctgcagcatcacgatgccgttagcggaacctcgagacaacacgtggccaacgattacgcccgccaactcgctgccggatggggaccgtgcgaggtgctgctgtctaacgctctcgcacgcctgcgcggtttcaaggaccatttcactttctgccaacagctgaacatcagcatatgcccactctcccagactgccgccagattccaggtgatcgtgtacaacccgctgggcagaaaggtgaattggatggtgcgcctgccggtgtccgaaggagtgttcgtggtgaaggacccaaacggccggaccgtgccatccgacgtcgtgattttcccgtcatcggatagccaggcgcatccgcctgagctgctcttttcggcatcgctgccagcgctcggatttagcacctactcagtggcccaagtgccgcggtggaagccgcaggcacgggcaccgcaaccgatccctagaagatcatggtcgccagccctgactattgagaacgaacatattagggccacctttgacccggataccggcctgttgatggaaatcatgaacatgaaccagcaactgctcttgcccgtgcgccagacgtttttctggtacaacgcgtccatcggcgacaacgaaagcgaccaagcgtccggagcgtatatctttagacctaatcaacaaaagccacttccagtgagcagatgggctcaaatccaccttgtcaagaccccgctggtccaggaagtgcaccaaaacttctcggcctggtgctcacaagtggtgcggctgtacccgggacaaaggcatctggaactggagtggagcgtcggaccaatcccggtgggcgatacctggggtaaggaagtgatcagccggttcgacacccctcttgaaactaagggacgcttttacactgatagcaatgggcgtgaaatcctggagcggcgccgcgactacagacccacttggaagctcaaccaaacggaacccgtcgccggcaattactaccctgtcaacacgcgcatttacatcaccgatggaaatatgcagctgacggttctgaccgaccgatcgcagggcggatcatcattgagagacggctcccttgagctgatggtccataggagactgctcaaggatgacggacgcggtgtgtccgaaccgctgatggaaaacggctcaggggcatgggtgcgcggacggcacctcgtcctcctggacaccgcacaggccgccgctgcaggccaccggctcctggccgaacaagaggtcctggcgcctcaggtggtgctcgcaccaggaggaggggcggcctacaacctcggggccccgccgcgcacccaattctcgggactgaggagggatctcccgccatccgtgcacctcctgactctggcatcctggggccccgaaatggtgctgttgagactggagcaccagttcgcggtcggggaggacagcggacgcaacctctccgcaccagtgactctgaatctgcgggacctcttctcgactttcaccatcactaggctgcaagaaaccacccttgtggccaaccaactgcgggaagcagcatccagactgaaatggaccacgaataccggcccaactccacaccaaaccccataccagttggatccggcgaacattaccctggagccgatggagatcaggacctttctggcctccgtgcagtggaaagaagttgacggg

SEQ ID NO: 11582 - DNA, 3033 bp, Artificial Sequence
  derived and/or modified sequence
atgggagcctatgctcgcgcttctggcgtctgtgccaggggatgccttgactcagctggcccttggacaatgtctagggctttgcgcccccccttgccccctctgtgtttttttctcctgttgctggctgccgctggcgctagggccggtggatacgaaacctgcccaactgtccaacccaacatgctgaacgtgcacctgctgcctcatacacacgacgatgtgggttggctcaagacagtggaccagtatttctacggtatcaagaacgatatacagcatgctggagtgcagtacatcctggactctgttatatccgctttgctggctgacccaaccaggagattcatatacgttgagatcgctttcttttccagatggtggcatcagcagactaacgccacccaggaggtcgtacgtgacctggtccgccaaggcagacttgagttcgctaatggtggctgggtcatgaacgacgaggctgctacacactacggcgcaattgttgaccagatgactctcggtcttcgtttcctcgaggatacctttggaaatgatggacgcccccgtgttgcatggcacatcgatcctttcggccattctagggaacaggctagcttgttcgcccagatgggattcgacggttttttcttcggccgtctggattaccaggacaaatgggtccgtatgcagaaactggaaatggaacaggtgtggcgcgccagcacaagcctcaaacctcccactgccgacctgtttactggcgtcctgcctaacggttacaaccctcccaggaacttgtgttgggatgtgctgtgcgtagatcaacctctcgtcgaggatcccagatctcccgaatacaatgctaaggagctggtggactattttctgaatgtggctaccgcccaaggtaggtactacagaacaaatcacactgttatgaccatgggatcagacttccaatacgaaaacgctaacatgtggtttaaaaaccttgacaagctcatcaggctggtaaacgctcaacaggctaagggctcatccgtccatgtgctctattccactccagcttgctacttgtgggaactcaataaggccaacttgacctggtctgttaaacatgatgacttcttcccatacgctgatggcccccaccagttctggaccggttacttctcctcacgccctgctctgaagcgttatgagagactgagctataacttcctgcaggtgtgtaatcagctggaagccttggttggtctcgccgctaacgttggaccttatggaagcggcgacagcgcacccctgaacgaggctatggcagtgctgcaacatcacgatgcagtttcaggcaccagcaggcagcacgtggccaacgattatgcacgtcaattggcagccggatggggtccatgtgaagtgctcctgtccaacgccttggcaaggctgcgtggattcaaggatcacttcaccttctgccagcaactgaatattagtatctgccctctctctcagacagcagcaagattccaagtcatcgtatacaatccactgggaaggaaagtgaactggatggtgaggctgccagtttcagagggcgtctttgtggtcaaggaccccaacggtcgtactgttccatccgacgtggtcattttccccagtagcgattctcaggctcacccccctgaactgctgttctcagcctctctgcccgcattgggctttagtacctattccgtggctcaagtcccccgttggaagccacaggcaagagctccccagcccatccccagaaggtcctggtcacccgcccttacaatcgagaatgaacacatcagagcaacctttgacccagacaccggtctcttgatggagattatgaatatgaaccagcaattgctcctccctgtgagacagaccttcttttggtacaacgcctccattggtgacaacgaaagtgatcaggccagtggtgcttacatcttcagacctaatcagcagaagcccttgcccgtctctaggtgggcacagatccatctcgtcaagacacctctggtacaagaggttcaccagaatttcagtgcctggtgctcacaggttgtaagactttacccaggccaacgccaccttgagctggaatggagcgtcggacccatcccagtgggcgacacctggggaaaggaagtgatctcccgttttgatacccccctggagaccaagggaaggttctatactgattcaaacggacgcgaaatcctggaaagaagacgtgactaccgccccacctggaagcttaaccagactgagccagtagctggaaactactacccagttaacacaaggatctacatcactgacggaaatatgcagttgactgtgctgactgaccgtagccagggtggtagctccctgcgcgacggaagcctggaactgatggtacatcgtagactgctgaaggacgacggcagaggcgtcagcgaaccattgatggaaaacggcagcggtgcttgggtgcgtggtagacatctggtgcttctcgacaccgcccaagcagctgctgcaggccatagattgctggctgagcaggaagttttggcacctcaggtcgtcctcgctccaggaggtggcgccgcttacaacctgggtgcacctccacgtactcaattctcaggcctgcgtagggacctgcctccttccgtgcacctgcttactctcgccagctggggtccagaaatggttttgcttaggttggagcatcagttcgccgtaggtgaagatagcggccgtaatctttccgctccagtcaccttgaatcttcgtgatttgtttagtactttcacaatcactcgcctgcaggaaactacacttgttgccaatcaactgagagaggctgcctcacgcctcaagtggaccactaacactggaccaaccccccaccaaaccccataccaattggaccctgcaaatattactctcgagccaatggaaattcgtacattcctcgcttctgtccaatggaaagaagtggatggc

SEQ ID NO: 11583 - DNA, 3033 bp, Artificial Sequence
  derived and/or modified sequence
atgggagcctacgccagagcgtcaggcgtctgtgctcgcggctgcctggactcagcggggccgtggaccatgagccgggcgctgcgcccgcctctcccgcctctgtgctttttcctgttgctcctcgcggccgctggggcccgcgccggaggctacgaaacctgcccgaccgtccaaccaaacatgctgaatgtgcacctcttgccgcatacccacgacgacgtgggatggcttaagactgtggaccaatacttctacgggattaagaacgacattcagcacgccggggtgcagtacatccttgactcggtcatctctgctttgctggcggacccgacccgcagattcatctacgtcgagatcgccttcttctcgcgctggtggcaccagcagaccaacgcgacccaggaagtcgtgcgagatctggtgcgccagggccggctggaatttgccaatggaggatgggtgatgaatgacgaggcagctactcattacggtgctattgtggaccagatgactctgggactccgcttccttgaggacacgttcggcaacgacggcagaccgagagtggcctggcatatcgacccatttggccactcgagggagcaggcatccctctttgctcagatgggattcgacgggtttttctttgggaggctcgactaccaagacaagtgggtgcgcatgcagaagctggaaatggagcaagtctggcgggcgtcgactagcctgaagccgccgaccgcggacttgttcactggcgtgctgcctaacggctacaacccgccgcggaacctgtgctgggatgtgctctgcgtggaccaacccctggtcgaggaccctcgctcaccagaatacaacgctaaagagctggtggactatttccttaacgtcgcaacggcacagggtcggtactacagaactaatcatactgttatgaccatgggatccgattttcaatacgaaaacgctaacatgtggttcaagaacctggacaagctgatccggctcgtgaatgcccagcaggccaagggttcatccgtccatgtgctctattccacgccagcctgttacctgtgggaactgaataaagcaaacttgacctggagcgtgaaacacgacgatttcttcccttacgcggacggtccgcatcagttttggacgggatacttctcgtcacggccggctttgaaacggtacgaaagactctcatacaatttcctgcaggtgtgcaatcaactcgaagctctcgtcggcctggcagccaacgttggtccgtacggatcaggagattcggcaccgctgaacgaggcaatggccgtgcttcaacaccacgacgccgtgtcaggcacctcgcgccagcatgtcgccaacgactacgcgcgccagctcgctgctgggtgggggccgtgcgaagtgctgctgtccaacgcactggcacggctgaggggattcaaagaccattttaccttttgccagcagctgaacatttccatctgcccgctgtcgcaaaccgctgcgcgattccaagtgatcgtgtacaaccccctcgggcgcaaagtgaattggatggtccgcctgccggtcagtgagggagtgttcgtggtgaaggaccccaacggaagaactgtgccgtcggatgtggtcatcttcccatcctcggattcgcaagcgcatcctccggaattgctgttctccgccagcctcccggcgctgggattttccacctactctgtggcccaagtcccgaggtggaagcctcaggcgcgcgccccgcagccaatccctcgccgcagctggagcccagcactgactatcgagaatgagcacatccgcgccactttcgacccagatactggcctgctgatggaaatcatgaacatgaatcaacagctgctgttgccggttcggcaaactttcttttggtacaacgcatcaattggggacaacgagtcggaccaagcgtcaggggcctacatctttcggccaaaccaacagaaaccgctcccggtatcaagatgggcccaaatccatctggttaagacccccctcgtccaagaagtgcaccagaacttcagcgcctggtgcagccaggttgtgcggctgtacccaggtcaacggcatctggagctcgagtggtcagtcggcccaatccctgtgggcgacacttggggaaaggaagtgatctcccgcttcgacaccccattggaaactaagggtagattctataccgactcaaatgggcgcgagatcctggaacggcgccgcgattacagaccgacgtggaagctgaaccagactgagccagtggcagggaactactacccggtgaatacgagaatctacatcaccgacggtaatatgcagcttactgtcctgaccgacaggtcccagggaggctcgtccctgcgggacgggagcctggaactgatggtccaccgaaggctgctgaaggacgacggtcggggagtctcggaaccactcatggagaacggctccggagcgtgggtccgcggccgccatctggtgcttctggatacggcacaggcggccgccgccggtcatcggctgttggcggagcaagaagtgctcgccccgcaggtggtgctggcccccggtggtggtgccgcgtataatctgggcgctccaccgcgcactcaattctccggactgagacgcgacctgcctccgagcgtgcatctcctgactttggcttcgtggggaccggaaatggtgctgctgcggctggaacaccaattcgcggtgggagaagattcgggacgcaatctctcggcgccggtgaccctgaatctccgagatctgttctctaccttcactatcactcgcctccaggagactaccctcgtggcaaatcagctcagagaggccgcctcacgcctgaaatggacgactaacaccggaccgaccccgcatcagaccccttaccaactggacccagctaacattactctggaaccgatggagatccggaccttcctggcctcagtgcagtggaaggaggtggacggt

SEQ ID NO: 11584 - DNA, 3033 bp, Artificial Sequence
  derived and/or modified sequence
atgggggcctacgcacgcgctagtggggtgtgcgctcgcggatgtctcgattctgctggaccctggactatgagtcgggctctgaggccacctctcccaccactctgttttttcctactcctgcttgcggctgcaggagctcgtgctggggggtatgagacatgtcccacagtgcagccaaacatgctaaacgtgcatctcttaccacacactcatgatgatgtcgggtggctgaaaacagttgatcagtatttctatggaataaaaaatgatatacaacacgctggagtgcagtacatacttgattctgtgatcagtgctctgctcgcagatcctacaagacggtttatctacgtagagatcgctttcttttctagatggtggcatcagcagacgaatgctactcaggaagtggttcgggatcttgtaagacagggaagactcgagtttgctaacggaggatgggtaatgaacgatgaagccgcgactcactatggagcaattgtcgatcagatgacacttggactcagattcttagaagatactttcgggaacgatggacggccccgagtggcttggcatatcgatcctttcgggcattctagggaacaggccagtcttttcgcacagatgggatttgatggattcttttttggacgcttagactaccaggacaagtgggttcgaatgcagaaattagaaatggaacaggtgtggcgggcctccacttctctaaaacctcctacagccgacctcttcactggagtgctacctaacgggtataatccccctcgaaacctgtgctgggatgttctgtgcgtggaccaacctctcgttgaagatccaagatcccctgaatacaatgccaaggaacttgtggactatttccttaatgtagctacggcccaggggaggtactatcgaactaatcatactgtaatgacaatgggatctgatttccagtatgaaaacgctaatatgtggttcaaaaatctagataaactcattagactagttaacgcccagcaggctaagggatcctcagtccacgtcctatatagtactcccgcctgttacctatgggaattaaacaaagcaaaccttacttggtccgtcaagcacgacgatttcttcccctatgccgatgggcctcatcagttttggactgggtattttagtagtcgccctgccctaaagaggtatgaaagactttcttataattttctccaggtctgcaatcagctcgaagcattagttgggctcgccgcaaatgtggggccttacgggtccggggattccgcccctctgaacgaggcaatggcagtcctccagcaccacgatgcggtgagtggaacaagtagacagcatgtagccaatgattatgctagacagctggctgccggatggggaccatgtgaagtcctcctgtctaatgcactggctcgcctccggggattcaaagatcactttacattctgccaacagcttaacatatccatctgcccattgagtcagactgctgcaagatttcaggtgattgtgtacaatcccctcggacggaaagtaaattggatggtacgactgcccgtctcggaaggggttttcgtagtgaaagatcctaatgggcgaactgtgccctccgatgtggtgatattcccctcaagtgattctcaggctcacccccctgaactcctcttctccgcttcactcccagctctcggattttctacatattcagttgcacaggttccacgatggaaaccccaggcccgcgcaccccagccaatacctagacgctcatggtcccccgcgttgactatcgaaaacgaacacatcagagccacattcgaccccgatactgggcttctaatggaaatcatgaatatgaaccagcagttactgctccccgtgaggcagacatttttttggtataacgcctctatcggagataatgaatccgaccaggcaagtggagcttatatcttccgccctaaccagcagaaaccccttcctgtgtcccgctgggcccagatccaccttgttaaaactccactcgtccaagaggttcaccagaacttcagtgcatggtgttcccaggttgtgcgactctatccaggacagagacatttagaattagaatggtccgtgggaccaattcctgtgggagacacatgggggaaggaagtgatctcccggttcgatacaccacttgaaacaaaagggaggttctatactgattcaaatggacgagaaatccttgaacggcgtcgggattatcgacctacatggaaacttaatcagacagaaccagtagcggggaattattacccagtgaatacacggatatatataactgatgggaatatgcagcttacagtactcacagataggtcgcagggggggtcatccctgagagatggatctctcgaactcatggtgcatagaaggctactgaaggatgatgggcggggagtttcggaacctctaatggaaaatggaagtggagcctgggtacggggaagacacctcgtccttctcgatactgctcaggccgccgccgctgggcacaggctcctggccgaacaggaagttttggcaccacaagtcgtcctcgctccaggaggaggagccgcctataatctaggggccccaccaaggacacagttttccgggttacgaagggacctcccaccctccgtgcacctgttaacattagcttcctggggacccgaaatggtgttgctcaggctggaacaccagtttgctgtcggagaagattctgggaggaatctttcagcccccgtgacacttaatctcagagatcttttctccacgtttacaattactcgcctacaggagactacactcgtagccaaccaactcagggaagcagccagtaggctcaaatggactacaaacactgggcccactccacaccagacaccctatcagctagaccctgctaacatcactctggagcccatggaaattagaacatttttagcctctgtacagtggaaagaagtcgatgga

SEQ ID NO: 11585 - DNA, 3033 bp, Artificial Sequence
  derived and/or modified sequence
atgggcgcttacgcaagagctagtggtgtgtgtgcaaggggatgcctcgatagtgcgggcccgtggacaatgtctcgggcgctgaggccccccttgccaccgctctgcttctttcttctcctgctggcagccgcaggcgctcgggccggagggtacgagacttgccctaccgtgcagcctaacatgctgaatgtgcatctgctaccacacacccatgatgatgtcggttggctgaagaccgttgatcagtatttctatgggattaagaacgatatccaacacgccggagtccagtatatccttgattctgttatatccgccctcctggcggatcccacaagacgtttcatctacgtggagattgcttttttttctcggtggtggcatcagcagacaaacgcgactcaggaggtcgtgagagatttagtgcgccagggcagactggagttcgcaaacgggggatgggtgatgaatgacgaggctgccacacattacggagcaattgtcgatcagatgacattgggactacgctttttggaggacacgtttggaaacgatggccgaccacgcgtcgcctggcatattgacccatttggccacagccgagagcaggctagtctgtttgcccagatgggatttgacgggttcttctttggcagactggactaccaggataagtgggtgcgcatgcagaagctggaaatggaacaggtctggagagcctctacatccctgaagcccccaacggccgacctgttcacaggcgtgctgcccaacggctacaaccccccacggaatttgtgttgggacgttctctgtgtggatcagcctctggtggaggacccgagaagccctgaatacaacgcgaaggaacttgtcgactacttcctgaacgttgccactgcgcaggggaggtactaccggaccaatcacaccgttatgaccatgggaagcgatttccagtatgaaaatgctaacatgtggttcaagaatcttgacaagctcattaggctcgtgaacgctcaacaggcgaaaggatctagcgtccatgtgttatattcgactccagcctgttacttatgggaactcaacaaagcgaatctgacctggagcgttaaacacgatgacttcttcccgtacgccgatggcccgcatcagttttggaccggctatttcagctctcgaccagcactgaaaagatacgagaggttgagttacaactttttgcaagtctgcaaccagctcgaggccttggttggcttagccgccaacgttggtccctacgggagcggtgatagcgcgccgttaaacgaagccatggccgtactccagcaccacgatgccgtgagcggaacgagcaggcagcatgtggcaaatgactacgcccggcaactagccgccggttggggaccatgcgaggtgttattgagtaatgccctcgcgcgactgcgaggctttaaggaccactttacattttgccagcagctgaacattagtatatgtcccctgtctcagactgcagcacggttccaagtgatcgtctacaatcccctgggtcggaaggtgaattggatggtgcggctgccagtgagcgagggcgtgtttgtagtgaaagaccctaatggtcgtacggtacccagcgatgttgttatcttcccttcatcagactctcaggcccacccccctgagcttcttttctcagcttcattgcccgccctgggcttcagtacctactcggtagcacaggtcccaaggtggaagccacaagccagggcccctcagcctattcctagacggtcctggagccccgcactgaccatcgaaaatgaacacattcgggctacgttcgatcctgacacaggcctgctcatggaaatcatgaatatgaatcagcagctgttactgcccgtgcgccagacgttcttctggtacaatgcttcaatcggggacaacgagtcagaccaggcctccggagcttacatttttagaccgaaccagcaaaagccccttccggtatcacgctgggcacagatccacctcgtcaagacgcccttggtgcaggaagtgcatcaaaacttttctgcgtggtgttctcaggttgtgcgcctttacccagggcagcgccacctggaattagagtggtcagtgggacccatcccagttggagatacatggggtaaagaggtgatttcaagattcgacactccacttgagaccaagggtcggttctacacagacagcaatggcagagagatacttgagcggagaagggattaccggcccacatggaagctgaatcagaccgagccggtggccggcaactattacccagtcaacaccaggatctacatcacagacggtaatatgcagcttaccgtgttgactgaccgaagccaaggcggatctagtttgagagatggatcactagaactgatggttcacaggcgactgttgaaggacgacggtaggggtgtctcggagcctttgatggaaaacggctctggggcttgggtcagaggccgccacttggtcctactggacaccgcacaggctgccgccgcaggtcacaggctgctggctgagcaggaggtgctggccccccaggtggtgctggcgcccggggggggggccgcatataacctcggtgcaccaccccggacgcagtttagcggcctgagaagggacctcccccctagcgtgcacctgctgaccctggcttcttgggggccagagatggtgttgctgaggctggagcatcaatttgccgtcggcgaagactccggtaggaatctcagcgctcctgtaaccctgaaccttagggatctgttctctacattcacaataactagactgcaggagacaaccctcgtggcgaatcaactgagagaagccgcatccaggctcaaatggactaccaataccggccccaccccccaccagacgccctaccagctcgaccccgcgaacatcacgttggagccaatggagatccgtaccttcttggcgtctgtgcagtggaaagaagttgatgga

SEQ ID NO: 11586 - DNA, 3033 bp, Artificial Sequence
  derived and/or modified sequence
atgggagcatacgcccgcgcctcgggggtgtgcgcgcgcggatgtctcgatagcgctggaccttggactatgagccgcgctctgcggccgccgctcccaccgctgtgtttcttcctgctgctgctcgcggccgcgggagctagagccggaggatacgagacttgcccgactgtgcagccgaacatgttgaacgtccatctgttgccgcacacccatgatgacgtgggctggctcaagaccgtcgatcagtatttctatggaatcaagaatgatatccaacatgccggtgttcaatacatcctggactccgtcatctccgctctgttggccgatccaaccagaaggttcatctacgtggagatcgccttcttttcccggtggtggcatcagcaaactaatgcgactcaggaagtcgtccgggacctcgtccggcagggccgcctcgagtttgcaaacggaggatgggtcatgaatgatgaggctgctacgcattacggagctatcgtggaccagatgacgctgggacttcggtttctggaagatactttcggcaatgatgggcgccccagagtggcatggcatatcgacccatttggacactcacgggagcaggcctcgctgttcgcccagatgggtttcgacggattcttcttcggacggctcgactatcaagataagtgggtgcgcatgcagaagctggaaatggaacaagtgtggagagcgtcgacctcgctcaagccgcctaccgccgacctgttcaccggggtgctgcccaacggatacaatccgccacgcaacctgtgctgggacgtgctgtgcgtcgaccaaccactcgtcgaagatccgagatcacccgagtacaatgctaaggagttggtagattactttctgaacgtcgctaccgcgcaaggcagatactacagaaccaaccacaccgtgatgaccatgggatcggactttcaatacgaaaatgcgaacatgtggttcaagaatcttgataagctgatcagactggtgaatgcacagcaggcgaaaggatcctccgtgcatgtgctgtacagtacccctgcctgttacctgtgggagctgaacaaggcaaatctgacttggagcgtcaaacatgacgacttcttcccctacgccgacggcccgcaccagttttggactggttacttctcctcgcgccccgccctgaagaggtacgagcgcctctcatacaacttcctccaggtgtgcaaccagctggaagcgctcgtcggactggccgccaacgtcggaccgtacggatcgggagattccgcgccgctgaacgaggcgatggctgtgctgcaacaccatgacgccgtgtcgggtacttcgagacaacatgtggccaatgactacgcacgccaacttgcagccggatggggcccatgcgaagtcctcctgtcaaatgccctggcacggcttcgcggattcaaggaccatttcaccttctgccaacagttgaacatctcaatctgcccgctgtcacagaccgccgccagattccaggtcatcgtgtacaacccgctgggacgcaaggtgaattggatggtgcgcctcccggtgagcgaaggagtgttcgtggtcaaggaccccaatggacgcacggtgcccagcgacgtcgtgattttcccctcctccgattcgcaggcgcacccgccggaactgctgttctcggcttccctcccggccctgggattctctacttactcggtggcccaagtgcctagatggaagccgcaggcacgggccccgcagcctatcccacgacgctcatggtccccagcactcaccatcgagaacgaacatataagagctaccttcgatccagacaccggactcttgatggaaatcatgaatatgaaccaacagctgctcctgccagttagacagaccttcttctggtacaacgcctcgattggcgacaacgagtcggatcaagcctccggagcttacatcttccggccgaaccagcagaagccgctgcctgtgagtcgctgggcgcaaatccacctggtcaagactcctctggtccaggaggtgcaccaaaacttctcggcgtggtgctcgcaagtggtccgcctctaccctggccaaagacatcttgaactcgagtggtcagtgggtccgatcccagtgggggacacttggggaaaggaagtgatctcgcgctttgataccccgctggagactaagggaagattctacactgactcgaacggtcgggaaatcctcgagcgcagacgcgattatcgtcctacctggaagctgaatcagacggagccggtggcgggaaactactacccagtgaatacccgcatctacatcactgacgggaacatgcaactgaccgtgctgaccgaccgcagccaaggagggagcagcctgcgggacggatcgctggaactcatggtgcacaggcggcttctcaaggacgatgggcgcggtgtgagcgaaccgctgatggaaaatggatcaggagcgtgggtgcggggacgacacttggtcctgctggacaccgcccaggcagccgccgccggccaccgcttgctggcagaacaggaagttctggcgccccaggtcgtgctcgcccctggaggtggagccgcttacaaccttggcgcgccgccacgcacccagttcagcggcctcaggagggacctgccgccgtccgtgcacctcctcacgctcgccagctggggtccagaaatggttctgttgagactggagcatcagttcgctgtcggagaggactccggtcggaacctgtcggcccctgtgactctgaacctcagagatttgttttcaaccttcactatcactaggctgcaagaaactaccctggtcgccaaccaactccgcgaggcagcaagcagactgaagtggactactaacactgggcctactcctcaccagaccccctaccaattggatccggcgaacattaccctggagcctatggaaatcagaaccttcctcgccagtgtgcaatggaaggaggtggatggt

SEQ ID NO: 11587 - DNA, 3033 bp, Artificial Sequence
  derived and/or modified sequence
atgggggcttacgccagggcctccggtgtttgcgctagaggctgtctagacagtgccggaccttggacaatgtcgagagccctgcgccccccgctaccgcccctgtgtttcttcctgctactcctggctgcagccggcgccagggccggcgggtacgagacctgcccaaccgttcagccaaatatgctgaatgtacacctgctccctcatacccacgatgacgtgggatggctgaaaaccgtagatcagtacttctacgggattaaaaatgacatccaacacgctggcgtgcagtatatcctggactccgttattagtgctctactggccgaccccaccaggcggtttatttatgttgagatcgcattctttagcagatggtggcaccaacaaaccaacgccactcaggaggtcgtgcgtgatctcgtgcggcagggaaggctggaattcgccaatggcgggtgggtgatgaatgacgaggccgcaacgcactatggtgctattgtggaccaaatgaccctcggtctgcgctttctggaggacacatttgggaatgacggaaggccacgagtggcatggcacatcgatcccttcggacacagccgggagcaggcaagcctgttcgcccaaatgggatttgacggattcttcttcggtcggcttgattatcaggataagtgggtgcgcatgcagaagctcgaaatggaacaggtctggcgcgcaagcacttctctgaagccaccaacagcagatctatttaccggtgtccttcctaatggatataaccccccacggaatctgtgttgggatgtgctgtgtgtcgaccaaccacttgtcgaagaccccagaagccctgagtataatgctaaggagttagtggactactttctgaacgtcgccaccgcgcagggacgctattacagaacgaatcacacagtgatgacgatgggcagcgatttccagtacgaaaatgctaatatgtggttcaagaaccttgacaaattaatcaggctcgtgaacgcacagcaggcgaaggggtcgtctgtgcatgtgctgtacagtactcccgcctgctatttgtgggagctgaataaggctaatctgacgtggagtgtcaagcatgacgacttcttcccatatgctgacggacctcatcagttctggacaggctatttttcatcccgccctgctctgaagaggtatgagcgcctatcttacaacttcctgcaagtgtgtaaccagctagaagccctcgtcggcctggccgctaacgtgggaccctacggatccggcgacagtgcacccctgaacgaagcaatggctgttttgcagcaccatgacgcggtttcgggtacctcgcgtcagcatgttgcgaacgattatgcccgtcagctggctgctggttggggcccctgcgaggtgctgttatctaacgcactagcgcggttgcgcggattcaaggatcatttcacattttgccaacagctgaatatcagcatttgccctctcagccagactgcggcccggtttcaggtgattgtctacaaccccctgggccgcaaggtgaattggatggtgaggctaccagtgagcgaaggagtcttcgttgtcaaggatccaaatggccgcacggtgccatccgatgtagtaatttttccgagcagcgactcccaggcacacccaccggagttgttgttctccgcttccctgcctgctctgggattctccacgtactcagtcgcacaggtgccccggtggaagccacaagccagagcaccacagcctattccaagacgctcttggtcccccgccttgacaatcgaaaacgaacatatcagggccacatttgaccctgataccggactgcttatggaaattatgaacatgaaccagcagttgctgctccctgtacgtcagacattcttctggtataacgcgagcattggggacaacgaatcagaccaagctagcggcgcatatatcttcagaccaaaccaacagaagcccctgcccgtctcgcgttgggcccagatccacctggtgaaaaccccgcttgtgcaagaagttcaccaaaatttttctgcgtggtgctcacaagtcgttcgcttgtaccctgggcaacgtcatttggaacttgaatggagcgtcggccctatccccgtgggagatacctggggaaaggaagtgatttctcgcttcgataccccgcttgagacgaaaggccggttctacacagacagtaatggccgagagattcttgaaagaagaagagattatcgacccacatggaaactcaatcagaccgagcccgtcgccggcaactactaccctgtaaacactcggatttacatcaccgacggaaacatgcagctgaccgttttaaccgatcggtcccagggcggatcttcgcttcgagacggaagcctggaactgatggtgcaccggcgactgttaaaggatgacgggcggggcgtcagtgaacccttgatggaaaatgggtccggagcatgggtgcgcggccgccacctcgtcttactcgacaccgcgcaggccgctgcggctgggcatcgactgcttgccgagcaggaggttctggcccctcaagttgttctggcccccggcggcggggccgcatataatttaggagcaccaccccggacacaatttagcggactgagacgagacctgccaccgagtgtgcacctcctgaccttggccagttggggtcccgagatggtgctgctaaggctggaacaccaatttgccgtaggagaagatagtggccgcaatctcagcgcccctgtgacgttgaatctgcgcgatctgttttcgacctttaccattacccgtcttcaggaaactacgctcgtggctaaccagctgcgggaggcagcttccaggctgaaatggacaaccaacactgggcccaccccacatcagacaccataccagcttgacccagcgaacataacactggagcccatggaaattcggactttcctagcctcagtgcagtggaaggaagtagatggc

SEQ ID NO: 11588 - DNA, 3033 bp, Artificial Sequence
  derived and/or modified sequence
atgggcgcctacgcccgggctagcggtgtgtgcgctaggggatgtcttgatagtgccggcccgtggactatgtcaagggcattgaggccacctctgcctcctctctgcttcttcctgctgttacttgcagctgctggtgcccgagccgggggctatgagacctgcccaaccgtgcagcccaacatgctgaatgtccatctactgccccacactcatgatgacgtggggtggctcaaaaccgtcgatcaatacttttacggcattaagaatgacatccagcacgccggggttcagtacatcctcgactccgtgatcagtgccctcttggccgacccaacaaggcgcttcatctatgtggagatcgcatttttctcccgatggtggcatcaacagacaaatgctactcaggaggttgtgagggacctggtgcggcaaggaagactggagtttgccaatggagggtgggtgatgaacgatgaagcagcaacgcactatggtgcaattgtggaccaaatgaccctgggactacgatttctggaagacacgttcggcaacgacggtcgacctcgggtggcttggcacatcgatcccttcggacacagtcgcgaacaagcatccctatttgcacagatgggttttgacggatttttcttcggtcggctggactaccaggacaagtgggttagaatgcagaagttggaaatggagcaggtctggcgggcatccacctctctgaagcctcctactgccgacctgtttacaggagtcctgccgaacggctacaatcctcctcgcaatttatgctgggacgtactgtgtgtggatcagcctctggtggaagacccccgtagccctgagtacaacgcgaaagaactggtggattatttcttaaacgtagcaacagctcagggtcggtattatagaactaaccatacagtgatgactatgggctcagatttccagtatgagaatgctaacatgtggttcaaaaaccttgataagctgatcagactggtgaacgcacaacaagccaagggctcttctgtgcacgtcctgtattcaacacctgcctgctacctatgggagctcaataaagcgaacctcacttggtctgtaaagcatgacgattttttcccttacgcagatggccctcatcagttctggacgggatacttctcctctcgacccgccctcaagagatacgaacgtctgagctacaatttcttgcaggtgtgtaaccagttggaagcccttgttgggctggccgccaatgtggggccttatgggtcgggggacagcgccccactgaatgaagccatggccgtgctccagcatcatgatgcggtgtccggaacgtcaagacagcacgtcgccaatgactatgcaagacagttagcagcagggtggggcccttgtgaagtcctgctctctaacgcactggcccgactgcgcggcttcaaggaccatttcacattctgccaacagttgaacatctccatttgtccactttctcaaaccgcggccaggtttcaagtgattgtgtacaaccccctgggccgcaaggtgaattggatggtgcggctgcctgtgtctgaaggtgtgttcgtggttaaagacccaaatggacggaccgtcccatcagatgtcgtgatttttcctagctccgactcccaagcccaccccccggaactattgttcagcgcctctctgcccgctctgggcttttccacatattccgttgctcaggtccccagatggaaaccccaagcacgcgcccctcaacccatacctaggagatcttggtcccctgctttaacaatcgaaaatgagcacattcgagccaccttcgacccagatacaggtctcctcatggaaatcatgaatatgaaccaacagttgctgctgcccgtcagacagacgtttttttggtataatgcgagcatcggggataatgaaagcgaccaggccagcggagcctacattttcagaccaaaccagcaaaaacctctacccgtttcaagatgggcacaaattcatctggtgaagacacctctggtgcaagaagtccaccagaatttctcagcttggtgtagccaggttgtgcggctttaccctggacaacggcatctggaactcgagtggtccgtaggtcctatccccgtaggggacacatggggaaaggaggtaatttcaaggtttgacactcccctggagacgaaaggacgcttttacactgattcgaatggacgagagattctcgagcggcggcgggattacaggccaacttggaaactgaaccagaccgagccagtcgcaggaaattattatcccgtgaatacaagaatttatataacagacggcaatatgcagcttacagtcttaacagacaggtcccagggaggctctagcctgagagacgggtctttggagctgatggtccaccgccgactgctgaaggatgacgggcgtggggtaagcgaacccctaatggagaacggatctggagcctgggtgcggggacggcatttagtcttgttggacaccgcgcaggctgccgctgctggtcatcgcctgttggcagagcaggaagttctcgccccccaggtggttctcgcacctggcggaggggccgcctacaaccttggtgcccctcctcggacacagttctccgggctgaggagagatctccctccgagcgtacatttgctcaccctagccagttggggccccgagatggtgctgcttagattagaacaccagttcgccgtcggagaggattccggaagaaatctgtctgccccagttacgctgaacttgcgagacttgttttctacatttaccattacacggctgcaagagacaactttagtggccaaccagctgagggaagcggcttctcgactgaaatggacaaccaacacgggacccacccctcatcagactccctaccagttagatccagccaatatcacactggagcctatggagataagaacattcctggcgagtgtgcagtggaaagaagtggacgga

SEQ ID NO: 11589 - DNA, 3033 bp, Artificial Sequence
  derived and/or modified sequence
atgggcgcttatgcgagagcatcgggcgtgtgcgccagaggctgccttgattccgccggcccatggaccatgagccgggccctccgccctccgcttccgccgctctgttttttcttgctcctcctggccgcggcaggtgcccgcgcgggagggtacgaaacctgtccgactgtgcagcctaatatgctcaacgtgcacctgctgccccatactcacgatgacgtgggctggctgaaaaccgtggatcagtacttctacggaattaagaatgacatccagcatgcgggcgtgcagtacatccttgactcagtgatctcagcactcctggcagacccgacgcggcgcttcatttacgtcgagattgccttcttttccagatggtggcatcaacagaccaacgccactcaggaagtggtgcgcgatctggtgagacagggtagactggagttcgcgaatggagggtgggtgatgaacgatgaggcagccacccactatggagctatcgtcgaccagatgactctgggcctgagatttctggaagataccttcggcaatgacggaaggccgcgggtggcatggcacatcgatccgtttggacacagtcgcgaacaggcctccctgttcgctcagatggggttcgatggattcttctttggacggctggactaccaggacaagtgggtccgcatgcagaagttggaaatggagcaagtctggagagcgagcacttccctgaaaccgccgaccgcggatctgttcaccggtgtgctgccgaatggatacaacccgccacggaacctctgctgggatgtcctctgcgtggaccaacccctggtggaagatccgagatcccccgaatacaatgccaaggagctcgtcgactacttcctgaacgtcgcaacggcccagggacggtactaccggactaaccatactgtcatgactatgggtagcgacttccagtacgagaacgcaaacatgtggtttaagaaccttgataaactgatccgacttgtgaatgcacaacaagccaagggctcatcggtgcacgtcttgtactcgactccggcttgctacctgtgggagctgaataaggctaatctgacctggtcggttaagcacgatgatttcttcccctacgccgacggaccacatcaattctggactggatatttctcgtcgaggccagcactcaagcgctacgagcgcctttcttataacttcctgcaagtgtgcaaccaactggaagccctggtgggactcgccgccaatgtcggaccatacggatcgggagattcagcaccgcttaacgaagcgatggcagtgctgcaacaccacgacgcggtgtctggcacctcacggcagcacgtggcaaatgactacgctaggcagctcgccgcagggtggggcccctgcgaagtgcttctgtcgaacgccctggcacggctcagaggcttcaaggatcacttcaccttttgtcaacagctgaacatctccatctgcccgctgtcgcaaaccgctgcccggttccaagttattgtgtataacccgctcggacgcaaagtcaattggatggtgcggctccctgtctcggaaggggtgtttgttgtgaaagacccaaacggccgcactgttccgtccgatgtggtcatctttccttcgtcagactcccaggcgcaccctccggaactgctcttctccgcctcgctgccagccttgggattctcaacttactcggtcgcccaagtgccgcgctggaagccacaggcacgcgccccgcagcccatcccccggcggtcgtggtcaccagcactcaccatcgaaaacgaacatatccgggcgactttcgaccctgatactgggctcctgatggaaatcatgaacatgaaccaacagctcctgctgccagttcgccaaactttcttttggtacaacgcctccatcggagataacgaatccgaccaagccagcggcgcctacatctttcggccgaaccagcaaaagccgctccccgtgtcgaggtgggcccagatccacctcgtcaagactccgctcgtgcaggaggtgcaccagaacttctcagcgtggtgctcccaagtcgtgcggctctaccctggccagagacatttggaactggaatggtcggtgggaccgatcccagtcggggatacttggggaaaagaagtgatcagcagattcgacacgccgctggaaaccaagggtcgcttctacaccgatagcaatggcagagaaatcctggagcgccgtcgcgattaccggccaacctggaagttgaatcagacggaaccggtggccggtaactactaccctgtgaacacccgcatctacatcactgatggaaatatgcagctgactgttctgaccgaccgctcgcagggtggatcctcgctcagagatggctcactggagcttatggtgcaccgcagactcttgaaagacgacggacggggcgtgagcgaaccgctcatggagaacggaagcggcgcgtgggttcggggacgccacctggtacttctggacaccgcgcaggcggcggccgcggggcacagactccttgcggaacaggaagttctggcgccgcaggtggtgctggccccggggggcggagccgcctacaacctgggcgctccaccacgaacccagttctccggactccggcgcgacctgccaccgagcgtgcacttgctcactctcgcctcctggggcccggagatggtgctcctgagacttgagcaccagttcgcggtgggagaagattcaggaagaaacctgagcgcaccggtgactctgaacctgcgggacctgttttcgactttcactatcacgaggttgcaggaaaccactttggtcgccaaccagctgagagaggcggcctcgcggctgaagtggaccaccaacaccggacctactccgcaccagactccgtaccaacttgatccggccaacataaccctggaaccgatggaaatccggacgttccttgcatccgtgcaatggaaggaagtggatggc

SEQ ID NO: 11590 - DNA, 3033 bp, Artificial Sequence
  derived and/or modified sequence
atgggtgcatacgcacgggccagcggggtctgcgctagagggtgcctcgattcggccgggccttggactatgagcagggcgctccgtccccctctgccacctttatgcttctttctgctgctcctggccgccgctggagctagggcaggcggatatgagacttgtcccactgtgcagcccaatatgctcaacgtgcatctgctgcctcacacacatgacgatgtggggtggctcaagacagtggaccagtacttttatggcataaaaaacgatatccagcatgctggcgttcaatacatcttggattctgtgatctccgccctgctcgcagatcctacaaggagattcatctatgtcgagattgccttcttttcccgctggtggcaccagcagacgaatgccacacaagaggtggtcagggatctcgttaggcaggggcgcctggagttcgccaacggtggatgggtgatgaatgatgaagccgccacacactacggcgctatcgtagaccagatgaccctggggttgagatttctcgaagatacatttggaaatgatgggcgtccccgcgtcgcttggcacattgacccctttggacatagcagggaacaggctagtctgtttgcccagatggggttcgacggcttctttttcggccgtcttgactatcaagataagtgggtgcggatgcaaaaactagagatggaacaggtctggagggcctctacaagtctcaagccgcctaccgccgatctttttactggtgtgctgccgaacggctataatcccccacgaaacttgtgttgggatgtactgtgtgtcgaccagcctcttgttgaggacccaagatctcccgaatacaacgcgaaagagctggttgactactttctgaacgttgcaacagcccagggaagatactaccgcaccaatcatacagtcatgacaatggggtcggactttcagtacgaaaatgcgaacatgtggttcaagaacctggataagttaattcggctcgtgaatgcccagcaggcgaaaggatcatccgtccatgtgctgtattcaacacccgcatgctatttgtgggagctgaacaaggccaacctcacctggagcgttaagcacgacgatttcttcccctatgctgatgggccacaccagttctggacaggttacttttcttctagaccagcactaaagaggtatgagcggctttcgtacaatttcctccaggtgtgcaaccagctcgaagctctggtggggttggcagcgaatgtcgggccttacggatctggcgactccgcccctctaaacgaagcaatggcagtactgcagcaccatgacgctgtatccggcacatcccggcagcatgtggcgaatgactacgctaggcagcttgccgctggctggggcccctgcgaagttctgctctccaacgcccttgcacggctccgcggttttaaagatcacttcacattttgtcaacagctgaatatttccatttgcccgctctcacagactgccgcccgttttcaggttatagtctataacccactgggcagaaaagtgaactggatggttaggctgcctgttagtgagggagtcttcgtcgtcaaggatccgaacggccggacagtgcccagtgatgtggtgatcttccccagcagcgatagccaggcccaccctcctgaactgcttttcagcgcaagcttgcctgctcttggcttctctacctatagcgtggcacaggtgccaaggtggaaaccgcaggcaagagccccccaaccgatacctagaaggtcgtggtctcctgctcttaccattgagaatgagcatatacgggcaacgttcgatcccgacaccggccttctgatggagatcatgaacatgaaccagcaactactgttgcctgtcaggcaaactttcttctggtacaatgccagcatcggagataacgagagcgatcaggcgagtggggcgtatattttccggccgaatcaacaaaagcctctgcccgttagccgttgggcacagattcacctagtgaaaacccctcttgtgcaggaggtgcaccagaatttttctgcatggtgctcacaggtagtgaggctctaccccggacagcgccacctggaattggaatggtcggtggggcccattccagttggtgacacctggggaaaagaggttataagcagatttgacactcctttggaaactaaaggccgattttacaccgatagcaatggaagggagatcttagaacgacgtcgggactacaggcccacttggaaattgaaccagaccgaacccgtggctggaaattactaccctgtaaacaccagaatttatatcacagatggcaatatgcagcttaccgtcttgactgataggagccagggtggttctagcctgcgcgacgggtctttggagcttatggtacataggcgcctgctgaaggacgatggaaggggcgtaagtgagcccctgatggagaatggaagcggggcctgggtgcggggacgccacctggtacttctagatacagcacaggcagccgccgctggtcatcgcctgcttgcagaacaggaagtcctagcccctcaagtcgttttggcgccaggtggtggggctgcctacaatctcggtgcacctcccaggacccagttctccggactgcgcagggatctacccccttccgtgcaccttcttacactggcgtcgtggggcccggagatggtattgctgaggctagagcaccaatttgcagttggtgaagacagcggtagaaacctcagcgcaccagttactctgaatctcagagacctgtttagtaccttcacaatcacccggctgcaggagacgaccctggtggctaaccagttgcgggaagctgcatcacgcctgaaatggaccaccaacaccggaccgacaccacaccagactccatatcagctggatcccgcgaatatcacactagagcccatggagatacgtacatttctcgcatccgttcaatggaaggaagtggatggc

SEQ ID NO: 11591 - DNA, 3033 bp, Artificial Sequence
  derived and/or modified sequence
atgggtgcctatgccagagcctcaggagtctgtgccagggggtgcctcgatagtgccggaccttggaccatgtcccgggccctcaggcccccactgccaccattgtgtttcttcctcctgctgcttgcagcagctggcgcacgagctggcggatacgaaacctgcccaacggtacagcccaatatgctaaatgtgcatctgctccctcatacacacgatgatgttggctggctgaagactgtggaccaatacttttacgggatcaaaaatgatattcaacatgcgggagtgcagtatatcctcgacagtgtgatttcggcgttacttgcagatccaactcgacgctttatatatgtggagatagcgtttttctctaggtggtggcaccaacagacaaacgctactcaggaagtcgtacgcgatctggtcagacagggccgattggaatttgccaacgggggatgggtgatgaacgacgaagccgcaactcattacggggcgattgtggaccagatgaccctgggactgcggtttctggaggatacatttggaaatgatggacgtcctcgagtggcgtggcatatcgatcctttcggtcacagtcgtgagcaggcttcccttttcgcccagatgggatttgatggctttttttttggaaggttggactatcaagataaatgggtccggatgcagaagttagaaatggaacaagtctggcgagcttctacctccctaaagccccctacagcggacttatttacaggtgtgcttcctaatggctacaacccccctcgtaacctgtgctgggacgttctgtgcgtggaccagcctctcgtcgaggacccacgaagccccgaatataacgctaaggaactggtggattattttctgaacgtggccaccgcccaaggccgatattatagaaccaaccacaccgtaatgaccatgggaagcgactttcagtatgaaaatgcaaatatgtggttcaaaaatctggacaagttgattagactggtgaacgctcagcaagccaaaggcagtagtgtgcacgtgctctactcgacgccggcatgctacctctgggagctaaacaaagccaacctgacatggtcagtgaaacacgacgacttctttccatatgcggacggtcctcatcagttttggactggctattttagcagcaggccagccctcaaacgttacgaacggcttagctacaactttcttcaggtgtgcaaccagctggaagctctcgtgggcctggccgcaaatgtgggcccttatgggtccggggacagtgccccactgaacgaggccatggctgtacttcagcatcacgatgccgtctcagggacctcccgacagcatgttgcgaatgactatgccagacagctagcagcgggctggggcccctgcgaggttctgctatctaacgcgttggcccgattgagagggtttaaggaccacttcacattctgtcagcagctgaacatttctatctgcccactgtcacagaccgccgctagatttcaagtaattgtctataatcccctgggccggaaggtcaattggatggtccgactccccgtgtctgaaggggtcttcgtagtgaaggacccaaatggccgaactgtcccgagcgacgttgtgatattcccatcttcagattctcaggcgcatccgcctgaactgttgttttctgcaagcctgccagccttaggcttttccacatattctgtggcacaggtccccaggtggaagccacaggcccgagcacctcagcctattccccgaaggagctggagtccggcactcacgatcgaaaacgagcatatccgtgctacttttgacccagatactggtctgctgatggaaatcatgaacatgaaccagcagctcctactgcctgttcggcagacattcttttggtataacgcttcaatcggggacaacgagtcagaccaggcgtcgggggcttatattttccgaccaaatcaacagaagcctctccccgtttctaggtgggcccaaattcacctggttaagaccccactggtgcaggaagtgcatcagaatttttcagcctggtgttcacaagtagtgagactataccctggccagcgacacctggaactagagtggagcgtaggaccaattccggttggagatacctgggggaaagaagttatcagtcgattcgacacccctctcgaaacaaaaggaagattttacacagactctaacggtcgagaaatccttgagcgacgaagagattacaggcccacttggaaacttaatcagacggagcctgtcgcagggaattattatcccgtcaatactcgaatctacatcacggacggtaacatgcagctcaccgtgctcaccgacaggtcccagggaggtagctcgttaagagatggtagcttggaacttatggtccatagacgattgttgaaggacgacggacggggagtgagcgagcctctgatggaaaatggttccggagcctgggtccggggccgccatttagtgctgctagacacagcacaggccgccgctgccggacaccgcttgttagcagagcaggaggtcctcgctcctcaagtggtcctcgcccccggaggaggagctgcttacaacttgggagccccacccaggacccaattttctggtctgagaagggatttgccaccttccgtgcacctcttaacgctggccagttggggacccgaaatggtactcctccggctggaacaccaattcgccgtaggtgaagacagtggacgcaacctatccgcaccagtcacacttaacctgagagaccttttctccacattcaccatcaccaggctgcaggaaacaacccttgtagcgaaccagcttagggaagcagcgagcagacttaagtggacgacaaatacaggcccgactcctcatcaaacgccataccagctcgatcctgcaaatatcactcttgaacccatggaaattcgaacgttcctggcctccgtgcagtggaaagaagtcgatggg

SEQ ID NO: 11592 - DNA, 3033 bp, Artificial Sequence
  derived and/or modified sequence
atgggggcatacgctagggcatcaggagtgtgcgctagaggatgcctcgattctgctggaccctggacaatgagtagggccctcaggcccccgctgcccccgctgtgcttctttcttttgctgttggccgctgcgggcgctagggcagggggatacgaaacatgtccgactgtgcagcctaacatgctgaacgtccatctcctcccccacacacacgacgatgtcggatggctgaagacggtggaccaatatttttatgggatcaagaacgatattcagcacgctggggttcaatatatcctggacagtgttatcagtgccctgctagccgaccccacacgccgctttatttacgtggagatcgccttcttctctcgctggtggcatcaacaaaccaatgcaacacaagaagtggtgcgcgacctggttagacagggccggctcgagttcgccaatgggggatgggttatgaacgacgaggctgcaacccactacggggccattgtcgatcagatgacattaggcctgagattcctcgaggataccttcggaaacgacggccgaccacgcgtagcatggcacatcgacccattcgggcacagcagggaacaggcttccctctttgcacagatgggcttcgatgggtttttctttggcaggctggattatcaagataaatgggtgcgtatgcagaaattagaaatggaacaggtatggagagcaagtacatcccttaagccccctaccgcggacttgtttacgggagtgctaccaaacggctacaatccacccagaaacctctgctgggatgtcttatgcgtggaccagccgttggtggaagacccaaggtctcctgaatataatgcaaaagagcttgttgattactttttgaacgtagccaccgcccagggtaggtattatcggaccaatcacactgttatgactatgggatctgactttcagtacgaaaatgcaaacatgtggttcaagaaccttgataaattgataaggctcgtcaacgcgcagcaggctaaaggtagttctgtgcacgtgctttactcaacacccgcatgctatctgtgggagctaaataaggccaatttaacctggtctgtgaaacacgatgattttttcccctacgcggatggcccccaccagttttggacgggatatttttcctctaggcctgccctcaagcgatacgaacgactgtcttacaactttcttcaggtatgcaaccagttggaggctcttgtgggactcgctgctaacgttgggccctatggtagcggcgacagtgcacccctgaacgaagccatggccgttttgcagcaccatgatgccgtgagcggtacatcacgacagcacgttgcgaacgactacgcccgccagctggcagctggctggggaccatgtgaagtgctcctcagtaacgctctggcaaggctgcgcggatttaaagatcacttcaccttctgtcagcagctcaacatttcaatttgcccactgagtcagaccgcggcacggttccaagtgattgtttataaccctctcggcagaaaagtaaattggatggttcgactgcctgtctccgaaggcgtttttgtcgtgaaggatcccaatggcagaacggttccatccgacgtggttatttttcctagctctgattcacaggcacaccctccagaactgttgttctccgcctccctgcctgcgcttggattctctacatattcagttgcccaggtgccccgctggaaaccccaggcccgcgcgccccagcctataccccgccgaagctggtcacccgccttgacgattgagaatgagcatattagggctacctttgatccagacacagggctgttgatggaaattatgaatatgaaccagcagctccttctgccagttcgccaaacttttttctggtataacgcttctatcggcgataatgaatctgatcaagcatccggggcctatatcttccgccccaatcagcagaaacccctgccggtctccaggtgggcacaaattcatctggtgaagactcctctcgttcaggaagtgcatcagaatttctccgcctggtgtagccaagtagtgcgcctgtacccaggccagagacacttggaacttgaatggtcagttgggcccatccccgtgggcgatacctggggtaaagaggtaatatcccgatttgatacacctcttgagacaaagggcaggttctacaccgactccaatgggcgcgaaatactggagcggaggcgagattataggccaacttggaagcttaaccagaccgagcctgtagctgggaactactacccggtgaatactaggatctatattactgacggaaacatgcagctgacagtgctgaccgacagaagccagggaggttcctccctccgtgacgggagtctagaactgatggttcacagaagactgctcaaagatgacgggagaggggtctctgaacccctgatggagaatgggagcggcgcttgggtacgtggtcgccaccttgtcctcttagacactgctcaggctgccgcggcaggacatcgcttactcgcagaacaggaggtgctggcaccccaggtggtgctcgcgccaggcgggggtgccgcatataatctgggagcgcctcctaggacacaattctccggcctccggagagatttaccgccatctgtgcacctcctcacactcgccagctggggccccgaaatggtgcttttgagactcgagcatcagtttgcggtcggtgaagatagtggtaggaaccttagcgcccctgttacactaaatctccgggatctgttcagtactttcaccattaccagactccaagagaccacattggtagcaaaccagttgagggaggccgcatcccggctgaagtggacaacgaataccggccctacccctcaccaaacaccgtatcagctcgacccggccaacataactctggagccaatggaaatacgcactttccttgcgtcggttcagtggaaggaggtggatggt

SEQ ID NO: 11593 - DNA, 3033 bp, Artificial Sequence
  derived and/or modified sequence
atgggagcttatgcgcgggctagcggtgtgtgcgcacgggggtgcctcgactctgccggcccctggactatgagccgggctctgaggccaccgctcccccctctgtgctttttcctgcttctgctggcagcagccggcgcaagggctggcggctacgaaacgtgtcctactgtccaacccaacatgctcaatgtacatctcttacctcacacccacgatgacgtcggatggctcaaaacagttgaccagtacttctacggaattaaaaatgatatccaacatgcgggcgtccagtatatccttgactccgtcatcagtgctctgctggcagaccctacacgccgcttcatctacgtcgagattgccttcttttcaagatggtggcatcagcagaccaacgccactcaggaggtggtacgcgaccttgtgcgacagggaaggctcgaatttgcaaatggggggtgggtaatgaatgatgaagcagcgacacactacggtgccatcgtggaccagatgaccctcggcttgcggttccttgaggacacttttgggaacgatggcagaccccgtgtagcctggcatatcgatcctttcggccactctcgcgaacaggccagcctgtttgcgcaaatgggtttcgacggttttttcttcggaagattggattaccaagataagtgggtgaggatgcagaagctggaaatggagcaggtgtggagagccagcacaagcctgaagccgcctacagctgatctgttcactggcgtactgccgaatgggtataatccccccaggaatctgtgttgggatgtcctgtgcgtcgatcagcccctggtagaggaccccaggagtccagaatataacgcgaaggagttggtagattattttctgaacgtggccaccgctcagggacgttattaccgcacaaatcacaccgtcatgacgatgggcagcgatttccagtacgaaaacgccaatatgtggttcaagaacttggataaactaatccgcctggtgaacgcacagcaagcaaaaggttcctcggtgcacgtgttgtatagtacccccgcgtgctatctgtgggagctgaataaagcaaatttgacatggagtgtcaagcacgacgatttttttccttatgccgacggaccgcatcagttttggactggctacttcagcagtcggcccgctttgaagcggtatgagcgcctcagttataatttcctccaagtctgtaaccagctcgaggcattggtggggctcgccgctaacgtgggtccttacggttcaggcgacagcgctccacttaatgaagccatggccgtgctccagcaccacgatgcagtcagcggtacctcaagacagcatgtggccaatgactatgctcgtcagctggccgctgggtggggaccatgtgaggttcttctcagcaacgctttggcacgattgcgtgggttcaaggaccattttaccttttgccagcagctcaatatctcaatttgccctcttagtcagactgctgcccgcttccaggtcatcgtgtacaacccactcgggaggaaagtgaattggatggttcgcctgccagtgtctgaaggtgtgttcgtagtgaaggatcccaacggccgtacagtgccttccgacgttgtgattttccccagcagtgactctcaagcccaccctcctgaattgcttttctctgcctcactccccgcactgggcttttccacctacagtgtcgcgcaggtaccccgctggaaaccacaggcacgggcaccccagcccattccgaggcggtcttggagtcccgcacttaccattgagaacgagcatatccgcgccaccttcgacccagacaccggtcttctcatggaaatcatgaatatgaaccagcagctccttctgcctgtgcgtcaaacgtttttctggtacaacgccagcattggtgataatgaatcagatcaggcctcgggcgcctacatcttccggcctaatcagcaaaagccgctgccagtgtctaggtgggcccagattcatttggtgaagactcccttagtgcaggaagtgcatcaaaacttcagcgcttggtgtagtcaagttgtgcgcctgtaccccggacagagacatctcgaactggaatggagcgtcggaccaattccagttggcgatacatgggggaaggaggtgatttctcggttcgatacccccctggagaccaaagggcgcttctacacagacagtaatgggagagagattctggagaggcgacgcgattaccgccctacatggaaactgaatcagaccgaacctgtggctggaaactactatcccgtgaacaccagaatctacatcacagacggaaatatgcagctgaccgtgctgaccgacaggtcccaggggggatcatctctgcgagatggaagcctggagttaatggtgcatagacgcctcttaaaagatgatgggcggggcgtatctgagcctctgatggaaaacggtagcggagcctgggtaagaggcaggcatttggtgctcctggataccgctcaagctgccgccgctggacacaggttgttggccgaacaagaagtgcttgctccgcaagtggtcctggccccgggcgggggagctgcctataacctaggcgcacctccgagaacccaatttagtgggctgcggcgagatctgcccccaagtgtgcacctattaacattggcttcttggggccccgaaatggtgctacttcggctagagcatcagttcgctgtgggagaggatagtggccggaacttaagcgctcctgtcactttgaacctccgtgatctctttagcacattcaccatcacaaggcttcaagagacaacactcgttgcaaaccagttgagagaagccgcaagccgactcaaatggactacgaatacaggacccactcctcaccaaaccccttaccagcttgaccctgccaacatcacgctcgaaccaatggaaatccgtacattcctggctagtgtgcaatggaaggaggtggatggg

SEQ ID NO: 11594 - DNA, 3033 bp, Artificial Sequence
  derived and/or modified sequence
atgggggcatacgcgcgggcaagcggagtgtgtgcccgtggctgtctcgattcggcggggccgtggacgatgtcccgggctctcagaccgccactgccgcctctttgcttttttctgctcctccttgctgcggcaggggcccgcgccgggggttatgaaacctgccccaccgtgcaacctaatatgctgaacgtccatctgcttcctcatactcatgacgatgtcggatggctcaaaaccgtggatcaatacttctacggtattaagaacgatatccaacacgctggtgtgcagtacattttggattcagtgatttccgcgctgctggcggatccaactcgcaggtttatctacgtggaaatagcattcttttccaggtggtggcatcagcagaccaacgcaacccaggaggtggtccgtgatctggtcaggcagggtagactggagttcgccaacggaggttgggtcatgaatgacgaagccgcaacgcattacggagcaatcgtcgatcagatgacgctggggctgcggtttctggaggataccttcgggaatgatggtaggcctagagtggcctggcatattgaccccttcggacactcaagggaacaagctagcctgtttgcacagatgggttttgatggattcttttttggacggttggattaccaggataaatgggtgagaatgcagaaacttgagatggaacaggtctggcgagcgtccacttccctgaagccacctactgcagatctgtttacgggtgtcctgccgaacggttacaatccaccaaggaacctgtgttgggacgtgctttgtgtggatcagccactggtggaagatcccagatcccctgaatacaacgcaaaagagctggtcgactacttccttaacgtggcgaccgcacagggcaggtattacaggactaaccataccgtgatgactatgggttcggacttccagtacgagaatgcaaatatgtggttcaagaatctggataagctcattagactcgtgaacgcacaacaagcaaagggatcgagcgtgcatgtcctttatagcactcccgcgtgttacctgtgggagctcaacaaggccaacctgacctggtctgtcaagcacgacgatttcttcccatacgcagatggcccacatcagttctggaccggatactttagctcgcggccagcactgaagcggtacgaacgccttagctacaatttcctgcaggtgtgcaatcaattggaagctcttgtgggtttggctgcaaatgtgggtccctacggatctggagattcggcgcccctcaacgaagcgatggcggtgctgcaacatcatgatgccgtgtcgggaacctccagacagcatgttgcgaatgattacgcacggcaactggctgcgggttggggaccttgtgaagtgcttctttcgaacgccttggccagactgagaggttttaaggaccattttacgttttgccaacaacttaacatcagcatctgtccactttctcaaactgccgcacgattccaagtcattgtctacaatccacttggtagaaaggtcaactggatggtgcggctgcctgtgtcagagggtgtctttgtggtgaaggatccaaatggacggactgtgccatccgacgtggtcatttttccgagtagcgacagccaagcgcaccctccagagctgctgtttagtgcgtcgttgcctgcactcggattttccacgtacagcgtggcacaagtcccacggtggaaaccacaagcaagagccccccaacccatcccacgtcggtcatggtcgcccgcccttactattgaaaacgagcatattcgcgccactttcgatcccgacactgggctgctcatggagattatgaatatgaaccaacaactgttgctgcccgttagacagaccttcttctggtacaatgcgagcattggcgataacgaatccgatcaagcatcgggtgcatacatatttcgaccgaatcagcagaagcctctgcccgtctcacgttgggcacaaatccacctggtgaaaacgccacttgtgcaagaggtgcaccaaaacttttcggcctggtgtagccaagtggttcgtctctacccagggcaaagacatctggaactcgaatggtcggtgggccccattcctgtgggagatacttggggaaaagaggtgatttctcgatttgatacccctcttgagactaaaggtcgcttctacaccgactccaatggaagagagatcttggaacggaggcgtgattacaggcctacctggaagctcaatcaaactgaacctgtggcaggtaactactacccggtaaacacccgcatttacataaccgacggtaacatgcaacttacggtgctcaccgatcgcagccagggtggatcatccttgcgcgacgggagcttggaactgatggtccaccgccggttgctgaaggatgatggccgtggcgtctctgaacctctgatggaaaatggctcaggtgcctgggtgagaggtcggcatcttgtccttctcgataccgcacaggcagcagcggctggacatagacttttggcagaacaagaagtgctcgcacctcaggtcgtccttgcacccggcggcggtgcagcatacaacctgggagcacctccgagaactcaattttctgggctgagaagggatcttcctccttcggtgcacctgctcactctcgcatcgtgggggcctgaaatggtactcctgagactggagcatcagttcgcagtgggtgaggattcaggcagaaatctttccgccccagtgactcttaacctgagagatttgttttccacgtttactattacccggcttcaggaaaccaccctggtcgcaaatcaacttcgcgaggccgcatccaggcttaagtggactactaacaccggacctacgccacaccagacgccataccagcttgacccagcgaatatcaccctcgagccgatggagatccgcactttcctggcttccgtgcaatggaaggaggtggatgga

SEQ ID NO: 11595 - DNA, 3033 bp, Artificial Sequence
  derived and/or modified sequence
atgggcgcctacgccagagccagcggcgtgtgcgcccggggctgcctcgactcggccggcccctggacaatgagcagagcattaaggccaccgctgccaccactctgcttcttcctcctcctcctggccgccgctggcgcgcgagccggggggtatgaaacctgtccaaccgtccaacctaatatgctgaacgtgcatctgcttccacacacccatgacgatgttggctggctgaagacagtcgatcagtacttctatggcatcaaaaatgacatccagcatgcaggggtgcagtacattctggatagcgtgatatcagctctcttggcagatccaacacgccgatttatctatgttgaaattgcctttttctcacgctggtggcaccagcagacgaatgctacccaggaggtcgtccgggatttggtgcgtcaagggcggctggagtttgccaatggcggatgggtgatgaatgacgaagccgcaacgcactatggtgccatcgtcgaccagatgaccttggggttacggttcctggaagacacatttggtaacgacggaagaccacgagtggcttggcatatcgaccctttcggccattctcgagagcaggcctctctctttgctcagatgggtttcgacggattcttctttgggagactggattaccaagacaaatgggttagaatgcagaagcttgagatggagcaagtgtggcgcgcctcaacctcactaaaaccaccgaccgcagatctcttcaccggcgtacttcccaacggctataatcccccaagaaacctttgttgggatgtgttgtgcgttgatcagcccctagtagaggatccgcgctctcccgagtacaacgccaaggaacttgtggattacttcttgaacgtcgccaccgcacagggcaggtattaccgaacgaatcacaccgtgatgaccatgggctccgactttcaatatgagaatgctaacatgtggttcaaaaacctggataagctcatcaggctggtgaacgcacagcaggctaagggcagctcagtacacgtgctgtactctaccccggcctgttatctctgggagctgaacaaagccaacctgacatggagcgtgaaacatgatgactttttcccgtatgccgacggtccgcatcagttttggacagggtacttctcgtctcgacccgcccttaagcgatacgagcgactctcctacaatttcctacaagtgtgcaaccagttggaggccctagtgggccttgccgcaaacgtgggcccctacggctccggagactccgcgccattaaacgaggcgatggcagtactgcagcatcacgatgccgtaagtgggacatctagacagcacgtggctaatgattatgcccgacagttagctgcggggtgggggccgtgtgaagtgctcctcagcaatgccctggctcgcctgcgggggtttaaagaccatttcaccttttgccaacagctgaatatcagcatctgcccccttagccaaactgcggcccggtttcaggttatcgtttataacccacttggtcgcaaggtgaactggatggtgcgactgccagtgagcgaaggagtgttcgttgtgaaggatcctaatgggcgaaccgtgccatctgacgtcgttatcttcccatcatcggatagccaggcacatccacctgaactgttgttttccgcctccttgccggctcttggcttctccacctacagtgtggcccaggttcctcgctggaaacctcaggctagagcacctcagcccattcctcgaagatcttggagtcccgctctaactattgagaatgaacacattcgcgctacctttgacccggacactggtttgttgatggaaattatgaacatgaaccagcagctccttttaccagtgaggcagacattcttctggtacaacgcatcaatcggagacaacgagtccgatcaggcgagtggcgcttacatctttagacctaatcagcaaaaaccactgcctgtctcccggtgggcccagatccatctggtgaagacccccctggtccaagaggttcaccagaacttctccgcctggtgttcacaggttgtccggctttaccctggccagcgccatctagaattggagtggtcagtgggtcccatcccggtcggagatacctggggaaaagaagtgatttcaaggtttgatactcccctggaaaccaaggggagattttacacggactccaatgggagggagattctggagcggaggagggattatcggccaacgtggaaactcaaccagaccgagccggttgctggaaactactaccccgtcaatactcggatttacattaccgatggtaacatgcagctaactgtgctgacagatcggtcacaaggaggatcctcactgcgcgatgggagtctggagctgatggtccaccggcggctgttgaaggatgatggacggggcgtgtcagagcccctcatggaaaacggcagtggagcctgggtacgaggccgccacctagtcctgttggacactgctcaggcagccgcggccggccaccgcctccttgcagagcaggaggtgcttgcacctcaggtggttttggccccgggcggaggcgctgcgtataacctcggcgctccacccagaactcagttctccgggctgagacgcgaccttcctccgtcagttcatctactgacgcttgcgtcgtggggacctgaaatggtcctgctgcggctggagcaccaatttgccgtaggggaagactctggccggaatctgagcgcgcctgtgaccttgaacctgagggatttgttttccacgttcacgatcacacgattgcaggaaaccactctggttgctaaccaacttcgagaggctgcatcaaggttgaaatggactaccaatactggaccgaccccccaccagaccccttaccaactcgacccagcgaacattactttggagcccatggaaattaggaccttcctcgcaagcgtccagtggaaagaggtagatggt

SEQ ID NO: 11596 - DNA, 3033 bp, Artificial Sequence
  derived and/or modified sequence
atgggagcctacgcccgtgcgtctggagtgtgtgccaggggctgtctcgatagcgccggcccttggactatgtcccgcgccctgaggcctcccttgccacctctctgttttttcctgctcctgttggcagctgccggcgccagagcaggtggatacgaaacttgccctaccgtgcagcccaatatgctgaatgtgcaccttctcccccatacacacgatgacgtgggctggctaaagacagtggaccagtatttttatgggataaaaaatgacatccaacatgcaggtgtgcagtatatcttagactcagtcatatctgccctgctcgcagaccccacccggcggtttatctacgtcgagattgcctttttctcgaggtggtggcaccagcagacgaacgcaacccaagaagtggtgcgagacttggtaagacagggccgactcgagtttgctaatgggggatgggtgatgaatgacgaggcagctactcactatggagctatcgtggaccaaatgacgcttggcctgcgatttctggaggacaccttcggtaatgacgggcgaccgcgagtggcttggcacatcgaccccttcgggcatagtagggagcaggctagcttatttgcccagatgggttttgacggcttcttttttggcagactcgattaccaggataagtgggtgcgaatgcagaagctcgagatggaacaagtctggcgagctagcactagtctgaagcctccaactgctgatctttttactggggtccttcctaatggatataaccccccacggaacctctgttgggatgtactttgcgtggatcaacccctcgtcgaggatccacgcagccccgaatacaatgccaaagagcttgtggactacttcctcaatgtggccactgctcaaggccggtactacagaacaaaccatacggtcatgactatggggagcgattttcagtatgaaaatgcgaatatgtggttcaagaatctggataagctgatccgactcgttaatgcacaacaagcgaaaggctcatcagtgcatgtcctctattcgaccccagcctgctacttgtgggaactgaataaggcgaacctgacatggtctgtgaagcacgatgacttctttccatatgctgacgggcctcaccagttttggacagggtacttcagctctagacccgcactcaagcggtacgaacgcctgagttacaattttctgcaggtgtgcaatcaacttgaagccctcgttggtctggcagctaacgtggggccctacgggagcggagactccgctcccctaaacgaagccatggccgttctgcagcatcatgatgctgtaagcggaacctccagacagcacgttgccaatgattacgcacgacagctggcggcaggttgggggccatgcgaggtgctgctgtctaacgcacttgctcggctgcgaggattcaaagaccacttcacgttctgccagcagctgaatattagcatatgccccctatctcagactgcagcaaggtttcaggtcattgtatataatccgcttggtcgaaaagttaactggatggtccgactacctgttagcgagggtgtgttcgtcgtgaaggatcccaatggtagaaccgtcccctccgacgtggtgatttttcctagctctgactcccaggcccatcctccagagttgctgttctctgcttccctgccagccctagggtttagcacctactccgtggctcaggtccccaggtggaaacctcaggcaagagctccccagcctatcccacgaaggtcttggagccccgccttgaccatcgaaaacgagcacatccgagccacattcgaccctgacacaggacttttgatggagattatgaatatgaaccagcagctccttctcccagtgaggcagaccttcttttggtacaacgcgtccatcggggataatgaatcagatcaagcttcgggagcgtacatctttcgaccaaatcagcagaagccgttgcccgtttcccggtgggctcagatccacctagtgaaaacccctctggtccaggaggtccatcagaactttagcgcctggtgcagccaggtagtgcggctataccccggacagagacatttggaactggaatggtctgtcgggcccattcccgtaggcgatacatgggggaaggaagtgatttcgcggttcgatactccactggagacgaagggtagattctacaccgactctaatggcagagagatcctggagaggcgacgagattatcgacccacgtggaaattgaatcagacagaaccagtggcgggtaattactatcccgtgaataccaggatctatattactgatggtaatatgcagctaacagtgctgaccgaccgtagccaaggcgggtctagcctccgggatggctccctggaactgatggtgcacagacgcttactcaaagacgacggacgaggagtgagcgagccgcttatggaaaacggaagcggagcctgggtcagagggagacacctcgtgcttctggataccgctcaggcagcggctgcaggccatcgcctactagcggaacaggaggtgctggcaccacaggtggttttggctcctggggggggagctgcatacaacttgggcgctccccctaggactcagttcagtggcttgcggagggatctccccccaagcgtgcatcttcttaccttggcaagctggggaccggaaatggtgctgctacgactcgaacaccaattcgccgtgggggaggattctggccggaatctatccgcccctgtgacactaaatttaagggacttattttcaacctttacaatcacacgtcttcaggaaacaacactggtcgccaatcaacttcgagaggcggcgtctcgactgaagtggaccacaaacacaggccctaccccccatcagaccccctatcagctggacccagctaacatcacactagaaccaatggaaatcaggacattccttgcctctgttcaatggaaagaagtggacggg

SEQ ID NO: 11597 - DNA, 3033 bp, Artificial Sequence
  derived and/or modified sequence
atgggcgcctacgcccgtgccagtggggtgtgcgccagaggctgtttggactctgccggcccgtggaccatgtctagagccctgagacctccactccccccactctgttttttcctactcctgctcgccgcggctggcgcccgggctggtggatacgaaacatgcccaactgttcagcccaatatgctgaacgtgcatctgttgccacatactcacgacgacgtgggctggctcaaaactgtcgaccagtacttctacgggattaaaaacgatatccaacacgccggtgtgcaatacattttagacagtgtgatttccgcgctgttagccgacccaacgcgaagatttatttatgtggagatcgctttcttcagtcgttggtggcaccagcagactaatgcaactcaggaagtagtgagggatcttgtgcgccaaggaaggctggagtttgcaaacggtgggtgggtgatgaacgacgaagccgccactcactatggcgcaatcgtcgatcagatgactttgggcctgcgtttccttgaagatacatttggaaacgatggccgcccacgggtagcctggcacattgatcctttcggccactcacgggagcaggccagccttttcgctcagatgggattcgatggcttttttttcggcagactggactaccaggacaaatgggtgaggatgcaaaagctggagatggaacaagtttggcgcgcctctacaagcctgaagccccctaccgccgacctgtttactggcgttcttcctaatgggtacaatccaccccggaacttgtgctgggacgtcctgtgtgtcgaccagccgctggtagaagatccacgaagcccagagtataatgctaaggagcttgtcgactattttcttaacgtcgcgactgctcaggggagatattatagaaccaatcacacagtaatgaccatgggtagtgacttccaatatgagaatgctaacatgtggttcaagaacttagacaagttaatcagactggtgaacgctcagcaggcaaagggctctagtgttcatgtgctctatagtaccccagcctgttacttgtgggaattgaacaaggcaaacctgacatggagcgtaaagcatgatgacttcttcccctatgccgatggcccgcaccagttctggactggatattttagtagcaggccagctctcaaaagatatgagaggctcagctataactttctgcaggtgtgtaatcagctggaggcccttgtgggtctcgccgcaaatgtaggaccatacgggagtggtgactctgctccactgaacgaggccatggcagtgttgcagcaccacgacgctgtgtccgggactagccgccagcacgtggctaacgattacgctcgacagcttgccgccggatgggggccgtgtgaggtgttgctctccaacgcattggctcggttacgaggcttcaaagatcattttacattttgtcaacaattgaacatcagcatctgccccctcagtcagaccgcagcccgcttccaggttattgtttataacccccttgggcggaaggtcaattggatggtgcggctgcccgtgtcagagggggtctttgtggttaaggatcctaatggaaggaccgtgccttccgacgtggtgatctttcctagtagtgactcacaggcccacccccctgaacttctgttttccgcttcattaccagcgcttggtttctcaacatacagtgttgcacaggtcccaagatggaagcctcaagcccgcgccccccagccaatcccccgcagatcatggtcccctgcgctgaccatagaaaacgagcacatccgggcaacctttgatccggataccggcctgttaatggagatcatgaacatgaaccagcagctgctcctaccagtaaggcagacttttttctggtataatgcctccataggcgataacgagtctgatcaggccagcggcgcctacatattcaggccaaaccagcagaagcctctgccggtgagccggtgggcgcaaatacaccttgtgaaaaccccgcttgttcaagaggtgcaccagaatttctctgcttggtgttctcaagtggtacggctgtaccctggccaacgccatctggagctcgagtggagtgttggtccaatacccgtgggtgatacctggggcaaagaagtgattagccggttcgatacacccctggagactaaggggcgattctacacagactctaacggtcgggaaatcctggaacgtcggagggattaccggccaacctggaagctcaaccagacggaacccgtggcgggcaactattacccggttaacactcgaatctacatcactgatgggaatatgcagctcacggttcttactgatcgaagccaaggtggcagttccctgcgcgacggaagccttgaactcatggttcaccggaggcttctcaaggacgatggacgcggggtcagcgaacctctaatggagaacggctcaggcgcttgggtacgcggacgccacctagtgctgctcgacacagctcaggctgcggccgctggccacaggctactcgccgagcaggaggtgctggcgccgcaggtggtcctggccccaggcggtggggccgcctacaacctcggcgcaccaccacggactcagttctccgggctacggagggatctgccacccagcgtgcatctgctgacgctggcgtcatggggccccgagatggttttgctgcgcctggagcaccagtttgctgtgggggaagatagcgggcggaacctgtccgctcctgtgaccctgaacttgagggatctgtttagtacatttaccattactaggttgcaggaaaccacacttgtcgccaaccagctaagggaagccgctagcaggctcaagtggactactaataccggacctactccacaccagaccccatatcagttggatccagccaacattactctcgagccaatggagataaggacattccttgccagcgtccaatggaaagaagtggacggc

SEQ ID NO: 11598 - DNA, 3033 bp, Artificial Sequence
  derived and/or modified sequence
atgggagcctacgcgcgggcctcaggggtgtgtgcgcgcggatgcttggactcagcgggcccttggactatgagccgggcgctgcgcccaccgcttcccccactgtgcttcttcctgctgcttcttgctgcggcgggagcaagagcgggaggatacgaaacctgcccaaccgtgcaaccgaacatgctcaatgtgcatctgctcccgcatacccacgacgatgtcgggtggttgaaaactgtggatcagtacttttacggaatcaaaaatgacatccagcacgcgggcgtgcaatacattctcgattccgtgatcagcgccctccttgcggacccaaccagaagattcatctacgtcgaaatcgcattcttctcgagatggtggcatcaacaaaccaatgcgacccaagaagtggtgcgtgatctcgtgagacaaggccgcctcgagtttgccaacggaggatgggtcatgaacgacgaagccgccactcactacggagcgatcgtggaccagatgactcttggacttagatttctggaagatacctttggaaacgatggtcgcccacgggtcgcgtggcacatcgatccattcggacactcacgggagcaggcgtcgctgttcgcccagatggggttcgacggatttttctttggccggctggactaccaggataagtgggtgaggatgcagaaactggaaatggaacaagtctggcgcgcatcaacctcactgaagccaccgaccgccgacctcttcactggcgtgctccctaacggctacaatccgccacggaatctctgttgggacgtgctgtgcgtggaccagccgctggtggaggacccgcgcagcccagaatacaatgccaaagagctggtggactattttctgaacgtggccaccgcgcagggtcgctactacaggactaaccataccgtgatgaccatgggctcggacttccagtacgaaaatgccaatatgtggttcaagaatctcgataagctcattcgcctggtgaacgctcaacaggcaaagggatcctccgtccatgttctctacagcactccggcgtgttacctgtgggagctcaataaggcgaatctgacttggtcggttaagcatgacgacttcttcccgtacgcagacggcccgcaccaattctggaccggctacttctcgtccagaccggcgctgaaacggtacgaacggctgtcgtacaactttctgcaagtgtgcaaccagctggaggctctcgtgggactggctgccaatgtgggaccttacggaagcggtgactctgccccgctgaacgaagctatggctgtgctccaacatcatgacgctgtgtccggaacttctcgacaacacgtcgctaacgactacgcaaggcagctggcagccgggtggggaccctgcgaagtgctcctctccaatgcgttggcccgcctgaggggattcaaagaccatttcaccttttgccagcaactgaacatcagcatctgcccgctgtcgcagactgccgcccgcttccaggtgattgtctacaaccctctgggccgaaaggttaactggatggttcgactgcctgtctcagaaggagtctttgtggtgaaggacccaaacggccggacggtcccgtcggatgtcgtcattttcccgtcctccgattcacaggcacatccgcctgagttgctgttctcggcgtcattgcccgcgctgggattttcgacctactcggtggcgcaagtccctcggtggaagcctcaagctcgggcaccgcaaccgatcccacgcagatcctggtccccagcattgaccatcgaaaacgagcatatccgggcaactttcgaccctgatactggactgctcatggagataatgaacatgaaccaacaactgctgcttccagtgcgccagacgttcttttggtacaacgctagcatcggggacaatgaatcggaccaggcctccggagcttacatcttccggcctaaccaacagaagccccttccggtgtcgagatgggcgcaaatccacctcgtaaagaccccgctggtgcaagaagtccatcaaaacttcagcgcatggtgctcccaggtcgtgaggctctacccgggccagcgccacctcgaactggaatggagcgtgggaccgattccagttggcgatacctgggggaaggaagtgatctcgagattcgacacgccgctcgaaactaagggacgcttctacactgatagcaacggtcgcgagatcctcgaacgcagaagggactaccggccgacctggaagctgaaccagaccgaacccgtggccggtaactactatcccgtgaacacccggatctacatcaccgacggaaatatgcaactcacggtgcttacggacagaagccagggcgggtcctccctgagggacgggagcctggagctcatggtgcatcgccgacttctgaaggatgacggacggggcgtaagtgagcctcttatggagaacggatcgggagcatgggtcaggggacgtcaccttgtcttgctcgatactgcccaagcagcggcggcaggccatagactgctcgctgagcaagaggtgctggctccacaagtcgtgcttgcccctggagggggagccgcttacaatctcggcgccccgccacgcacccaattctcaggactgcggcgcgacctgccaccgtccgtgcatctgctgacgctcgcctcgtggggaccagaaatggtcctgttgcgcctggagcaccagtttgctgtgggagaggactccggacgcaatctctctgccccggtgactttgaatcttagagatctcttctcgacctttactatcactcgcctgcaggaaactaccctcgtggcgaaccaactgcgagaagcagcatcacggctgaaatggaccaccaacactggaccgactccgcaccagacgccataccagctcgacccggccaacatcactctcgaaccaatggagattcgcacgtttctcgcgtccgttcaatggaaggaggtggatggt

SEQ ID NO: 11599 - DNA, 3033 bp, Artificial Sequence
  derived and/or modified sequence
atgggtgcctacgccagggcctctggggtctgtgcccggggctgtctcgattctgctggcccctggacaatgagccgagcccttagacctccactgccccctttatgctttttcctgctgctgctcgccgcggctggggctcgggctggtggctacgaaacttgccctacggtgcaacctaatatgctcaatgtgcacttgctcccacatactcatgacgacgtagggtggttaaaaactgttgaccaatatttctacggtattaagaacgacatccagcacgcgggggtccagtacattctggactccgtaatctctgctctgttggcggatcctacccggagatttatatatgtagagatcgctttttttagtaggtggtggcaccaacagacgaatgctacgcaagaagttgtgagggacctcgtgcggcaggggcgcctggagttcgctaacggaggctgggtcatgaatgatgaagctgcaacccactacggggccattgtcgaccagatgacacttgggctgcgttttctagaggacacttttggtaatgacgggcggcctagggtggcctggcatattgacccattcggccattcccgcgaacaggcctcgctgttcgcgcagatgggctttgacggctttttttttggtaggcttgactaccaggataagtgggtgcgtatgcaaaaattagagatggagcaggtgtggagggccagcacctccttgaaacctccaactgcagatttattcaccggcgtgttacctaacggttacaaccccccacgaaatctgtgttgggacgttctgtgtgtggaccaaccgcttgtcgaggaccctcgcagcccagaatataatgctaaggagctagtcgactacttcctgaatgtggcgactgcacagggccgctattaccgaaccaatcatacggttatgaccatgggaagtgatttccagtatgaaaacgctaacatgtggtttaagaacctagacaagctgatccgattggtgaatgcccaacaggccaagggtagttccgtgcacgtgctatactcaacacctgcttgttacctctgggagcttaataaagctaacctaacctggtccgtgaagcatgatgattttttcccgtatgcagatgggccccaccagttttggacaggctacttcagcagtagaccagcgcttaagcggtacgagcggctgtcgtacaacttcctccaagtttgtaatcagctagaggcattggtgggacttgccgccaatgttggcccgtacggctccggggattcggcgcctctgaacgaggccatggccgtcctgcagcaccatgacgcagtgagcggcacgagtcgacagcacgtggccaatgattatgcccggcagctggctgcgggttgggggccatgcgaggtgttgctctccaatgcccttgcacgattacgaggcttcaaagaccacttcaccttctgccaacagttgaatatcagcatctgtcctctgtcacaaaccgcagcccgttttcaggttatagtgtataacccactgggaaggaaagtgaactggatggtacggctgcctgtctccgaaggtgtgttcgtggtcaaggatccaaacggccgaactgtgccgtcagacgtggttatctttccctcctctgatagtcaggcgcatcccccagaacttcttttcagcgcctctctgccagccctcggcttttccacatacagcgtcgcacaagtccctcgatggaaaccacaggcccgggctcctcaacctattcctcgaaggtcctggtcccccgcattgacaatcgagaacgaacacatcagggccacctttgatcctgatacggggctccttatggagattatgaacatgaatcagcagctgctccttcctgtgagacagacgttcttctggtacaacgcctccatcggggataatgaatctgaccaggcttccggggcgtacatcttccgacccaatcagcagaaacccctgccggtctcgcgatgggctcagattcacttagtcaagactcccctagtgcaggaagtacaccagaacttttccgcctggtgctcacaggtggtgaggctgtatcccggacagagacacttggagctggaatggtctgttgggccgatacctgtgggcgacacttggggcaaggaggttatatccagatttgacactcccctggagacaaagggcaggttttataccgattccaacggtagggaaatcctagaacgacgcagggactataggcccacttggaagctgaaccagaccgagccggtcgctggtaactattaccctgtaaacacccgcatttacattaccgacggtaacatgcaactcacagtgttgactgataggtcccagggcgggagcagcttgagggatggtagtctggagctgatggtgcacaggcggctgctcaaagatgatggccgaggggtgagtgaaccccttatggaaaacgggtccggagcatgggtgagggggcggcatcttgtgcttctcgatactgcccaagcagctgcagcgggacacaggttgttggcggagcaggaagttctagctccccaagtggttctggctcctggcgggggtgccgcctacaacctgggggctccccctcgcacacagttttcaggactgcgcagggatttgcctcctagcgtgcacctgctgactctagcgtcatgggggcccgaaatggtgctcctgaggctggaacatcagttcgcagtaggagaggatagcggacgtaatctgagcgccccagtcacactcaacctgagagacctattttccacgtttacaattacgaggctgcaggagaccaccctggtggcaaaccagctcagagaggctgcttctagacttaagtggaccaccaacaccggacctaccccccaccagacaccatatcagcttgaccccgcaaatattactctggagcccatggagatccgtacattcttggcgtctgtgcaatggaaggaagtggatgga

SEQ ID NO: 11600 - DNA, 3033 bp, Artificial Sequence
  derived and/or modified sequence
atgggcgcgtatgcacgcgccagcggcgtctgcgcacgcggatgcctggattctgccggtccctggaccatgtctcgcgcactcagaccccccctgccaccactgtgctttttcctcctcctgttggctgcagccggcgcccgcgccggaggatatgagacctgtcccacagttcagccaaacatgctgaatgtccacttgttgccccacactcatgatgacgtgggatggctgaagacagtagaccagtatttctatggtatcaagaacgatatccagcacgccggtgtccagtacattctggacagcgttatatccgcgttgctggctgatcctacaagaaggttcatctatgtcgagatcgcattcttctcccgctggtggcaccagcagaccaacgctacacaggaggtggtccgcgacctggttagacagggaaggctggaattcgcaaacggcggctgggtgatgaacgatgaagcagcgacccactacggtgctatcgtggaccagatgacactcggactgcgcttcctcgaagacacattcggcaatgacggaagacctagggtggcgtggcacattgatcctttcggtcacagccgcgaacaagcctctttgttcgcacagatgggcttcgatggctttttctttggccgcctcgactatcaggacaaatgggtaaggatgcagaagctcgagatggaacaggtgtggcgcgcctcaacatcactgaaaccccccacggcagacttgttcaccggtgttctgccaaacggctacaaccccccacgcaacctttgctgggatgtgctgtgcgtggaccagcccctggtagaggaccccaggtctccagaatacaacgcaaaggaactggtagactactttctcaacgtggctactgcccagggaaggtactacagaactaaccataccgtcatgaccatgggaagcgatttccaatatgagaacgctaacatgtggttcaagaacttggacaagctgattcgcctcgtgaacgcccagcaggccaaaggatcctcagtccatgtcctgtactcaactcccgcctgttacctgtgggaattgaacaaagcaaatctgacttggtcagttaaacatgatgacttctttccttatgctgatggtccgcatcagttctggaccggttacttctctagccgcccggctctgaaaagatacgaaaggttgtcttacaactttctgcaagtgtgtaaccaactcgaagctctggtgggtctggcagctaacgtgggaccttacggcagcggtgactcagcccccttgaacgaagctatggctgttctccaacatcacgatgccgtcagcggtaccagccgccaacacgttgccaatgactacgccagacagctggccgctggatggggaccttgcgaggtcctgctctccaatgccctcgctagactgagaggctttaaggaccatttcacgttctgccagcaattgaatatttccatatgtccactttcccagacagccgcaagattccaggtcatagtctataacccattgggaagaaaagtgaactggatggtgcgcctgcccgtctccgagggcgtctttgtggtcaaggatccgaatggcagaacagtgcctagcgacgttgttatttttccatctagcgattctcaggcccacccccctgagttgcttttctctgctagtctgcccgctttgggattctctacatactccgtggcccaggttccaaggtggaaaccacaagctcgcgcacctcagccaattcctaggcgctcatggagccctgctctcacaattgagaacgagcacatcagggcaaccttcgacccagatacgggattgctcatggagatcatgaatatgaatcaacagttgctcctgccggtccgccagactttcttttggtacaatgcctcaattggagacaatgagagcgatcaagcttcaggcgcatatatttttcgccccaaccagcaaaagcccttgcctgtgtctaggtgggcccagatacacctggtaaaaactcccttggtccaagaagtacaccagaatttttctgcttggtgttctcaggtagtgaggctctatccaggtcaaaggcacctggagctcgagtggtctgtgggccctatccctgtcggtgatacatggggcaaagaggttatctcccgctttgatactcctctggaaacgaaaggccgcttctacacagacagcaacggccgcgaaatcctggagagaagaagagactacaggcctacctggaagctcaaccagactgaacccgtcgccggcaattactatcctgtgaatactaggatctacatcacagacggcaacatgcagctgaccgtgcttactgacaggtctcagggcggctccagcctgcgcgacggcagcttggagttgatggtgcatcgcaggcttctgaaggacgacggacgcggagtgtcagagccgcttatggaaaacggttccggagcgtgggtgaggggccgccatctggtcctcttggacacggcgcaagccgcagctgccggccatagactcctcgccgagcaagaggtgctcgcccctcaggttgtcctggctccaggtggcggcgctgcctataacctgggtgctccccccaggactcagttctcaggactgcgcagggacctgcctccaagcgtgcatctgcttacacttgcttcatggggccccgagatggtgttgctcagactggaacaccagttcgccgtaggtgaagattctggcagaaacctctccgcccctgtaaccctgaacctcagggatttgttctctaccttcactattaccagacttcaggagaccaccctggtagccaatcagcttcgcgaggctgcctcaagattgaagtggaccaccaatactggtcccacaccccaccagacaccatatcagttggatccggctaatatcaccctggaacccatggagatcaggacgttcctggcttcagtccagtggaaggaagtggatgga

SEQ ID NO: 11601 - DNA, 3033 bp, Artificial Sequence
  derived and/or modified sequence
atgggggcatatgcacgcgcctctggcgtatgcgctcgtggatgtttggattcagccgggccatggacaatgtcgcgtgctttgcgcccgcccctgccacctctgtgctttttcttgttgctcttggctgccgctggcgcaagagcaggaggatacgagacatgtccgacagtccagcccaacatgctgaacgtgcacctgctcccccacacacatgacgatgtgggatggctgaaaacagtggaccagtacttttacgggataaaaaacgatattcagcacgcgggcgttcaatacattctggattccgtgattagtgctctgctcgctgatcccacccggagattcatttacgtggagattgcgttcttctcccgatggtggcaccaacagacaaatgcaacacaggaagtggtccgggatcttgtccggcagggcaggctggaattcgcaaatggcggttgggtcatgaacgacgaggccgccactcactacggggctatcgtagaccagatgacgctgggcctccggtttctggaggataccttcggcaatgatggtcgtcctcgtgtggcttggcatattgatccctttggacacagcagggagcaagcttcgctttttgcccaaatgggattcgatgggttctttttcggacggctcgactaccaagataagtgggtgagaatgcagaagctagaaatggagcaggtgtggagggccagcaccagcctgaagccaccaactgctgatttattcactggggttctacctaacgggtacaatccaccccgcaacctgtgctgggatgtgctgtgcgtcgatcagcctttagtggaagacccacgctcccccgagtacaatgccaaagagctggtcgactatttcctgaacgtcgcgacggcacaagggagatactatcgcaccaaccataccgtgatgaccatgggcagtgattttcagtatgagaatgccaatatgtggtttaagaatctggacaaactgataaggctggtaaacgctcagcaggccaaaggatcctccgttcacgtcctgtattctaccccagcttgttatctgtgggagctaaacaaggcgaatttgacatggtctgtgaagcacgacgacttcttcccatacgccgatgggccccatcagttctggacgggctatttcagcagccgtccggccctcaagaggtacgagcgcctttcgtataacttcctgcaggtgtgcaaccaattggaagctctggtgggactggcagccaatgtgggtccatacgggtctggcgactcagctcctctgaatgaggctatggccgtgctccaacatcacgatgcggtgagtgggacatcccgacagcacgtcgcgaatgattacgcccggcagctggccgctggctggggcccttgtgaggtgctgctgtctaatgccctggcccgcctgagagggtttaaggatcacttcacattttgccagcagctgaatatctctatttgccccctgtctcagacggcagctaggtttcaggtgatcgtgtacaatcctcttggacggaaagtcaattggatggttcgcttgccggtgtcagaaggcgtgtttgtggtgaaagacccaaacggcaggaccgttccatcggatgtggtgattttccccagctccgacagtcaagctcatccaccagagcttctattctctgctagcctgcctgcactcgggttcagcacctactccgtggcccaggtgccaaggtggaagcctcaggcccgcgccccccaacccatcccgagacggagttggagtcccgcgttgaccatagaaaatgaacatatccgcgccacctttgatcctgataccggactcctcatggaaattatgaacatgaatcagcagcttctcctccctgtgagacaaaccttcttctggtacaacgccagcattggggacaacgagtcagatcaggcgagtggtgcttatatattccgtccaaaccaacagaagccacttcctgtgtcacgctgggcccaaatccacctagtcaagacaccattggtccaagaggtgcaccagaatttctcggcctggtgcagtcaagtcgtgcggctctatcctgggcagaggcacctggaactggagtggagtgtcggacctatccctgtgggtgacacatggggtaaggaggtcattagccgtttcgatacccctctcgagaccaaaggccgattctacacggactctaatggaagagagatactcgaaaggagaagagattatagaccaacctggaagttgaaccaaactgagcctgtggctggaaactactaccccgtcaatacacgcatctacattacggacggcaatatgcagctcacggtgctaaccgaccgatcccagggcgggagctccctcagggatggatctttggagctcatggtgcacaggagactcctcaaagatgacgggcggggcgtgagtgagccccttatggaaaacgggtcgggcgcatgggtccgaggcaggcatttagtgctcctggatacagcccaggccgccgccgcaggtcataggttgctggctgaacaggaggtactggccccacaggtagtgctcgctcccggaggcggagccgcctacaacctgggggcacctccacggactcaattttccggcctcagaagggacctgccaccctcagtgcacttgcttaccctggcttcatggggtccagagatggtgctgctgcgtctcgaacatcagtttgccgtaggagaagattcgggcaggaatctgtctgcacctgtgacattgaacttacgggacttgttttccacttttactatcacacggctccaggagacaacactggtggctaatcagctgcgtgaagcagcctcacggctgaagtggacgactaatactggccctacccctcatcagacaccatatcagctcgatccagctaacatcaccctggagcctatggaaatcaggacgtttctggctagcgtgcagtggaaggaagtggatggg

SEQ ID NO: 11602 - DNA, 3033 bp, Artificial Sequence
  derived and/or modified sequence
atgggagcatacgcgagagccagcggagtgtgtgcaaggggatgtctcgacagcgcaggaccgtggacgatgtcgagagctctccggccacccctgccgcctctgtgcttcttcctgcttctccttgcagctgcaggcgctcgagcgggcgggtacgagacgtgtccaaccgtgcagccaaacatgttgaatgtgcatctgcttcctcatacccacgatgacgtgggatggctgaagactgtcgatcagtacttttacggaatcaagaatgatatccagcacgccggcgtccagtacatcctggactcggtgatctccgcactgctggcggatccgactagaaggttcatctacgtggaaatcgcgttcttctcaagatggtggcaccaacaaaccaatgctacgcaggaggtcgtgagggacctggtccgccagggtagactggaatttgcgaacggaggatgggtgatgaacgacgaagcagcgactcattacggtgcaatcgtcgaccaaatgaccctcggactgcgattcctcgaagatactttcgggaacgacggacgcccacgcgtggcctggcatattgacccgtttggccattccagagaacaggcctcactgttcgcccaaatgggattcgacggattcttttttggacgcctcgactaccaagacaaatgggtgaggatgcaaaaacttgagatggaacaagtgtggcgggccagcacctccctgaaacctccaaccgccgacctgttcaccggagtgctgccgaacggatacaaccctccacgcaatttgtgctgggacgtgctgtgtgtcgaccagccgctggtggaagacccgaggagcccggaatacaatgcgaaagagcttgtcgattacttcctgaacgtggccaccgctcagggccgctattaccgcaccaaccataccgtgatgactatggggtccgactttcagtacgagaatgcaaatatgtggttcaagaacctcgacaagctgatccgcctggttaacgcacagcaggccaagggttctagcgtccacgtgctgtactcaactcccgcctgttacctctgggaacttaacaaggctaacttgacttggtccgtcaagcacgatgatttctttccgtacgcggacggccctcatcaattctggacgggttacttttcatcacgaccagcgctcaaacgctacgaacgcctctcgtacaattttctgcaagtctgcaatcagttggaagccctcgtcggcctggctgcgaatgtgggaccatacggctcgggggacagcgcgccactgaacgaagcaatggccgtgctccagcaccacgacgcagtgtcaggcacttctcggcagcatgtggcaaacgactacgcgcgccagctggcagcgggatggggaccatgcgaggtgctcctgtcgaacgctcttgcgagactgaggggtttcaaagaccactttactttctgtcaacagctgaacatcagcatctgcccgctgtcgcaaaccgccgcgcggttccaggtgatcgtgtacaatcccctggggcgcaaggtgaactggatggtgaggctgccagtctccgagggggtgtttgtcgtgaaagatccaaatgggcgcaccgtgccatcagatgtcgtgatcttcccatcgtcagactcgcaggctcatccgcccgaactgctcttctcggcatccctcccggccctgggattctcaacctacagcgtggcgcaggtgccccgctggaagcctcaggccagagccccccaaccgattcctaggagatcgtggtccccggcgctgactatcgagaacgagcacatcagagccactttcgacccagacaccggacttctgatggagatcatgaacatgaatcagcaactccttctgcctgtgcggcagaccttcttttggtacaacgcctccattggagacaacgaatcggaccaggcatcgggcgcctacatctttcgccctaatcagcaaaaaccgctgccggtttcccgctgggcccaaatccatctggtgaaaaccccactggtccaagaagtgcaccagaatttctccgcgtggtgctcgcaagtggtgcggctgtacccggggcaacgccacctggagctggagtggtcagtcggaccaatcccggtgggagacacttggggcaaggaggtcatctcgcggttcgacactccactggaaaccaagggcaggttctacaccgatagcaatggccgggaaattctggaaaggagacgggactaccggcctacctggaaactgaatcagacggaaccagtggccggtaattactatccagtgaacactcgcatctacatcactgacggaaacatgcagttgactgtccttactgaccggtcgcagggaggatccagcttgcgcgatggctccctcgaactgatggtccatcggcgcctccttaaggacgatggccggggtgtgagcgaaccgctcatggaaaatggctcgggagcctgggtgcgcggacgccacctggtgctgctcgacaccgcgcaggccgccgccgccggccatcggctgctggcagaacaggaagtcctggcgcctcaggtggtgctcgcccccggaggaggagcggcgtacaatctgggcgccccgccgcgcacgcagttttccggactcaggcgcgaccttccgccttccgttcatcttttgaccctggcctcgtggggaccagagatggttctcctgcgcctggaacatcaatttgccgtcggcgaagattccggcagaaacctgagcgctcccgtcacgctcaatctgcgggacctctttagcaccttcaccatcaccagattgcaggagactacgctggtcgctaatcaactgcgggaggccgccagccgcctcaagtggaccactaatactggccctaccccacaccaaaccccgtatcaattggatcccgcgaacatcaccctcgaacctatggaaatccgcaccttcctggccagcgtgcagtggaaggaggtcgacgga

SEQ ID NO: 11603 - DNA, 3033 bp, Artificial Sequence
  derived and/or modified sequence
atgggtgcatacgcacgtgcctcgggggtgtgcgcaaggggctgtctcgattccgcaggcccctggactatgtctagggcacttagaccacctctgccaccactctgttttttcctgctgctgcttgcggcggccggagcacgcgcaggaggttacgaaacctgccctactgtccaaccgaacatgctcaacgtccatctgttgccacacacgcatgatgacgtcgggtggctgaaaactgttgatcaatacttttacggaattaagaacgacatacaacacgcaggcgtgcaatacattcttgatagtgtcatctcggcactgctggcagacccgactcgccggttcatctatgtcgaaattgctttcttcagcagatggtggcatcagcagaccaacgctactcaagaagtggtgcgggatttggtacgccaaggcagacttgagttcgcgaatggagggtgggtcatgaatgatgaagcagccacccattacggggcaattgtcgaccagatgactttgggattgcggttccttgaagatacttttggaaacgacggtagaccacgagtggcgtggcatattgatccgttcggccactctcgcgaacaagccagcttgtttgcccagatgggctttgacggttttttcttcggcagactcgattaccaggacaaatgggttagaatgcagaagctggaaatggaacaggtgtggcgggccagcacgtcgctcaagccccctaccgcagacctgttcacgggggtcctgccaaacggctacaacccgccgaggaatctttgctgggacgtcctctgtgtggaccaacctctggtcgaggatccgcgttcaccggaatacaacgcaaaggagctggtcgactactttttgaatgtcgcgactgcacaggggagatactacagaacgaatcacaccgtgatgaccatgggaagcgactttcagtacgagaatgcaaacatgtggtttaagaacctggataaactcatccgcttggtgaacgctcaacaggcgaagggatcatcagtgcacgtcctgtacagcacccccgcgtgttacctctgggaactgaataaggcaaaccttacctggtccgttaaacatgacgatttcttcccttacgcagatgggcctcatcagttttggactgggtacttttcctccaggccagctcttaaacgttacgagcgcttgagttacaactttctgcaagtgtgtaatcaattggaagctcttgtcggactggccgcaaatgtgggtccttacggctcgggcgattcagctcctctcaacgaagcaatggcagtgttgcagcatcacgatgccgtctcgggaacgtcccgccaacatgtagctaacgactatgcgcggcagcttgcagcaggctggggtccttgcgaggtgcttctgtcaaatgcactggcccgccttagaggattcaaggaccactttaccttttgtcaacagcttaacatttcaatttgtcccctgtcccaaaccgcagccagattccaagtgatcgtgtataacccactgggaagaaaggtgaactggatggtccgcctcccagtctcagagggagtgtttgtggtgaaagatcctaacggaagaaccgtgccatcagatgtggtgatctttccttccagcgattcccaagcacaccctccagaacttttgttttcggcctcccttccggcccttggattttccacttacagcgtagcacaggtgcctaggtggaagccccaagcccgtgcaccccaacctatacctagacggtcgtggtcccctgcacttactatcgagaatgaacacatcagagcaacctttgatccagatactggactgctcatggagattatgaatatgaaccagcaacttctgctgccagtgcgacagactttcttttggtataacgcatcgattggtgataatgagtcagatcaggccagcggagcctacattttccggccaaatcaacaaaagccacttcctgtgtcccgctgggctcagatccatctcgtcaagacgccgcttgtgcaagaagtccatcaaaacttctccgcatggtgttcgcaggtggtgaggctgtaccctggacagcgccacctggaactcgagtggtcggtgggtcccattcctgtgggagatacctggggtaaggaagtgatctcgcggtttgataccccactggaaactaaaggacgtttttacactgattctaacgggcgggaaatcctggagcgcaggagagactaccgcccaacttggaagttgaatcaaaccgagcctgtcgcaggcaactactaccccgtgaatacccgtatatacataacggatggtaacatgcaactgaccgtgctgacggaccggtcacagggtggaagcagccttagagacggatctcttgagctcatggtgcatcggagactgcttaaggatgatggccggggtgtctccgaacccctgatggagaacggctcgggtgcctgggttcgcgggagacatctggtgttgctcgatacggcccaggcagccgcagcagggcatagattgctggcggagcaagaagtgctcgcccctcaagttgtgcttgcccctggtgggggagccgcttacaatctgggcgcgccgcctcggactcagttttccggacttcgcagggacctgcccccatcggtgcatctgttgaccctggcgtcctggggacctgaaatggtgcttctgaggcttgaacaccagtttgcggtgggtgaggatagcggtcggaacttgtcagcaccggtcaccctcaacctccgcgacctcttctcgacctttactattacccgcctgcaggagactactcttgtggcaaatcaactcagggaagcggcctctcggctgaagtggacgaccaataccggccccaccccacatcagactccctaccagctcgaccctgcaaacattacccttgaacctatggagattaggacctttttggcatcagtgcaatggaaagaagtggatgga

SEQ ID NO: 11604 - DNA, 3033 bp, Artificial Sequence
  derived and/or modified sequence
atgggggcatacgcccgcgctagcggagtgtgtgcccgcggttgtctggatagcgcaggaccatggacgatgtcccgggccttgcgcccgccgcttccgccactgtgcttcttccttctgctgctggcggcggccggcgcgagagccggaggttacgaaacttgcccgactgtgcagccaaatatgttgaatgtgcatctgctcccacacacccacgatgacgtgggctggctgaaaaccgttgatcagtatttctacggcattaagaacgatatccagcatgccggagtgcaatacattctcgattcagtgatctccgcgctgctggcagacccgactcggagattcatctacgtcgagatcgcattcttctcacgctggtggcaccagcaaaccaacgcgacccaggaggttgtcagggacctcgttcggcaggggcgcctggagttcgccaatggcggatgggtgatgaacgacgaggccgcgacccactacggcgcaatcgtcgaccagatgactctcggtctgcggttcttggaagatactttcggcaatgatggacgcccgcgagtcgcgtggcacatcgacccattcggccattcgcgggaacaggcctccctgttcgcccagatgggcttcgatggatttttcttcggaaggcttgattaccaggacaagtgggtccggatgcagaagctggaaatggaacaagtctggagagccagcacttcactcaagccaccaacggccgatttgtttactggagtgctgccaaatggttacaatcctccgcgcaatctgtgctgggacgtgctgtgcgtggaccagcctctcgtggaagatccgcgctcccccgagtataatgcaaaggaactggtcgactacttcctcaatgtggccactgcccaaggacgctactaccggaccaaccatactgtgatgactatgggatcagatttccagtacgaaaacgcgaatatgtggttcaagaacttggacaaactcatccgcttggtgaacgcccagcaggccaagggttcgtccgtccacgtcctgtactcgactcccgcatgctacttgtgggagctcaacaaagcaaatcttacgtggtcagtgaagcatgatgacttttttccgtacgcagatggcccccaccaattctggaccggatacttctcctcaaggccggcgctgaagaggtacgaaagactgtcgtataacttccttcaggtgtgcaaccagttggaagcactcgtgggcctggcggccaatgtcggaccctacggaagcggagattcggcaccgttgaacgaagccatggcggtcctgcaacaccacgacgcagtgtccggcacctcacgccagcacgtcgctaacgattacgctaggcagctggccgcgggttgggggccctgtgaggtgctgctgagcaacgcgctggcccggctgcgcgggtttaaagatcactttaccttttgtcaacagctgaacatatccatctgccccctcagccagaccgcagccagatttcaggtgatcgtgtacaatcctcttggccgcaaggtgaattggatggtgcgcctgccagtgagtgaaggagtgttcgtggtgaaggacccgaatggaagaaccgtgccatcggatgtggtgattttcccgtcgagcgacagccaggcccatcctccggaactcctgttcagtgcatcactgcccgctctgggattctcaacttactccgtggcacaggtgcctcggtggaaacctcaggccagggctcctcaaccgatcccgcgacggagctggtccccagccctcaccatcgaaaacgagcacatccgggccactttcgatcctgatactggactcctcatggaaatcatgaacatgaaccagcagctcctcctgcccgttcggcagactttcttttggtacaacgcaagcattggggataacgaatccgatcaggcatccggagcttacatcttccgtccgaaccaacaaaagccactgcctgtgtcgcgctgggcccagatccatctggtgaaaaccccgcttgtccaagaggtgcaccagaacttcagcgcctggtgttcccaggtggtccggttgtatcctgggcaaagacacctggaactggaatggtcggtgggacctataccagtcggagatacttggggtaaggaggtaatctcccgctttgatactccgctggagactaagggccggttttacactgattcgaatgggagagaaattctcgagagacggcgggactaccgccctacttggaagctcaaccagaccgagccagtggcgggaaactactacccggtgaacacccggatctacatcactgatggaaatatgcagctgactgtcctgactgaccgatcacagggcggctcatcgctgcgggatggcagcttggaactgatggtccatcgccggctcttgaaggacgacggacggggtgtctccgaacccctgatggaaaacggctcaggggcgtgggtgcggggacggcacctcgtactcctggataccgcacaggctgctgccgcgggccatcgactgttggccgagcaggaggtcttggctcctcaggttgtccttgcaccaggagggggcgctgcatataacctcggcgctccgccgcgcacccaattctcgggactccgccgcgatctgccaccgtccgtgcatcttcttaccttggcgtcctgggggccggaaatggtgctcctccggctggaacatcagtttgctgtgggcgaggactcgggacgaaatctctcagctccagtgacgctgaatctgcgcgacctgttcagcaccttcaccatcaccaggttgcaagagacgaccctggtcgcaaaccagctgcgcgaggccgctagccggcttaagtggaccaccaacactggtccgaccccgcaccaaacgccctaccaactggatccagccaacataacgctcgaaccgatggaaatccgcaccttcctggcctcggtgcaatggaaagaagtcgacgga

SEQ ID NO: 11605 - DNA, 3033 bp, Artificial Sequence
  derived and/or modified sequence
atgggcgcatacgcaagggcgagcggggtgtgtgcaagaggctgtcttgatagcgccggaccctggactatgtcgcgcgctcttcgccctccactgccacctttgtgcttttttctcctgctgttggcagcagcaggggcgagagcaggtggatacgagacgtgccccaccgtgcagcccaacatgcttaatgtgcacctgctgcctcacacgcatgatgatgtgggatggctgaaaactgtggaccaatacttctacgggataaagaatgacattcaacatgcgggcgttcagtacatcctcgatagcgtcatatccgcgcttctggctgaccccacccgtagattcatatacgtggaaatcgcctttttctcgagatggtggcatcaacagactaatgcaacccaagaagtcgtgagggatctggttcggcagggacgcctcgaattcgcaaatggtggatgggtgatgaacgatgaagctgcaacccattacggagcaatcgttgatcagatgactctggggctgcgcttcctcgaagatacgtttggaaatgacggtagacctagggtcgcatggcatattgacccgttcggacatagccgcgaacaggcatcgctttttgcgcagatgggctttgatgggttctttttcggacgactcgactaccaagacaagtgggtccgcatgcaaaaactggagatggaacaggtttggcgcgcgtcaacgtcgcttaaaccgcctaccgcagatctttttaccggtgtcctcccgaatggatacaatccgccgagaaacctttgctgggatgtgctctgcgtggaccagcccctggtcgaagatcccagatcgccagaatacaatgcgaaggagttggtggactactttcttaatgtggcaaccgcacagggaagatactacaggaccaatcacaccgtgatgactatgggctccgactttcagtacgaaaacgctaacatgtggtttaagaaccttgacaaactgattagacttgtcaacgcacaacaggcgaagggatcctcagttcatgtcttgtattccactcctgcgtgctatctttgggaactgaataaggccaatctcacctggtccgtgaaacatgatgatttcttcccgtacgccgatggacctcatcagttttggactggatacttttcatccagaccagcactcaagcggtacgaacgcctcagctacaactttctgcaagtgtgcaatcagcttgaagccctggtggggttggctgccaacgtgggtccatacggcagcggtgattcagcgccacttaacgaggcaatggccgtgttgcagcaccatgatgcagtgtctggtactagccgccagcacgtggcaaacgattatgcacggcagctggcagcaggatggggaccatgtgaagtcctgctgtctaacgcgctggcaaggctccgcggatttaaggatcattttacgttctgtcaacagcttaacatctcgatttgccctctctcccaaactgccgcacggtttcaagtgattgtgtacaatcctctcggacgaaaggtcaactggatggtgagacttccggtgtccgaaggcgtgtttgtggtgaaagaccctaacggaagaacggtgccgtcggatgtcgtgatctttccatcatcggactcgcaagcccatccccccgagctgctcttcagcgcgagccttcccgctctgggattttccacttattccgtcgcacaagtgcctagatggaagccgcaagcaagggccccacaaccaatccctaggcggtcctggtcccctgcactgactatcgaaaacgagcatattcgtgcaacttttgatccggataccgggctgctgatggagattatgaacatgaatcaacagctgctcctgcctgtccgacaaaccttcttttggtacaacgcaagcatcggggacaatgagtcggaccaagcaagcggggcatacatctttagacccaaccagcaaaagcctcttcccgtgtccaggtgggcacagatccacctggtcaagacccccctggttcaagaagtgcatcagaactttagcgcctggtgttcacaagtcgttcgtctttaccctggtcagcgacatctcgagttggaatggtcggtgggccccattccagtgggggatacctggggcaaggaggtgattagccggtttgataccccccttgaaaccaagggacgcttttacactgacagcaacgggcgtgagattcttgaacggagacgggattacagacctacttggaagctgaaccaaaccgaaccagtcgccggtaattactaccctgttaataccagaatttacattaccgacggcaatatgcagctgaccgtgttgaccgaccgctcacaaggaggaagctccctgcgcgacggttccttggagctcatggtgcaccggagactgcttaaggacgatggacgaggcgtgtccgaaccactgatggagaacggatccggcgcctgggtgcggggaaggcaccttgtcctgctggataccgcccaagcagcagctgcaggtcataggctcttggcagaacaagaagtgcttgcaccacaggttgtgctggcccccgggggaggcgcggcttacaacttgggagcaccacctcggactcagttctcggggctcaggcgcgatcttcccccatcggtccacctgttgaccctggcctcatggggacctgagatggtcctgctgcgtctggaacatcagtttgcagtgggggaagatagcgggaggaacctctccgcacctgtgacccttaacctgcgcgaccttttttcaacctttactattaccagactccaggagactaccctcgtcgcgaaccagcttcgcgaggccgcatccagactcaagtggaccacgaatacgggtccaacgccacaccaaactccctaccagcttgatccggctaacattactcttgaaccaatggaaatcagaacttttctcgcaagcgtgcaatggaaagaggtcgatggt

SEQ ID NO: 11606 - DNA, 3033 bp, Artificial Sequence
  derived and/or modified sequence
atgggggcatacgccagagcgtcgggcgtgtgcgcccgcgggtgtctcgactcggcgggaccatggactatgtcacgggccctgcgacctccactgcccccgctctgcttctttcttctgcttctggccgccgccggcgccagagcgggaggttacgagacttgcccgactgtccagccgaacatgctgaacgttcacctcctcccgcatactcatgacgatgtcgggtggcttaagaccgtggatcaatacttttatggaatcaagaacgacatccagcacgcaggcgtgcagtacatcctggactcggtgatctccgccctcctggccgacccaacccggaggttcatctacgtggaaatcgcttttttctcgagatggtggcaccagcaaaccaacgccacccaggaagtggtgcgtgacctcgtccgccaggggagactggaattcgcaaacgggggatgggtcatgaacgacgaagcggccacccattacggagcgatcgtggatcaaatgactctgggccttcgtttcctggaagatacgttcggcaacgacggacggccgcgcgtggcctggcatatcgaccccttcggccactcgcgcgagcaggcgtcactgttcgctcagatgggtttcgacggtttcttttttggaaggctcgattaccaggacaaatgggtccggatgcagaaacttgagatggagcaagtctggcgggcttccacttccctcaaaccgccgaccgcggacctctttaccggggtgcttccaaacggatacaatccccccaggaatctctgctgggatgttctgtgcgtggaccaacctctggtcgaagatccgcgttcgccggagtacaacgccaaggaacttgtggactatttcctgaacgtggccaccgcgcaagggcgctattaccgcacgaaccacaccgtgatgactatgggaagcgacttccaatacgagaacgcaaatatgtggttcaaaaatctggacaagctgataagactggtcaacgcgcagcaggcgaagggctcctccgtgcatgtcctttacagcactcccgcttgctatctgtgggaactgaataaggcaaacctcacctggtccgtgaagcatgatgatttctttccttacgccgacggaccgcaccaattctggactggatacttctcgtcccggccggcgctgaaaagatacgagcgcctgtcatacaacttcctccaggtctgtaatcaactggaagccttggttggcttggccgccaacgtgggcccgtacggatcaggcgacagtgccccactgaatgaagccatggcggtgctgcaacatcatgacgcagtgtccggaacttcacgtcaacacgtcgcgaacgattacgcccgccaattggccgcgggctggggaccgtgtgaagtgctgctctccaatgctctggcccgcttgcgcggattcaaggatcatttcactttctgccaacagttgaatatctccatctgcccactgtcgcagaccgccgccagatttcaggtgattgtgtacaatcctctgggtaggaaggtgaactggatggtgagactgccagtgtcggaaggagtctttgtggtcaaggacccgaacggccgaaccgtgccgtcagatgtggtgattttcccatcctcggattcgcaagctcacccgccagagctgctgttctccgctagcctccctgccttggggttctcgacctactccgtggcccaggtaccacggtggaaaccccaggcgcgggccccacaaccgattccacgccgctcctggtcgccagccctcactattgagaacgaacatatccgcgcgactttcgatccggacaccgggctcctgatggagatcatgaacatgaatcaacagctgctcctgcccgtccgccagactttcttttggtacaacgcgtccatcggggacaacgagtccgaccaagcctcaggcgcctacatcttccggccaaatcaacaaaagcctctccctgtgtcgagatgggcgcaaatccatctggtgaaaacgccactggtgcaggaggtccaccaaaacttctcagcttggtgctcccaggttgtgcggctgtacccaggacagcgccacctggagcttgaatggtcggtgggcccgatcccggtgggcgacacctgggggaaagaagtcatctcaaggttcgacaccccgcttgaaaccaaaggacggttctacacggactccaacggccgcgagattctcgaaaggcgcagggactacagaccgacttggaagctcaaccaaacggaaccggtggctgggaattactacccggtgaacacccgcatctacatcacggatggaaacatgcagcttactgtgctcactgatcgctcgcagggcggatcgtccctccgggatggttcgctggagctgatggtgcaccgccgcctgctcaaggatgacggaaggggtgtgtcggagccgctgatggagaacgggtcaggggcctgggtgcgcggacggcacctggtgttgctcgacaccgcccaggccgcagctgccggacatcggctgctggccgaacaagaagttctcgctccgcaagtggtcctcgcgccgggcggtggagcagcgtacaacctgggcgcaccacctcggacccaattctctggactgaggcgcgacctccctccatcggtgcatctgctgacccttgccagctggggaccagaaatggtgctgctgcgactcgaacaccagttcgccgtcggtgaagattcgggaagaaacttgtccgcccctgtgactctgaacctgcgggatctgttctcgaccttcaccatcacgcggttgcaagagactacccttgtcgcaaaccaactccgggaagctgcatccaggttgaagtggacgaccaataccggcccgactccacatcagactccgtatcagctggacccagcaaatatcaccctcgaacctatggaaatccgcaccttcctggcttctgtgcaatggaaggaagtggatgga

SEQ ID NO: 11607 - DNA, 3033 bp, Artificial Sequence
  derived and/or modified sequence
atgggagcatatgcccgcgcatccggggtgtgtgccagaggatgccttgattccgcagggccctggacaatgtctcgagccttgcgacccccccttcctcccctttgttttttccttctcctcctagcagcagccggagctagagccggagggtacgaaacttgcccaactgtccagcccaatatgctcaatgtccacctcctcccccatacacatgacgatgtgggatggctcaaaactgtggatcagtatttttatggaatcaaaaatgatatacagcatgccggggtccagtacattttagattccgtgatctccgcccttctggctgacccaactaggagatttatttatgttgagatagcgttcttttcccggtggtggcaccagcagacaaatgctactcaggaagttgtgcgagatctagtaagacaggggagacttgagttcgccaacggagggtgggtgatgaatgatgaagcagcaacacattacggagcaattgtggaccagatgactcttgggctgagattcctcgaagatacttttggaaacgatggacgccccagagtcgcatggcatattgatcccttcgggcactctagggaacaggccagtttatttgcacagatggggttcgatggattcttttttggaaggctcgactatcaggataagtgggtgcggatgcagaaacttgaaatggaacaggtctggcgggcttctacgagtctgaaaccccctacagctgatctttttactggggtacttccaaacgggtataaccccccccgaaacctctgctgggatgtgctctgtgtggatcagcctcttgtagaagatcccagatcccccgaatataatgctaaagaactggttgattattttcttaatgttgcaacagcccaggggcggtattatagaacaaatcacactgtgatgacaatggggtctgatttccagtatgaaaacgctaatatgtggtttaaaaacctcgataagttgatccggctcgttaacgctcagcaggctaaagggtcttccgtgcatgtactctattccacacccgcatgctacctttgggaactaaacaaagccaatttaacatggagtgtgaaacatgatgatttctttccctatgcagatggaccccaccagttttggacaggatatttttcttcccggcccgccctcaaacggtatgaaaggctttcatacaattttctccaggtctgcaaccagctggaagctctggtagggttggctgccaatgtgggaccatatgggtctggggattccgcccctttgaacgaggctatggctgttctgcagcatcatgatgcagtcagtgggacatccagacagcatgtcgccaatgattatgcccggcagttggccgccgggtgggggccatgcgaagtacttctgtccaacgccttagctagacttcgtggatttaaggatcatttcactttttgtcagcagctcaacataagtatttgtccactctcacagactgcagcaaggtttcaggttatcgtttacaaccccttgggacggaaggtgaattggatggttcggctgcccgtttctgaaggagtttttgttgtaaaagatcccaacggacgtacagtaccctctgacgttgtcatatttccttcaagtgattcacaggcacatccccccgaactgctcttctcagcatcccttcctgcgctggggttctccacttattctgtggcccaggtgcccaggtggaaaccacaggcccgggctccccagccaatccctaggcgcagttggagtccggctcttacaatcgaaaatgaacatataagggccactttcgaccctgatactggactcctcatggaaatcatgaatatgaatcagcagctcctgctgcccgtgaggcagacatttttttggtataacgcatctattggggacaacgaatccgatcaggcctctggagcctatatattcaggccaaatcagcagaaacccctcccagtttctcggtgggctcagatccatttagtgaaaacaccactcgtgcaggaagtccaccagaacttttctgcatggtgttcgcaggtggtgaggctttaccctgggcagcggcatcttgaattagaatggagtgtgggacccattcctgtcggggatacgtgggggaaagaagtaatatcgaggtttgatacaccccttgagacaaaaggaagattctatactgattctaatggaagggagatccttgaaaggcgaagagattataggcctacttggaaactcaatcagacagaacccgtagccggaaattactaccccgtgaatacaaggatatatataacagatgggaatatgcagcttactgtactgacagatcggtctcagggagggtcctccttaagggatggatccttggaactcatggtgcaccggcggctgctcaaggatgacggacggggagtgtccgaaccactcatggaaaacgggtccggagcatgggttagggggcgacatctggtgctcctggacacagctcaggcggcagcggctgggcaccggctactcgcagaacaggaagtgctggctcctcaagttgtgcttgctcctggagggggggctgcatacaatcttggggctcctcctcgaactcagttttctggactacggcgagacctcccccctagtgtccatttgcttactctggcatcctggggaccagaaatggtactcttacggctggaacaccagttcgccgtgggagaagattctgggcgtaacctaagtgcgccggtgactcttaatcttagggaccttttttcaacttttacaattactcgcctccaggaaacaactctggtcgctaatcagctccgagaagccgcatccaggctgaaatggactactaatacaggacccactccacaccagacaccttatcagctcgatcccgccaacattacactggaacccatggagatccgaacttttctggcatcagtccagtggaaagaagtagatgga

SEQ ID NO: 11608 - DNA, 3033 bp, Artificial Sequence
  derived and/or modified sequence
atgggagcttatgctagggcatcgggtgtttgtgctcgaggatgcttagactccgctgggccatggactatgagtcgtgccctcagaccgcctctgcctccactttgtttcttccttctgcttttggccgctgctggtgccagagctggaggatatgaaacctgtcccactgttcaacccaacatgttaaacgtgcatcttttgcctcacactcacgacgatgttggatggttaaaaacagttgatcagtatttttatggaattaagaacgatatccaacacgctggtgtgcaatatattcttgactctgttatatcagcgttacttgcggatccgactagacgatttatttatgtggaaatcgcatttttctccagatggtggcatcaacagactaacgctacacaagaggttgtacgtgatctggttaggcaaggccgattagagttcgcaaatggtgggtgggtgatgaacgacgaagctgccacacactatggtgctattgttgatcagatgactttgggtttgagattcctcgaagatacatttggtaacgatggacgccctagggtagcctggcatattgatccatttggtcactcaagggaacaagccagtttatttgcgcaaatgggtttcgatggtttctttttcggcaggttggactatcaggataaatgggtcagaatgcagaaattagaaatggaacaggtttggcgcgcctccacttctcttaaacccccaacggctgatctatttactggagtcctccccaatgggtataatccccccagaaatctgtgttgggatgttctatgcgtcgatcagccattagtggaagatcccaggtccccagaatataacgcaaaggagctggtcgattatttccttaacgttgctactgctcagggtagatattaccgtacgaatcacacagtgatgaccatgggatcggacttccaatatgaaaacgctaatatgtggttcaaaaatctagataagcttatcaggcttgtcaacgctcaacaagctaaaggaagttcagttcatgtattgtatagcacacctgcttgctacctgtgggaacttaacaaagcaaacttgacctggtctgttaaacatgatgatttctttccttacgccgatggacctcatcaattctggacgggttacttctcatcgagacccgcacttaagaggtacgagagactttcttacaacttcttgcaggtctgcaaccaattagaagctcttgtaggtcttgctgctaacgtgggtccgtatggttctggagattcagcaccgttaaatgaagctatggcggtgctccaacaccatgatgctgtttccggcacatccaggcaacatgttgctaatgattatgcccgacagcttgctgctggctggggtccgtgtgaggtccttctctcaaatgctttggctaggcttcgtggtttcaaggatcatttcaccttttgccaacaattaaatatctctatctgccctctgtcacagacagctgcaaggtttcaagtgattgtttacaacccattgggaaggaaggttaattggatggttaggttgcctgtgtctgagggggtctttgtggtgaaggatccaaacggacgaacggttccgtcagatgttgtcatttttcctagcagtgattctcaggcacatccacccgaactgcttttttccgcctccctgccagcactgggttttagcacctacagtgttgcccaggtacctagatggaaacctcaggcccgagcccctcagcctattcctagacggagctggtctcctgctcttaccattgagaatgagcacatccgagctacatttgatcctgataccgggttactcatggaaattatgaatatgaaccagcagctacttttaccagtgcgtcaaacttttttttggtataacgcttccattggggataacgaatccgatcaagcatccggtgcatatatttttagaccaaatcaacaaaagccactgcccgtctctaggtgggcacaaatacatttggtcaaaacaccacttgtacaagaagttcaccagaacttttctgcctggtgcagccaagtggtaagactttatccaggccaaagacatttggagttggaatggtctgttgggccaataccagtaggcgatacatggggtaaggaggttatctcccggttcgacacaccattggaaaccaaggggcgtttctacactgattccaacggccgcgaaatattggagaggagacgggattatcgacctacttggaagcttaaccagacggagcctgtggctggtaattactatccagttaacacgcgaatttatataacagacgggaatatgcagctgactgtgcttacagatagaagccagggggggagctcgttgagggatgggtcccttgagttaatggttcatcgtcgactcctcaaagatgacggtaggggggtgtcggaaccattgatggagaatgggtctggcgcatgggtgaggggccgacatttggttcttttggacactgcccaggcagctgcagcaggtcaccgcttgttggctgagcaggaagttcttgcaccacaagtcgtgctggctccaggtggcggtgcagcttacaacctgggtgcacctcctaggacacagttttcaggactcaggagagatttacctccttctgtacatcttcttacactggctagctggggtcccgagatggtattgctgcggcttgaacaccaatttgctgttggagaggatagtggtaggaatttatctgcacctgtgacacttaatctcagagatttgttctccacctttactatcacaaggctacaagagacaacgctcgtagctaaccagctcagagaggcggctagtcgtcttaagtggacaacaaatacaggtcctacccctcatcaaaccccttaccagcttgatcccgcgaacattaccttggagcctatggaaattaggacttttcttgcctctgtgcaatggaaggaggtcgacggg

SEQ ID NO: 11609 - DNA, 3033 bp, Artificial Sequence
  derived and/or modified sequence
atgggtgcatacgcacgtgcatccggcgtgtgtgcccgcggatgcctggattcggccggaccgtggactatgagccgagccttgaggccgccactgcccccactgtgctttttccttctcctgctggcagccgccggcgccagagctggaggatacgagacgtgcccaaccgtgcagcctaatatgctgaacgtgcacctcctgccgcatacccacgatgacgttgggtggctgaaaaccgtggaccaatacttttacggaatcaagaacgatatccagcatgccggcgtccagtacatccttgactcagtgatctcagccctcctggccgacccgacccggcgcttcatctacgtggagatcgcctttttctcccgctggtggcaccaacagactaacgctacccaagaggtggtccgggacctggtccgccagggacggctcgagttcgccaatggaggatgggtcatgaacgacgaagcagccactcactacggagccatcgtcgatcagatgactctgggcctgcggttcctggaagataccttcgggaacgatggacgaccacgcgtcgcctggcacatcgaccctttcggacattcgagagagcaggcatcattgttcgctcagatgggttttgatgggttcttcttcggacgcctcgattaccaagacaaatgggtgcgcatgcagaagctcgaaatggagcaggtgtggcgggcatccaccagcctgaagccgccgaccgccgacctcttcaccggagtcctgcccaacgggtacaatcccccgcgcaacctctgctgggacgtgctgtgtgtcgaccaacctctggtcgaggaccctcgctccccggaatacaatgccaaggagctcgtcgactacttcctcaacgtggctactgcgcagggaagatactatcggactaatcacactgtgatgacgatggggtccgacttccaatacgaaaatgcgaacatgtggttcaagaatctggataaactcatccggctcgtgaacgcgcagcaagccaaaggttcatccgtgcacgtgctttactcgactcccgcttgctacctctgggagctgaataaggccaatttgacctggtcggtcaagcatgatgacttcttcccatacgctgacggaccgcaccagttctggaccggttacttctcaagcagaccggccctgaagaggtacgaaagactctcgtacaacttcctccaggtgtgcaaccagctcgaagcgctggtcggactcgccgctaatgtgggaccatatggatcaggtgactcggcgcctctgaatgaggctatggccgtgctgcaacaccatgacgcggtgagcgggacctcccggcaacacgtcgcgaatgactacgcacggcaactggctgccggatggggaccttgcgaagtgctcctgtctaatgcactggcacggctgagaggcttcaaagaccacttcactttctgccagcaactgaacatttcgatttgccctctgtcccagactgccgcgagatttcaagtgattgtgtataacccgctgggaaggaaggttaactggatggtgcggttgcccgtgagcgaaggagtgttcgtcgtcaaggatccgaacggcagaactgtgccctccgacgttgtgatctttccttcctccgactcacaggcacacccgccggagttgcttttctcagcatcactgccggcgttgggcttcagcacttacagcgtggcgcaagtgccgaggtggaagccacaggcacgcgcgccccagcctatcccacgcagaagctggtcgccggcccttaccatcgaaaacgagcatatacgagcaaccttcgacccagatacgggcctgctcatggaaatcatgaacatgaaccagcaactcttgctgcccgtccgacagactttcttttggtacaacgcttcgatcggggacaatgagtccgatcaggccagtggagcctacatcttcaggcctaaccagcagaagcccctcccggtttcgcgctgggctcagatccacctggtgaaaaccccgttggttcaggaagtgcaccaaaatttttccgcgtggtgtagccaggtggtacgcctgtacccaggacagcggcatctggaactcgaatggtcagtgggtcctattccggtcggcgacacttggggcaaggaagtgatctcccgctttgacaccccattggaaaccaagggacgcttttacacggactccaacggcagggaaatcctggaacggagaagggattacagaccgacctggaaacttaaccagactgaaccagtggccggaaactactatccagtgaacacgcgcatttacatcaccgatggcaacatgcaactgactgtgctcaccgataggagccagggcggctcgtcgcttagagacggatcgctggagctgatggtccatcggcggctcctgaaggatgatggacgcggtgtgagcgagccgctgatggaaaatggctcgggcgcgtgggtccggggtcggcacctcgtcctgcttgacactgcccaggcggcggccgcgggacatcgccttctggctgaacaggaggtcttggccccacaggtggtgttggcgccggggggaggggcggcttacaatcttggcgcacctccgcgcacgcaattctctggtctgagacgggatctgccgccatcagtccatctgttgactctggctagctggggcccggagatggttctcctccgtcttgaacatcagtttgcagtgggggaagattctggacgcaacctgtcggccccagtgaccctcaacctgcgcgacctgttctccacctttacgatcacccggctgcaagaaaccactctggtggctaatcaactccgggaggccgcaagccgcctcaagtggaccactaacactggaccgaccccgcaccaaactccttaccagctggatccggcgaacatcaccctggaaccaatggagatcagaactttccttgcctcggtgcaatggaaggaggtggacgga

SEQ ID NO: 11610 - DNA, 3033 bp, Artificial Sequence
  derived and/or modified sequence
atgggggcatacgcacgcgcatccggcgtgtgtgcacgaggatgcctggattctgcaggcccttggaccatgtcaagagcgctgcgacctccactgccccctctgtgcttctttcttcttttgcttgctgccgcaggcgccagggccggcgggtacgagacctgtccaaccgtgcagcctaatatgctaaacgtacatctgctgcctcacactcacgacgatgttggctggctgaagaccgtagatcagtatttttatggcatcaagaacgacattcagcatgctggtgtgcagtacatcctggacagtgtgatctccgcgctgctcgcagatcctactcgtaggttcatctatgtggagattgcctttttttcgcgttggtggcaccaacagaccaatgccacgcaggaggtggtccgagatctggtgaggcaaggcagacttgagtttgcaaatggcggttgggttatgaacgatgaggctgctacccactacggcgctatagtggatcaaatgactctgggccttcggttcctggaggataccttcggaaacgacggacgaccacgcgtagcttggcatatcgaccccttcggtcacagtagagagcaggcctccctttttgctcagatggggttcgatgggttcttcttcggtagacttgactaccaggataagtgggtgagaatgcagaagcttgagatggagcaggtgtggagagcatcaaccagtttgaaacctcccacagcagatctgtttaccggtgttttacctaacgggtacaatccacctcggaatctgtgttgggatgttctgtgcgtagaccagcccctggtcgaggaccctcgatctccagaatataacgcaaaagaattggttgattatttcctcaacgtagccaccgcccagggcaggtactaccgaactaatcacacagtgatgacaatgggatcagattttcagtacgagaacgcaaatatgtggtttaagaatcttgataaattgatacgtcttgtcaatgcccagcaggctaagggaagcagtgtccatgtcctatatagtacccccgcatgctacctatgggagctgaacaaagccaatttaacttggtctgtaaagcacgacgatttttttccatatgcggatggaccacaccagttctggacgggatacttctcttcaaggcccgcgcttaaacgctacgagagactctcatacaattttctgcaagtgtgcaatcagttggaggcgttagtggggctggccgctaatgtgggcccatatggaagtggtgacagcgccccactcaacgaggccatggcagtgctgcagcatcacgacgcagtctccggcaccagtcgtcaacacgttgccaacgattatgcacgtcagctggccgccggatggggtccatgtgaggtgcttctgtcgaatgctttagccaggctgcgggggttcaaggaccacttcactttctgccaacagttaaatataagcatatgtccactctctcaaacagccgctcgctttcaggtgatcgtgtataaccctctggggcgcaaagtgaactggatggtgcgcctgccagtgtcagagggggtcttcgtcgtaaaggatcctaacgggagaactgtcccttctgatgttgtgatcttccccagtagtgactctcaggcccatccacctgagttgcttttttcagccagtctgcccgccctgggcttttcaacctattcagtggcccaggtgcccagatggaagccacaagcccgggccccccaaccaattcctaggcgctcatggagtcctgcacttacaattgaaaacgagcatattcgggccacctttgatccggacactggcttgttgatggagatcatgaatatgaatcagcagctgctgttgcccgtgcggcaaacatttttctggtacaatgcatctatcggggataatgagtctgaccaagccagtggcgcatatatttttagacctaaccagcagaaaccgctgcctgtcagccggtgggctcaaatccatttggtgaaaacgcctctagtgcaagaggtccatcaaaattttagtgcttggtgcagccaggtggttagactgtaccccggccagagacatctggagctggaatggtcagtcggtccgatccctgtgggtgatacttggggaaaagaggtcatttcaaggttcgacacacctctggagacaaaaggcaggttctacactgactctaacgggcgcgagattctagagaggcgcagggactatcggccgacttggaaacttaatcagacggaacctgttgccggcaattattatcccgtcaatacacgtatctacattaccgacggcaatatgcagctcacagttttgactgaccggtcccagggcggcagctccttacgggacgggtccctcgagttgatggtgcaccggaggctcctgaaggatgacggccgcggcgtgtccgagcctttgatggagaacggatccggagcctgggtgagaggtcgccacttggtgctgcttgacactgcccaggcagctgctgccgggcaccggcttctggccgaacaagaggtgctggcgccacaggtagtattggcaccaggggggggtgctgcctacaatctgggtgcacccccacggactcagtttagcggcttacggcgggaccttccaccttctgtgcatctgctgacattggcctcatgggggcctgagatggtgcttctgaggttggagcaccagtttgccgtgggcgaagattcagggcgtaacttgtcggcgcctgtgaccctgaatctaagggaccttttttctacattcactataacacggctacaagagaccacactcgtggccaatcaactcagggaagccgcctctcggttgaagtggactaccaacaccggtccaacaccacatcagaccccttatcagctggatcccgccaatatcacactcgagcctatggaaattcgtacctttctcgctagtgtacaatggaaggaggtggacggg

SEQ ID NO: 11611 - DNA, 3033 bp, Artificial Sequence
  derived and/or modified sequence
atgggtgcatacgctagagcaagcggtgtctgtgcaagggggtgcctcgacagcgcagggccttggacaatgtcgagggcactccggcctccgttgccccccttgtgctttttccttttgttgctcgctgccgccggagcgcgcgcaggcgggtacgagacctgcccaacagtgcagcccaacatgcttaatgtgcacttgctgcctcatactcatgatgacgtcggttggctcaaaactgtggatcaatatttttacggtataaaaaacgatatacagcatgctggcgtccagtatatcttggacagtgttatttcagctctgctcgccgaccccactcgcaggtttatttatgttgaaattgcctttttctcgaggtggtggcaccaacagaccaacgcaacccaagaggttgtgcgtgatttggtgcgccagggcagattagaattcgcaaacgggggttgggtcatgaacgatgaagctgccactcattacggagccatagtggatcagatgacgcttggtctccgttttcttgaagacacttttggtaacgacggacggcctagggtggcttggcatatcgatcctttcggtcattctagagaacaggcctccctctttgcccaaatgggattcgatggtttcttcttcgggcgcctggattaccaggataagtgggtccggatgcaaaagctggagatggagcaggtatggagggcctcgacctctctgaaacccccaactgctgacctatttactggagtattgcctaacggctataatccgccaagaaacctttgttgggacgtcctgtgcgtcgatcaaccactggtggaggatcctcgcagtcctgaatacaacgccaaggagttggtggactactttctgaacgtcgcaaccgcacaaggaaggtattatagaaccaatcacaccgtgatgaccatgggaagcgatttccagtacgaaaatgctaacatgtggtttaaaaacctggacaagctgatcagactcgttaacgctcagcaggccaagggtagcagcgtccacgttctttattccacacccgcatgctacctttgggagctgaacaaggccaacctgacttggagcgtgaaacacgacgacttctttccttacgcggacgggccacaccagttttggacaggctatttcagctcccggcctgcactgaaaaggtacgagaggctgtcatataacttcctgcaagtgtgcaaccaactggaggccctcgtgggccttgctgctaacgtcggtccgtacggcagtggagacagcgctccactgaacgaggccatggcggtgctgcaacatcacgatgctgtatccggcaccagtcgccaacacgttgctaacgattacgcgaggcaactggccgccggctggggtccttgtgaagttctgttatccaacgctctagctaggcttcggggttttaaagaccacttcaccttctgccaacagcttaacatctcgatctgccctttaagccaaaccgcagcccgattccaggtgattgtgtacaacccactcggaagaaaggtcaattggatggttcgacttcctgtgtctgagggggtcttcgtggtcaaggatccaaacgggcggacggttccgagtgatgtcgtcatctttcctagctcagatagccaggcccacccccctgaactcctctttagcgcctctttacctgctcttgggtttagcacctactccgtcgcgcaagtgcctaggtggaagcctcaggcccgggcccctcagcccatccccaggaggagttggagtcctgcactcacaatcgagaacgagcatataagggctacattcgatccagataccggactgctgatggaaattatgaatatgaaccagcaattgctcctccctgtcagacagacattcttctggtataacgccagcattggagataacgagagcgaccaggctagcggcgcctacatcttccgtcccaatcaacagaagcccctcccagtcagcagatgggcgcaaatccatctggtgaaaaccccccttgtacaggaggttcaccagaacttcagcgcgtggtgttctcaggtggtgcgcctgtatcccggtcaacggcatctcgagctggaatggagcgttggacctatccccgtaggcgacacctggggcaaggaagtgatcagccgctttgatactcccttggaaaccaagggccgcttctatacagacagcaatggtagggagatcctggaacgtagacgggactacagaccgacttggaaactgaatcagaccgagccagtcgctggaaactactaccccgtgaacaccagaatttacatcactgacgggaatatgcaacttacggttctcactgatagaagccagggaggttctagtctcagagacggctcccttgagcttatggtgcataggcgcctcctgaaagacgatggtagaggagtttcagagccactgatggagaacggatcaggcgcttgggtgcggggccgccatttggtgcttctggatacggctcaagccgccgctgcaggtcaccgcctcttggctgaacaggaagttttggcaccacaggtggtcttagcacctggtggcggtgctgcatacaaccttggtgctcctccaaggactcagttctccgggcttcgccgggatttgccaccctctgtccacctgctgactcttgcttcatggggacccgaaatggttctcttaagactggagcatcaatttgctgtgggagaggatagcggaagaaacctcagtgccccagtgaccctaaacctgagagatctatttagcacctttaccatcactcgtctgcaagagaccaccctggtggcgaaccagctcagagaggcagctagcaggcttaaatggactactaacacaggacctaccccccaccagacaccttatcagctggacccggctaacatcactctggagcccatggaaataaggaccttcctggcctctgtgcagtggaaagaggtggacggc

SEQ ID NO: 11612 - DNA, 3033 bp, Artificial Sequence
  derived and/or modified sequence
atgggtgcctacgctcgggcttcgggtgtctgcgcgcggggatgccttgactctgcgggtccctggaccatgagtcgtgcgctccgcccgccgcttcctccgctatgcttctttctgctcctactggccgcggctggtgcacgcgcaggcggctacgagacatgccctaccgtccagccaaacatgctgaatgttcacctgctgccgcatacccatgatgacgtcggttggctgaaaacagttgaccagtacttctacggaatcaagaacgatattcagcatgcaggcgtgcagtacatcctggactccgtcatctccgcgctcctggccgatcctacgcgtcgatttatctacgtggaaatcgcttttttctcccgttggtggcatcagcagaccaacgcgacccaggaggtcgtgcgggacctcgtgcgtcagggccgtcttgagttcgcaaatggtggttgggtcatgaacgatgaggccgctactcactacggagctatcgttgaccagatgaccttgggtctcaggttcctcgaggacaccttcgggaacgatggcagaccccgcgtggcctggcatatcgatcccttcggccactcccgcgagcaggcctctttgttcgctcagatgggctttgacgggttcttctttggtcgcctggactaccaggacaagtgggttcgcatgcaaaagctggagatggaacaggtgtggagagcgagcacctcactgaagccccctaccgccgacctgtttaccggcgttctcccgaacgggtacaacccacctcgcaacctctgttgggacgtcctctgcgttgatcaaccgctcgtagaagacccgcggtcgccggaatacaacgccaaggagttggtcgattattttctgaatgtcgcaacagcacagggtcgttattaccgtaccaaccacacggtcatgaccatgggcagcgacttccagtatgagaacgctaacatgtggttcaagaatctggacaagcttattcgactggtcaacgctcagcaggcgaagggttcttccgttcacgtgttgtacagcacccccgcctgctacctatgggagctcaacaaggccaacctcacctggagtgtgaagcacgatgacttcttcccatatgcggacggcccccatcagttctggaccggctacttctcaagtaggcccgctctgaagcgttatgaaaggctctcctacaacttcctccaggtctgcaaccagcttgaggccctcgtcggcttagcggctaatgtcgggccctacggctccggagattccgctccccttaacgaggccatggctgtgctgcagcaccacgatgcggtctctggaacttcccgacagcatgtcgctaacgactacgcgcgtcaactcgctgctggctggggcccgtgtgaggtgctgctctctaacgctttggcgcggctgcgcggatttaaggaccacttcactttctgccaacaactgaacataagcatttgtcccctttcgcagaccgccgcccgtttccaggtcattgtctacaaccccctcggtcgtaaggttaactggatggtccggttgcccgttagcgagggcgtcttcgttgtgaaggatcccaacggccgcacggtgccgtcggacgtggttatcttcccgtcctccgactcccaagcccatcccccggagttgctgttttccgctagcctcccggccctgggtttctccacgtatagcgtcgctcaggtcccgagatggaagcctcaggcgcgcgctccccagccgatcccgcgacgtagttggtctcctgctctaaccatcgaaaacgaacacatccgggcaaccttcgacccagacactggcctccttatggaaataatgaatatgaatcaacagcttctgcttcctgtaaggcagactttcttctggtataacgcctccattggtgataacgagtccgatcaggcctcgggagcctatatcttcagacctaatcaacaaaagccgctcccggtcagcagatgggcacagatccacctggttaagaccccgctcgtccaggaagttcatcagaacttttccgcatggtgtagtcaggtcgtgcgcttataccccgggcagcgccacctagagctggaatggtcggtaggcccgattcctgttggtgatacgtggggcaaggaagtgatcagcagatttgacacccccctcgaaacaaaaggccggttttacacggattcgaacggacgtgaaattctggagcgtcgtagagattaccgtccaacctggaagctcaaccagacagaacctgttgccggtaactattaccccgtgaacactcgcatttacatcaccgatggaaacatgcagctcaccgtgctgaccgatcgcagccaagggggatcgtccctccgggatggctcgctggagcttatggtccacagacgcttactcaaggatgacggtcgtggtgtctctgaacctttgatggagaacggttccggcgcctgggtaagaggtcgtcaccttgttttgttagacaccgcccaggctgctgctgccggacacagattgttagctgagcaggaagtgctggccccccaggtcgtcttggcccctggcggtggcgctgcttacaaccttggtgcgcccccgcggacccagttcagcggactccgacgcgatctacccccgtctgtccacctgcttactctcgcttcgtggggtcccgagatggtcctgctccgccttgagcatcaattcgccgtcggcgaggactccggccgtaacctcagtgcgcccgtcaccctgaacctcagagacttgtttagtaccttcaccatcactcggctgcaagagactacactagttgccaaccaactgcgtgaggcagcctcccggcttaagtggacgactaatacaggacctactcctcatcagactccgtaccagcttgaccctgccaacatcaccctggagcccatggagatccgaaccttcttggccagtgtgcaatggaaggaggtggatggg

SEQ ID NO: 11613 - DNA, 3033 bp, Artificial Sequence
  derived and/or modified sequence
atgggagcgtacgccagagcgtctggtgtttgcgccagaggttgtcttgattcggccggaccatggacaatgagtcgtgccctacgtccgccgcttcctccgctttgctttttccttctccttctcgccgcagcgggagcaagagccggaggatatgagacttgtccaacagttcaaccaaatatgctaaatgtgcacttgttgccgcatactcatgatgacgtgggatggctgaaaactgttgatcaatatttttatggaatcaaaaatgatattcaacatgccggtgttcaatatattcttgatagtgtcatttccgctctcttagccgatccgactcgccgttttatatatgttgaaatcgcctttttttcacgatggtggcaccaacagacaaatgcaactcaggaggtagttagggacctggtaagacaaggcagacttgaatttgcgaacggaggttgggtcatgaatgacgaggcagcaacgcattatggagccattgttgatcagatgacactgggtttgcgctttttagaggacactttcggaaatgatggtcggccaagggtagcatggcatatagatccatttggacactctcgagaacaagcatcattatttgctcaaatggggtttgatggtttttttttcggacgcctcgattatcaggataaatgggtaagaatgcaaaaactggagatggaacaggtgtggagagcatctactagtctcaaaccaccaacagcagacctcttcacaggagtccttcctaacggatataatcctccacgtaacttgtgctgggacgttctatgtgtggatcagccgctcgtggaagatccacggtctccagagtacaacgctaaggaattggtggattacttccttaatgtggcgaccgcacaaggaagatactatcgaactaatcacacagttatgactatgggcagtgatttccaatatgagaacgctaatatgtggttcaaaaatctggataagttgattcgtttggttaacgcacagcaggccaagggctctagcgtgcatgttttgtactcgacccctgcttgctatctatgggaattgaataaagcaaatttaacttggtctgttaaacatgatgatttctttccttacgctgatggaccacaccagttctggaccggatatttttcgagtcgtccagctttgaaaagatatgaacgattaagttataattttttgcaagtatgcaaccaactcgaagcattggttggactggctgctaacgttggcccgtatggctcaggtgattctgccccactaaatgaagcaatggctgtcttgcaacaccatgatgccgtctctggtactagtcgtcagcatgttgccaatgattacgcacgccaactcgcagctggatggggaccatgcgaggtgttgttatctaacgctttggcacggctcaggggttttaaggatcactttacattctgtcaacaattgaatatttctatctgtccactgtcccagactgcagcacgtttccaagtcattgtctacaatcctttgggccgaaaagtcaattggatggtccgactcccggtgtccgagggagtttttgttgtaaaggacccaaatggacgtacggtcccatcggacgtagtcatttttccatcgtcggattcccaagcccatccccctgagctcctgtttagcgcatccctaccagctttgggattttcaacgtactctgtagcccaagtgccacgatggaaaccacaagctcgcgcgcctcaacctattcctcgccgatcgtggtcaccagctcttaccattgaaaacgaacatattcgtgcgacattcgacccggatactggtcttttgatggagattatgaacatgaaccagcaattgctactacccgttcgccagaccttcttctggtataatgcgagcattggagataacgaaagcgatcaagcaagtggtgcatatattttccgaccaaatcagcaaaagccactaccagtcagcagatgggcacagattcatttagtgaaaacacctttggtccaagaagttcatcaaaatttctcagcttggtgttcccaagtggttaggctgtatccgggacagcgtcatcttgaactcgagtggagtgtagggcctattccagtcggcgatacatggggaaaagaagtcatatcgaggtttgataccccattagaaacaaagggaagattctatactgatagcaatggccgtgagattctggaaagacgacgagattatcgacctacatggaaacttaaccagactgagccagtagcgggcaattattatcccgtcaacacaagaatttacattactgatggaaatatgcagttgacggtcttgactgatcgaagtcaaggaggctcgtctcttcgagatggaagtttggaacttatggtgcaccgtagattgctcaaagatgatggcagaggtgtttcagaacccctcatggaaaacggatccggagcttgggttcgtggacgtcacttagtactccttgatactgcacaagctgccgccgcaggtcatagactccttgcagaacaggaagtcttagcgcctcaggtggtgttggcaccaggaggaggagctgcctataaccttggtgctcctccaagaacacaattctcaggactccgacgagatctgccgccctcagttcatttgttaaccttggcttcctggggaccagaaatggtgctattgcggttagaacaccagttcgcagtgggagaagattcaggaagaaatttgtcggcacctgtcactttgaatttaagagatcttttctctacgttcaccattactcgattgcaggagaccacactcgttgcaaatcagctacgggaagcagcatcaagattgaagtggacaaccaataccgggccaactccacatcaaacaccctatcaacttgacccagcaaatataaccctagaaccgatggagattagaacgttcctagcaagtgtgcaatggaaagaagtggatgga

SEQ ID NO: 11614 - DNA, 3033 bp, Artificial Sequence
  derived and/or modified sequence
atgggcgcgtacgccagggcgtccggcgtgtgcgcacgggggtgtctcgactcggccggcccgtggacgatgtcaagagcacttagaccgcccctccccccgttgtgtttcttcctgcttttgctggccgccgcaggagctcgcgccggagggtacgaaacttgcccaactgtccagccgaacatgctgaacgttcatctgcttccgcatacccacgatgacgtcggatggcttaagaccgtggaccaatacttctatggcataaagaatgacatccagcacgccggggtgcagtacattctcgattcggtcatctccgccctgcttgccgacccgacccggcggttcatctacgtggaaatcgcgttctttagcaggtggtggcaccagcaaaccaatgcgacccaggaagtcgtccgcgacctggtgagacaaggacggctcgaattcgcgaacggaggttgggtcatgaatgacgaggcagcgacccactacggtgctatcgtcgaccaaatgacgctggggctgagattcttggaagatactttcggcaatgacggacgcccacgggtcgcctggcatatcgaccccttcggacactcgcgggaacaggccagcctgttcgcccaaatgggcttcgatgggtttttcttcgggcgcctggattaccaggacaaatgggtgcgcatgcagaaacttgaaatggagcaagtgtggcgcgcgtccacctcccttaaaccgccaactgctgatttgttcacgggtgttttgccgaacggatacaaccccccacggaacttgtgctgggacgtgctctgcgtggatcagccgctcgttgaggatcctcggagcccagagtacaacgcgaaggagcttgtggattacttcctcaatgtcgccactgcacagggcagatactacagaaccaatcacacggtgatgacgatgggcagcgactttcagtacgaaaatgccaatatgtggttcaagaatctggacaaactgatcaggctggtcaatgcccaacaggcaaagggctcgtcggtgcacgtgctgtattcgaccccggcctgctatctctgggagctgaacaaggccaacctgacctggtcagtgaagcacgatgatttctttccgtatgccgacggaccgcaccaattttggaccgggtatttcagctcgaggccggccctgaaacgctatgagcgattgtcctacaactttttgcaagtgtgcaaccaacttgaagcactggtcggcctggctgcaaatgtggggccctacggctccggtgattcagccccactgaatgaggcgatggccgtcttgcaacaccatgatgcagtctcgggcacttctaggcagcatgtggcgaacgattacgcgcggcagttggccgccggttggggaccgtgcgaagtgctgctgtcgaatgcgcttgctaggctgcgcggcttcaaggaccactttaccttttgccagcagctgaacatctccatttgtccgctctcgcaaacggccgccaggtttcaggtgatcgtctacaacccactcggacgcaaagtcaattggatggtgcggcttcctgtgtctgaaggagtgttcgtcgtcaaggacccgaacggacgaacggtgccgtcagacgtcgtgattttcccttcatcggatagccaagcgcacccacccgaattgctcttcagcgcgtccttgccggcactcggtttctcaacgtactccgtggcgcaggtcccgcggtggaagccgcaagccagagccccgcagccaatcccccggcgcagctggtcgcctgccctgactattgagaacgagcacatccgcgcgacgtttgacccagacaccggactgctgatggaaatcatgaacatgaaccaacagctcctgctccccgtgcggcagactttcttttggtacaacgcatcaatcggagacaacgaaagcgatcaggcctccggggcgtacatcttcagaccgaaccagcaaaagccactgccggtgtcgcggtgggcgcagatccatctcgtgaaaacgccactggtgcaggaagtgcaccagaacttcagcgcctggtgctcccaagtggtgcggctttacccgggccagcgccacctcgaacttgaatggagcgtcgggcctatcccggtgggagatacttggggcaaggaggtgatctcccgcttcgacacccctctcgaaaccaaggggcgcttttacaccgattcgaatggaagagaaatcctcgaacgcagacgggactaccggccgacttggaaactgaaccaaactgagcctgtcgctgggaattactacccagtcaacactagaatctacatcactgatggaaacatgcagctcaccgtgctcaccgaccggtcgcagggcggttcgtctctgcgggacggctcactggaactgatggtgcaccgccggctgctgaaagacgacgggcgaggcgtctccgagcctctcatggaaaacggatccggagcttgggttcggggacgtcatctcgtgctccttgatactgcccaggccgctgcagcaggacatcgtctgctcgccgaacaagaagtcctggcaccacaggtggttctggcccctggcggaggggccgcctacaacctgggcgcgcctccccgcacgcagttcagcggactccggcgggatctgcccccatcggtgcatctgcttactctggcaagctggggaccggagatggtgttgctgcggctggaacatcagttcgcggtgggagaggactccggtaggaatttgtccgcgccagtgactctgaatcttcgcgacctgttctccaccttcactatcactagactgcaggagacgaccctcgtggcgaatcagctgcgcgaggcagcatcaagactgaagtggactaccaacaccggaccaaccccgcatcaaaccccgtaccagttggacccggcgaacattaccctggagccaatggaaatcagaacgtttcttgcatcggtgcagtggaaagaggtggacgga

SEQ ID NO: 11615 - DNA, 3033 bp, Artificial Sequence
  derived and/or modified sequence
atgggagcgtacgctagagcgagtggagtgtgtgcgaggggatgcctcgacagcgccgggccctggactatgtcccgagcactgaggccaccacttcccccactttgctttttcctgctgttgctcgccgctgctggggcccgcgcaggaggctacgagacttgcccaacggtccagcccaatatgttgaacgtccacttactgcctcacacacacgatgatgtcggatggttgaagacagtggaccaatacttttatggaatcaaaaacgatatccagcacgccggggtgcagtacatccttgattccgtgatatccgcgttgttggccgacccaactaggcgttttatttacgtggagattgcatttttctccagatggtggcaccagcaaaccaacgccacacaggaagtggtaagggacttggtgaggcagggacgactcgagttcgcaaatgggggctgggtcatgaacgacgaagccgccacccattacggtgctatcgtcgatcagatgacactgggccttagatttttggaggatacatttggcaatgatggaaggcctcgggtcgcctggcacattgaccccttcggccacagcagggaacaagcgtcactatttgcccagatgggttttgatggtttcttcttcgggcgacttgactatcaggataagtgggtgaggatgcagaagctggagatggaacaggtttggcgagcctctacttctttgaaacctccgactgccgatctctttactggggtcctccctaacgggtataatcctccacgtaacttatgctgggacgtactgtgtgtggaccagcctttagttgaagaccccagatcaccggaatacaatgccaaagaacttgtagattattttctgaacgtggcaacggcccagggccgatactatagaaccaatcacacagttatgaccatgggatccgactttcagtacgagaatgcaaacatgtggtttaaaaacctggacaaacttatccgattggtgaacgctcagcaggcaaaagggtcttccgtccacgtgctgtactccacacctgcttgctatctgtgggaattaaataaggctaacttgacttggagcgtgaagcatgacgatttcttcccctatgccgacggcccacatcagttctggaccgggtacttctcaagccgcccagccttgaaaagatatgagcggctcagctataattttctccaagtttgcaaccagctagaggccctggtgggcctagctgccaacgtcggaccctacggatccggcgacagtgcaccgctgaatgaggcgatggctgtcctgcagcatcatgatgccgttagcggcacttcaaggcagcatgtggctaatgattacgcacggcagctggctgcagggtgggggccatgcgaggttttactgtcgaatgctctggcaagattacgaggatttaaggaccactttacattttgccagcagcttaatatctcaatctgtcctctctcccagacggcggcaagatttcaagtgatagtatataatcctctagggagaaaggtgaactggatggtgaggctcccagtatccgagggcgtgtttgtggtaaaggacccaaacgggcggaccgtacccagcgatgtggttatttttcccagttcagattcacaggcccacccacccgaactgctcttctctgcttccttaccggcacttggtttcagcacttactccgttgcccaggtccctcgctggaagccacaggcccgggcccctcaacctatccccaggagatcatggtctcccgccctaactattgagaatgagcacattagggctacttttgatccagacaccgggttattgatggaaataatgaacatgaaccagcagttgcttctgccggtgaggcaaaccttcttttggtacaacgccagcattggagataacgagtcggaccaggcttcaggcgcttatatcttccggcccaaccagcagaagcctctgcctgtgagcaggtgggctcagattcacctggtaaagacgccgctcgtgcaggaagtgcaccagaacttttctgcctggtgtagtcaggtagtgaggttgtatcctggacagagacaccttgaactcgagtggtccgtgggtcctattccagtgggagacacctggggtaaagaggtaatctccaggttcgacacgccccttgaaacgaaggggaggttttatacggactccaatggtcgagagatactggagcgacggagagactacaggcccacctggaaactaaaccaaacagagccagtggccggaaactattacccagtcaatacacgcatatacatcacagatgggaacatgcagcttacggtcctaactgaccgatctcaaggtggctctagcctgcgcgatggtagccttgagctaatggtgcaccgcagactgctgaaagatgatgggcgtggggtgagcgagcccctcatggaaaacggctctggagcgtgggtccggggacgacacctcgtcctgctagacacggcccaggccgcagccgccggccaccgactcttggcggaacaagaggtgcttgcacctcaggtggtgctagcacccggcggtggagctgcgtacaacttgggcgctccaccaaggacacaattttctggacttagaagggacctgcccccgtcagtgcatttgctgactttggctagttgggggcctgagatggttctgctgagattggaacatcagtttgctgtaggcgaagatagcggcagaaatctcagcgccccggtgacactcaatctgagagacctcttcagtaccttcaccattacgaggcttcaggagacgacactggtggcaaaccagctcagagaggccgcctctaggttgaagtggaccactaacaccggtccgacaccacaccagacaccatatcagctggatcctgctaacatcactctcgaacctatggagatcagaacttttctggccagcgtccagtggaaagaggtggacgga

SEQ ID NO: 11616 - DNA, 3033 bp, Artificial Sequence
  derived and/or modified sequence
atgggggcatatgccagggcgtctggtgtctgcgctcgtgggtgcctggatagtgcgggcccttggacaatgtctcgggcactcaggccgccactcccccctttgtgcttcttcctcctccttctggccgccgcgggtgcccgggccgggggctatgagacttgtccaacggtgcaacccaacatgctaaatgtccatctgcttccacacacccatgatgacgtaggctggctgaagaccgtcgatcagtatttctacgggattaagaatgatatccagcatgcaggggttcagtacatactcgatagcgtcatatcagctctcctggctgacccgaccaggcgattcatttacgtggagattgccttcttctccagatggtggcaccagcagacgaacgccacccaggaggtggtgagagacttggtgagacagggcagactggagtttgcaaacgggggatgggtgatgaatgacgaggccgccactcactacggggctattgttgatcagatgacgctaggactaaggtttctggaagacacatttggcaacgacggtcggcctcgggtggcatggcatatcgatcctttcggtcacagtagggaacaggcaagtcttttcgcccagatgggctttgatggctttttctttggacgtttggattatcaagacaagtgggtgaggatgcaaaagctcgaaatggagcaggtgtggcgcgcatctacgtcgcttaaaccacctactgctgacctattcaccggcgtgctgccaaatggctataaccctccccgcaatttatgctgggacgtactatgcgtggaccagccactggttgaggacccgagaagcccagagtacaacgctaaggagctcgttgattatttccttaacgtggcgacagcccagggccgatattatcggactaatcacactgtcatgactatggggtccgacttccagtacgagaacgcgaacatgtggttcaaaaatctcgataagttgataaggttggtcaatgctcagcaggcgaaggggagcagtgtccacgtgctgtatagcacaccagcctgttacctgtgggagctcaacaaagctaatctgacatggtccgtgaaacacgacgattttttcccatacgcggacgggcctcatcagttttggactggatatttctcaagcagacctgccttgaaaaggtacgaacgactcagttacaacttcctacaggtgtgtaaccagctggaggccctggttggcctcgccgctaatgtcgggccctatggttccggcgatagcgcccctctcaacgaggccatggccgttttgcagcaccacgacgcagtgagcggcacctcccgtcaacacgtggctaacgactatgccagacagttagctgcaggctgggggccctgtgaggtgttgttatctaacgcgctagctcgcctgaggggctttaaggaccactttaccttttgtcaacagttgaatataagtatttgtccactgagccaaacagcagcccggtttcaagtgatcgtgtacaatcctttgggccgaaaggtgaattggatggttaggttgcctgtgtcagaaggagtgtttgttgtcaaggaccccaacggacggacggttccttccgatgtcgtgattttccccagtagtgattcacaggcgcacccccccgagttactgttttcagcatccctgcccgccctgggattctctacttactcagtggcacaagtgcctaggtggaaaccacaggcgcgggcgccccagcccatcccgcgtaggtcatggagcccggccctaaccattgagaatgagcatattagggcgacgttcgaccctgacacaggtctcctcatggaaataatgaacatgaaccagcagcttctgcttccggttcgccagaccttcttttggtataatgcttcaatcggggataatgagtctgaccaggctagcggtgcttatattttccggccgaaccagcagaaacccctgcctgtgagtcgctgggcacagatccacctggtaaagacgccgttggtgcaagaggtgcatcagaatttcagcgcctggtgctcacaagtcgtgcggctgtatccgggacagcgtcatttggaacttgaatggagcgtaggacccatacctgtcggagatacgtgggggaaggaagtcatctcacgcttcgacacacctttggagactaaggggcggttttataccgatagcaacggccgggaaatcctggagcgcagacgggactacaggcctacctggaaactgaaccagactgagcccgttgctggtaattactacccagttaacacaaggatctacataaccgatgggaacatgcagcttaccgtgctgacagataggagtcagggcggatcctcattgagagatggctccctggagctcatggtccacagaaggttgcttaaggacgacggcaggggggtgagtgagcccctgatggagaatggctctggtgcatgggtccgggggagacaccttgttctactggacacagcgcaggctgcagctgctggacaccgcctgcttgcagagcaggaggttctcgctccacaggtcgttctggcccccggggggggggctgcctacaatttgggagctcctccacgcacccaatttagtggcctgagaagagatctccccccgagcgtgcatctgttgacacttgcaagttggggccctgaaatggttctgttaaggctggagcatcagtttgctgtcggagaagactccggtcgaaatctctccgctcccgtgacactgaacttgcgggatcttttctccacctttaccatcacccggcttcaggagacgaccctagtcgcgaaccagctccgtgaggccgccagcagactcaagtggactacaaacaccggccctaccccccaccagacaccatatcagctggacccagctaacattacgcttgaacctatggaaatccggactttcctggcctcagtgcagtggaaggaggttgatggg

SEQ ID NO: 11617 - DNA, 3033 bp, Artificial Sequence
  derived and/or modified sequence
atgggtgcctacgcacgagcttcgggggtgtgtgctcgaggatgcttggactcagcgggtccttggaccatgtcaagggccttgaggcctcctctgccgccactgtgcttttttctgctgttgctggcagcggcgggggcccgcgctgggggctacgaaacctgtccaacagtccagccgaacatgcttaacgtgcatttactccctcacactcacgacgacgtggggtggctcaagacagttgaccagtacttttacggcattaagaacgatatccagcatgcgggcgttcagtatatcctggatagtgtgatcagcgcattattagcagatccaacacgccgatttatctacgtggagatcgcattcttctctaggtggtggcatcagcagactaacgccacacaggaagtggttagagatctggttcggcaggggagactcgagtttgctaatggaggctgggtaatgaacgacgaggctgccacacattacggagccatcgtggatcagatgacgcttgggctgcgttttctcgaagatacctttggcaacgacgggaggccccgagtcgcctggcacatcgacccgttcggtcactccagagaacaagcctcacttttcgcccagatgggtttcgacgggttcttctttggccgcctggattaccaggataagtgggtacgtatgcagaaactggagatggagcaggtatggcgcgcatctaccagtctcaagccaccaacggctgacctcttcactggcgtcctgccaaacggatacaacccaccccgaaatttgtgctgggacgttctgtgtgtggatcaacctttggtagaggatccccggagccctgagtacaatgccaaggaactcgtcgattattttttaaacgtagcgacagcgcaaggccgctattataggaccaaccacactgtgatgactatgggctcagatttccaatacgagaacgccaacatgtggttcaaaaatttggataagctcataagactcgtcaatgctcagcaggctaaggggagctctgtgcacgtactgtattctactcccgcatgctatttatgggaacttaataaagcgaacttgacatggtccgtgaagcacgacgacttttttccatacgccgacgggccccaccagttctggacaggctacttctcatctaggcctgctctgaagagatacgagaggctctcttacaacttcctgcaggtgtgtaatcagttggaagccttggttggcctcgccgcaaacgtgggtccatatggatctggcgacagtgctcctcttaatgaggctatggccgtgctgcagcaccacgacgccgtgtccggaacgtccagacagcacgtggccaatgactacgcgagacagctggccgcagggtgggggccgtgtgaagtgttgctttccaacgccttggcccggctccgaggtttcaaggaccactttactttctgtcagcagttgaacatttccatatgcccactttcccagacggccgcgagattccaagtcatcgtctacaaccctctggggaggaaagtgaactggatggtgcggctgccagttagcgaaggagtgttcgtcgtgaaggatcctaacggacggacagtgccatcggacgtagtaattttcccgtcatccgattcacaggcacatccccccgaactactgttctcagcctcactgcctgccctgggattttcgacctattcagtagcgcaggtgccccggtggaagccacaggctcgggctcctcagcccatccctaggcgcagctggtcccctgcacttacaatagaaaatgagcatatccgggctacgttcgatcccgacactggactgctgatggaaatcatgaatatgaatcagcagcttcttctgccagtgcggcaaacatttttttggtacaatgcctccataggcgataacgagtccgaccaggcctccggcgcgtacatcttcaggccaaaccagcagaaacccctccccgtcagcaggtgggcgcaaatccacttggtgaaaaccccattggtgcaagaggtgcatcagaattttagcgcctggtgtagccaagttgtgcggttgtatccaggtcaacggcatctggagctggaatggtcggtgggcccaatacccgtcggcgatacctgggggaaggaagtcatctctcgattcgatacccccctggaaacaaaagggcgtttttatactgactcaaacgggagagagatactcgaacgacggcgtgattatcgtcctacatggaaacttaatcagaccgagccagtggcgggcaattattatcccgtgaataccaggatttacattacggacgggaacatgcagctgactgtacttaccgaccgatctcagggcggttcatcacttcgtgacggcagcctggaactcatggttcacagaaggctgctaaaggacgatggccggggggtgtcggagcctttgatggaaaacgggtcaggagcatgggtacgcgggaggcacctcgtgttgctggacacagcgcaggcagcagccgctggacaccgccttctggctgagcaggaggtgctcgccccgcaggtcgtgttggctcctggaggtggcgcagcatataacttgggcgcgccccctaggacccaattttcgggcctccgaagagatcttcccccgtctgttcacttgctgactctggcaagttggggacctgaaatggttctcttacgactggagcaccagttcgctgtgggcgaggactcaggtagaaacctgtccgctcccgtgactctcaacctaagggatctgtttagcacatttactattacgcgtttgcaggagactacactggtggccaaccagctgagagaagctgcaagccggctgaagtggactacaaatactggccccaccccacaccagactccctatcagctggatcctgccaatatcacgctggaacctatggagataagaacgtttcttgcatcagtccaatggaaagaggttgacgga

SEQ ID NO: 11618 - DNA, 3033 bp, Artificial Sequence
  derived and/or modified sequence
atgggagcatacgcgagagccagcggtgtgtgtgcacgtggatgcctcgattcggcgggaccctggaccatgtcgagggcactccgcccccctctgccaccactttgcttctttctgcttctccttgcagcagcaggagcaagagcaggcggttacgagacttgtccaactgtgcagccgaacatgcttaatgtgcatcttctgccccacactcatgatgacgtcggatggctgaaaactgtggatcagtacttttatggaattaagaatgatattcagcatgccggtgtgcagtatatccttgattcggtcatctcggcactgcttgcagatccgacccgacgcttcatttacgtggaaattgcctttttctctcgttggtggcatcagcaaactaatgcaactcaagaggtggtccgggaccttgtgaggcaagggcggctggaattcgcaaacgggggctgggtgatgaacgatgaagccgcaacccattacggtgccattgtcgatcaaatgaccctgggacttaggtttcttgaagatacttttggcaacgacggccgcccacgcgtggcgtggcatatcgatcctttcggacattccagggaacaagcaagcctttttgctcagatgggttttgacgggtttttctttggacgccttgactaccaggataagtgggtccgcatgcaaaagctggagatggaacaggtctggcgggcctccacctcccttaaacctcctaccgcagatctctttaccggggtccttccaaacggttacaaccccccacgaaatctttgttgggatgtgctgtgtgtggatcagcctcttgtcgaggacccccggtcgccagagtacaacgcaaaggaactggtggattacttcttgaacgttgccactgctcagggcaggtactacaggacgaaccacactgtgatgactatgggatccgatttccagtacgagaatgctaacatgtggtttaagaacttggataagctcattcggctggtgaacgcccaacaagccaaaggatcatcagtgcatgtcctctactcgaccccagcctgttacctctgggaacttaacaaggccaatcttacctggtccgtgaaacacgacgatttcttcccatacgccgatgggcctcaccaattttggactgggtacttctcgtcacggccagcacttaagaggtacgagcgcctgtcatacaacttcttgcaggtgtgtaaccaacttgaagcattggtgggccttgccgcaaacgtcggaccctacgggtcgggtgattcagcacctctgaacgaggcgatggccgtgctccagcaccatgacgcagtgagcggaacctcgcggcaacatgtggccaacgactacgcgcgacagctcgcagcaggctggggcccttgtgaagtgctgctgtcgaatgcactggcaaggctgcggggttttaaggatcactttaccttctgtcagcagctgaacatatccatctgccctctgtcccagacggcagcacggtttcaggtcattgtgtacaacccccttggccggaaagtgaactggatggtgcgcctcccagtgagcgaaggggtctttgtggtgaaggatcccaacggtagaactgttcccagcgatgtcgtgatctttcccagcagcgactcacaagcacatccccccgagctcctgtttagcgcatccctgcctgccctgggattttccacttactccgtggcacaagtgccacgatggaagccccaagcaagagcaccacaaccaattcccagacgttcatggagtcctgcacttactatagaaaacgagcatattagggcaacgtttgatcctgatactggccttcttatggaaatcatgaatatgaaccagcaacttcttcttcctgtgagacagaccttcttctggtacaatgcctccattggtgataatgaatcggatcaagcatccggagcgtacatcttccgccccaaccagcagaagccgttgcctgtgtccagatgggcacaaattcacctggtgaaaactccactcgtgcaagaagtccatcagaatttcagcgcatggtgttcacaagtggtcaggctgtacccaggtcagaggcatctggagttggagtggtcggtgggtccaattcctgtcggagatacctggggaaaggaagtgatctcgcgctttgatacccccctcgaaactaaggggcgattctacaccgactcgaacggcagagaaatcctggaacgcaggcgcgattacagaccaacttggaagttgaatcaaactgaacctgtggcaggtaactactacccggttaacacgaggatttacatcaccgatggtaacatgcagctgaccgtcctgaccgatcgatcgcagggtggtagctccctgcgtgatggttccctcgagctgatggtccatcgtcggctgctgaaggatgatgggcggggagtgtcggaaccgctgatggagaacggttcaggagcatgggtgagagggcgccacctggtgttgttggacaccgcacaggccgcagcagctgggcatagactcttggcagagcaggaggtcctcgcacctcaagtggtgctggcgcccgggggaggggcagcatacaaccttggggcgcctccacgcactcagttcagcggcctgcgtagagatctcccaccttcggtgcacctcttgaccctcgcttcatggggtccagaaatggtcctcctccggctggagcatcaatttgcggtgggggaggactcgggccggaacctttcggcacctgtgactctcaatctgagagatctgttttcgacctttactatcactaggcttcaagaaactactcttgtcgccaaccagctgcgggaggcagcttccagactcaaatggaccactaataccggtcccacgccgcatcagactccttaccaactggatcctgcaaatatcacccttgagccaatggaaattagaaccttcctcgcttcggtgcaatggaaagaggtagatggt

SEQ ID NO: 11619 - DNA, 3033 bp, Artificial Sequence
  derived and/or modified sequence
atgggagcctacgcccgcgccagcggagtgtgcgcgcggggctgcttggatagtgcaggcccctggactatgagtcgggcgctgcggccacccctaccaccactctgcttctttctcctcctactggcagctgcaggcgcaagggccggtggttatgagacatgtccaacagttcagcccaacatgcttaatgtgcacctgctgccccatacacatgacgacgttggctggctcaagaccgtggatcagtacttctacgggatcaagaatgatatacagcacgccggcgtgcagtacatactggactccgtgatctctgccttgcttgcggatcccacacgcagattcatctatgttgagattgcctttttctcccgatggtggcatcagcagacaaacgctactcaggaggttgtgcgagacctggtgcggcaaggacggctggagtttgcgaacggaggatgggtgatgaatgacgaagcagccacccactacggcgccatcgttgatcagatgactctcggcctgagattccttgaggacacatttggaaacgatggtcggcctcgggtcgcctggcacatcgatccattcggacactcccgggaacaggcaagcctgtttgcccaaatgggcttcgatggattttttttcgggaggttggattatcaggacaagtgggtacgaatgcagaagttggagatggagcaggtctggcgggcctcgacatcactgaaacctcctaccgcagacctcttcactggggtgctgccaaatggatataatcctccgcgcaatctgtgctgggatgtgctctgtgtggaccaacctctagtggaggatcctaggagccccgagtataatgccaaagaactggtggactattttctcaacgtggccactgcccagggtcgctactataggacaaaccatactgtcatgactatgggatctgactttcagtatgagaacgccaacatgtggttcaaaaatctggataaactgattcgcttggtgaacgcccaacaggctaaaggcagtagtgttcatgtcttgtactccacccctgcatgttatctgtgggagctcaataaagcaaacctaacttggtctgtgaagcatgatgacttttttccatacgccgacggcccgcatcagttctggacaggttatttcagctcaaggccggccctgaagcggtatgaacgtctgtcgtacaatttcctccaagtgtgcaaccagctcgaagctttggtgggattggccgctaacgtcgggccgtacggttccggtgattccgctcccctgaacgaggccatggctgttctccagcatcatgatgccgtgtctgggacatcacgacagcacgtggctaatgactatgcacgacagttagccgccggttggggcccctgcgaggtcctgctcagtaacgcactggccaggctcagaggttttaaggatcactttaccttctgtcagcagcttaacatatcaatctgccctctaagtcagacagctgcccgcttccaagtcattgtgtacaacccgcttggacgcaaggtgaactggatggtcagattgcccgtgtccgagggagtcttcgtagttaaggatccaaacggacggaccgtcccctctgacgtcgtgatctttccctccagcgacagtcaggcccaccctcccgaactattgttctcagctagtttgcccgctttagggtttagcacttactcggtcgcgcaggtgccccgctggaaaccgcaggctcgggcccctcagcccataccacgccgcagttggtccccggcgttaaccatcgaaaatgagcacatcagagctacattcgaccctgacactggccttcttatggaaattatgaatatgaatcagcaactgctacttcctgtgagacaaacgttcttttggtacaacgcgtctatcggggataatgaaagtgatcaagccagcggagcttatatttttcgacccaaccaacaaaagcctctgcccgtctcccgttgggcccagatccatctcgtgaagacgcccctggtgcaggaagttcaccaaaatttctcagcctggtgttcacaagtggttaggctgtaccccgggcagagacacctggaattagagtggagtgtgggccccatccctgtgggggacacctgggggaaagaggtgatcagcagatttgacactcctcttgagacgaaaggccgtttttacaccgactcaaacgggcgcgagatattagagaggaggcgggattatcggccgacctggaagttaaatcaaaccgaacccgtggcgggaaactattacccagtaaacactcggatatatataaccgacgggaacatgcaacttacagtcctgactgatagatctcaaggggggtcaagcctgagagatggatctcttgagctgatggtgcaccgccggctgctgaaagacgacggacgtggcgtcagtgagccactcatggaaaatggcagcggggcctgggttagaggaaggcaccttgtgcttctggacacagctcaggcggccgctgcaggccatagattgctggctgaacaggaagtgctggctcctcaggttgttctcgcccccggcggaggagccgcctacaacctcggcgcgccacctcgcacccagttcagcggcttgcggcgggacttaccacccagtgttcatttgctaacgttggcttcttggggaccagagatggtcctgctgaggttggaacatcagtttgccgtgggggaagatagcgggagaaatctaagcgcaccagtcacgctcaacttgcgggatctgttctctacatttaccatcactcgtctgcaagaaacgacattggtcgcaaatcagctgcgcgaagccgcctcgcgtctaaagtggaccactaacactggtccaacaccacaccagactccatatcagctcgaccctgccaacatcactctggaaccgatggaaatccgcacttttctggccagcgtccagtggaaagaagtcgatggc

SEQ ID NO: 11620 - DNA, 3033 bp, Artificial Sequence
  derived and/or modified sequence
atgggagcctatgctagagcctctggggtgtgtgctcggggctgccttgactccgccggtccttggaccatgtcccgcgcgcttcgacctccactccctcccctttgcttcttccttcttctcctcgcagccgccggtgccagggccggcggatacgagacgtgtccgaccgtacaaccaaacatgctgaatgtgcatctgcttccacatactcatgatgacgtgggctggctgaagacagtggatcagtacttctatggcatcaaaaacgatatccaacacgcgggcgtgcagtatattttggacagcgtaatcagtgctctgctagctgatccgacgagacggtttatctacgtcgaaatcgcttttttctccagatggtggcatcagcaaacaaacgctacgcaggaggtagtgcgtgacctcgtccgtcagggcaggcttgaattcgccaacggcgggtgggttatgaacgacgaggcagccacccactacggagccatcgttgatcagatgacactgggtcttcgcttcctcgaggatacgttcggtaatgacggcagaccccgagtcgcctggcacattgaccctttcggccacagccgtgagcaggcctccctgttcgctcagatggggttcgacgggttcttcttcggccgcctcgactaccaggacaaatgggtgcgaatgcaaaagctcgagatggaacaggtgtggcgggccagcacgagtttgaagccaccaacagcagacttgtttacaggggtgctccctaatggatacaatcccccgcgtaacctatgctgggatgtgctgtgtgtcgaccagcctctggtcgaagacccccggagcccggagtataacgcgaaggaactggtggactatttcctcaacgtggccaccgcccagggccgttactaccggacaaaccacactgtgatgacgatggggtcagatttccagtacgagaacgccaatatgtggtttaaaaatctggataagctcataaggttggtcaatgctcaacaggcaaaaggaagctccgtgcatgtcctatactctacccctgcctgctacctgtgggagctcaataaagcaaacctgacgtggtccgtgaagcacgacgacttcttcccctatgctgacgggccccatcagttctggacaggctatttttcttcccgtccggcactgaaaagatacgagcgactttcctacaatttcctacaggtttgtaaccagctggaagcactggtgggacttgccgctaatgtagggccctatgggtccggcgatagcgcaccactcaacgaagccatggctgtccttcagcaccatgatgcagtgtcagggacatcccggcagcatgtggcaaatgattacgccaggcagctggcagccggctggggtccttgtgaagtgctacttagtaatgccctagctaggctcagggggtttaaagaccacttcaccttttgccagcagctcaatatctccatttgtcctctgtcccagaccgcagcgaggttccaggttattgtctataatcctctgggccgcaaagtaaactggatggtccggctgccggtgagcgaaggagtgtttgtggtgaaggacccaaacggtcgcaccgtgccttcagatgtggtgatcttcccctcatcagattcacaggcacatcccccagaactcttgttctccgccagcctccctgctctcggattcagcacttactctgttgcacaagttccacgctggaagccacaagcccgagcaccccagccaatcccaaggcgaagctggtccccagcattaaccatcgaaaatgagcacatacgggctacgttcgaccccgatacgggactgctgatggagattatgaacatgaatcagcagctattgcttccagttcgtcaaaccttcttctggtacaacgccagcattggtgataacgagtccgatcaggcaagcggggcttatattttccgacctaatcagcagaaacctttaccagtttcccgttgggcccaaattcatctggtcaaaacgcccctggtgcaggaggtgcaccagaatttctctgcctggtgttctcaggtggtaagattgtaccctggacagaggcacttggaactggaatggtcagtgggtccaatccccgtaggcgatacatggggcaaagaagtgatctctcggttcgacacccctctggaaacaaaggggcgcttttatacagacagcaatggtcgggagatcctggaacgcaggagagactaccgaccaacttggaaactgaaccaaaccgagcccgtggcaggtaattactacccggtaaacactaggatctacataacagatggtaacatgcagctcacggtcttaacggatcgttctcagggaggctcaagcctgagggacgggagtcttgagctgatggttcaccgcaggctgctgaaggatgatgggcgtggcgtgagcgagcccctgatggagaacgggtcaggcgcctgggtgaggggccgacacctggtgttgctggacacggcccaggccgccgccgctggacatcggctgctcgctgagcaggaggttctggctccccaggtcgtattggcccctggtggtggagcagcttacaatttgggcgctccccccaggacacagttttccgggctgcggagggacttaccgccaagtgtacatcttctgacgttggcctcctggggtcccgagatggtcttactacgcctagaacatcagttcgctgtgggggaggactccggtaggaatctgtcagccccagtgaccctgaatctgcgcgacctgttttccactttcacaattacccggctgcaggagactaccctggtggccaaccagctcagagaagctgcttccaggctcaaatggaccactaatacgggacccaccccacaccagacaccctaccaactagatcctgctaatataaccctggaaccaatggaaataagaacattcttagcctctgtgcagtggaaggaggtagacggg

SEQ ID NO: 11621 - DNA, 3033 bp, Artificial Sequence
  derived and/or modified sequence
atgggcgcatacgctcgggcaagcggcgtgtgcgcaagaggctgcctcgactcggcagggccctggacgatgagccgcgccctgagaccacctctaccacccctatgtttttttctcttgttgctggcagctgcaggcgcccgtgcgggtggctacgagacctgtccaactgtgcaacctaatatgctgaacgtgcacctgctccctcacacgcacgatgatgttggatggctgaagacagtggaccaatacttttacggaatcaagaatgacatccagcatgccggcgtccagtacatcttggatagcgttatttccgcactgctggccgacccaactcgacggttcatttacgtcgagattgcctttttcagtagatggtggcaccagcaaaccaatgctactcaggaagtggtgcgcgacctggtccgccaaggcaggctggagtttgccaatggtggctgggtcatgaatgacgaggccgccactcactacggcgcaatcgtcgaccagatgactctcggcctgcgattcttggaggatacatttggcaatgatggccgcccaagagtcgcttggcacattgaccctttcggccactctcgggaacaggctagcctgttcgcccagatgggatttgacggattcttcttcggtcgtctggattaccaggataagtgggtgaggatgcaaaagttggagatggagcaggtgtggagagcctctacctcactgaaaccccctacagctgatctcttcactggcgtgctccctaacggttacaatcctcccagaaatttatgttgggacgtgctctgcgtagatcaacccctggtcgaggatccacgaagccctgaatataacgccaaggagctcgtggattactttctgaatgtggcgacagctcagggccgctactatcgcacaaatcacacggtgatgaccatgggatccgactttcagtacgaaaatgccaacatgtggttcaagaacctagataagctgatccggctggtgaacgcccagcaggccaagggctcctcagtacatgttctctatagcactccagcctgctacttatgggaacttaataaagccaacctgacttggtcggtgaagcacgatgatttcttcccatacgccgatggacctcaccagttctggacagggtattttagtagccgccccgccttgaaacgttacgagaggctgagctataatttcctgcaagtgtgcaatcagcttgaggctctggtcggcttggctgccaatgtcggaccctacggctctggagactccgccccgttaaacgaggccatggccgtcctgcagcaccacgacgcagtgtcgggcacgtcccgacaacatgtggctaatgattacgctaggcagctcgctgcagggtggggcccctgcgaggtgttactttctaacgctctagctcgtttacgaggcttcaaagaccacttcacgttttgccagcagttgaacattagcatctgcccccttagtcagacggccgcccggttccaagtaatagtttacaatcccctgggccgaaaggtaaattggatggtgcgactccccgtttcagaaggagtttttgtggtcaaggatccaaacggccgcactgtaccttcagacgtcgttatttttccgagctccgacagccaagctcatccaccagaactcctgttctctgccagcctgcctgccctaggattctccacatactctgtggcgcaggtgccaaggtggaagccacaggctcgcgctccacagcccatcccccgaagatcctggagccccgcgctcaccatcgaaaatgagcacattagagcaacttttgaccccgatacaggcttattgatggagatcatgaacatgaatcagcagttactgctcccagtgaggcagactttcttttggtacaacgcctccatcggggacaatgagtcagatcaggcctccggagcctatattttccggccaaaccagcaaaaacctctgccagtaagtcgctgggcccagatccatctcgtgaagacaccactagtgcaggaggtccaccagaacttctccgcatggtgtagccaagtggtccggctataccctgggcagcgccacttggaactggaatggtccgtagggcctatccctgttggtgatacttggggcaaagaggtgatctctaggttcgacaccccactagagacgaaaggcagattctacactgacagcaacggccgcgaaatccttgaacgcaggcgggactatcggccaacgtggaagctgaatcaaacagaaccagtagccggaaactactaccccgtaaatacaagaatatacattactgacggaaatatgcagttgaccgtcctgaccgatcgctcccaagggggctcatctctaagggacggctctctggaacttatggtccaccggagactgctaaaagacgatggtaggggggtgtccgagccattaatggagaacggcagcggagcctgggtgagggggcggcaccttgtattgctagacaccgcgcaggccgctgctgccggccaccggctgctggccgaacaggaagttttagctccacaggtagtcctggcccctggaggcggggcggcttacaatctgggagctccaccgagaacacagttttccggactgagacgagatctccctccaagtgtgcaccttctcacgctggcgtcgtggggaccggagatggtgctactcagactggagcaccagtttgccgtgggtgaagatagcggcagaaacctatccgcccccgtgacgctgaacctgagggacttattttccactttcactataacccgtctgcaggagactacgctagtggctaatcagctgagggaagcagcttcccgactgaaatggactaccaacacgggtcctactccacatcagaccccataccaattagatccagctaatattacgctcgagcccatggagattcgaaccttccttgcctcagtgcaatggaaggaagtggatggg

SEQ ID NO: 11622 - DNA, 3033 bp, Artificial Sequence
  derived and/or modified sequence
atgggagcctatgctcgggcaagcggggtctgtgcaagaggctgccttgattctgcaggaccatggacaatgtcccgggctctgcgccctccactccctcccctttgtttttttctcttgctgttggccgccgcaggggctcgggctggcggctatgaaacatgtccaactgtgcagccaaacatgcttaacgtccacctcttgccacacactcacgatgatgtgggatggctgaagaccgtggaccaatacttttatgggattaagaatgacatccagcacgcaggcgtccagtatatcttagactctgtgatctcagcactccttgcagaccctacaaggcgatttatttacgtggaaatagcatttttctctcgctggtggcatcaacaaaccaacgcaacacaagaagtggtgagagatctcgttcgccagggcagacttgaattcgcaaacggcggatgggtaatgaacgatgaggcagcaacccactacggagctattgtcgatcagatgaccctggggctgaggttccttgaagacacgtttggaaacgatggtagacccagggtcgcctggcatatcgacccctttggccattcacgcgaacaggcctctctgtttgcccaaatgggatttgacgggttttttttcggtaggctggactatcaagacaagtgggtccgtatgcagaaattggagatggaacaggtgtggagagcaagtacctcgttaaagcctcctaccgctgacctttttactggagtgctgcctaatggatataatcctccaaggaacctttgttgggatgtcctgtgcgtcgatcagcctttggtcgaagatcctagaagccccgagtacaacgcaaaggaattggtcgattacttcctcaacgttgcaacggcccaggggcgttactacagaaccaaccacaccgtcatgaccatgggctctgacttccagtacgaaaatgcaaacatgtggtttaagaatctcgataagctcatcaggctggtcaacgcacagcaggctaaaggctccagcgtccatgtcctatactcaacccccgcatgctatctgtgggaactcaacaaggcaaatctgacatggtctgtcaagcatgatgacttcttcccttacgctgacggccctcaccaattctggactggatactttagcagcagaccagctttgaagagatacgagagactgagctataacttcttacaggtatgtaatcagttggaggctctagttgggctcgctgccaatgtcgggccttacgggtcaggagatagtgccccccttaatgaagcgatggctgtccttcaacatcacgatgccgtcagtggtacctcccggcagcatgtggctaacgactacgctcgccaactggcagctggctggggcccttgcgaggtcctcctgagtaacgctcttgcaaggctgaggggatttaaagaccattttaccttctgccaacaattgaatattagcatttgcccattaagtcagactgccgcaagatttcaggtgatcgtgtacaatccactgggccgtaaagtgaactggatggttcggcttcccgtaagcgagggcgtctttgtcgtcaaggaccccaacggccgcactgttccctctgatgtagtgatttttcccagtagcgacagccaagctcacccccccgagctccttttctcagcttcactgccagcactgggcttcagcacttacagcgtagcccaagtcccccgctggaagcctcaagcaagggctccgcagccaataccgaggaggtcatggtctcctgcactcacaatcgaaaacgagcatattcgggcaacctttgatcccgacacagggctcctgatggagattatgaacatgaatcagcagctcctgctgcctgtgaggcagacctttttttggtacaacgctagcatcggagacaatgaatctgatcaggctagtggagcctacattttcagacctaaccaacagaaaccactccccgtgagcagatgggcccagatccatttggtgaagacgccactcgtccaagaggtgcaccagaacttttcagcttggtgtagccaggtagtgcgactatacccaggccagcgccacttggaattagaatggtctgtcggccctatcccagtcggcgatacttggggaaaggaggtaattagccggttcgatacccccttagagacaaaaggaagattttacaccgatagcaacggtagagaaatcctggagcgccggagggattacagacccacttggaaactgaatcaaactgaacctgtcgccggtaattactaccctgtgaacaccaggatctatattacagatggaaatatgcagttgactgtgctcacagatcgctcacagggcggaagctctttgcgggatggaagccttgaactgatggttcaccgacgtctgctcaaagacgatggccgcggcgtgagcgagccattgatggaaaatggctcaggggcatgggtgagaggccgccacttagtcctgctcgacaccgcgcaagctgccgcagctggtcatcgactgctggcggagcaggaggtcctggctccacaggtggtactggctccaggcgggggggctgcctataatctgggagcacccccgcggacacagttttctggactccgcagggatttgcccccatccgtccatttgcttacgcttgcgagctggggacccgaaatggtgctgctgcggctcgagcaccagtttgcagtgggggaggactctgggcgcaacttatctgccccagttactcttaacctgcgggacctgttttcgacattcacaatcacaaggttgcaggagactacccttgtggcaaaccagctgcgcgaggcagcctctaggttaaaatggaccactaatacaggcccaaccccccaccagacaccttaccagctcgatccggctaacattaccctagaacctatggagattagaacattcttggctagcgtgcagtggaaggaggtcgacggc

SEQ ID NO: 11623 - DNA, 3033 bp, Artificial Sequence
  derived and/or modified sequence
atgggagcgtacgcccgtgcctctggagtgtgcgctaggggatgtctcgacagcgcaggcccttggacaatgagtagggccctccggccaccgcttccaccgctatgtttctttcttctgcttctggctgccgctggcgcccgtgccggcggatatgagacttgtcccaccgtccagcctaacatgctgaatgtgcatctgctgccccatactcacgatgacgtaggctggctgaagaccgtggaccagtacttttatgggatcaagaatgacattcagcacgcgggagtgcagtatattttggattcagttatctctgcactgctggctgatcccactaggcgcttcatttatgtggaaatcgccttctttagccggtggtggcaccagcagacgaacgcaacgcaggaggtggtgcgcgatctggttcgccagggtagactggagttcgctaatggcgggtgggttatgaacgacgaagctgctacgcactacggagcaatagtcgaccagatgactctaggcctgcggttcctagaggatacatttggtaacgacgggagacctcgcgtggcctggcacatagatccattcggccactcccgagagcaggcctctctgtttgcccagatgggcttcgatgggtttttcttcggacgactggattaccaggacaaatgggtgaggatgcagaagctggaaatggaacaggtgtggagagcttcaacatcgttaaaaccccctactgctgacctgtttacgggagttctgcccaatggatataatccaccacggaacctttgttgggacgtcctttgtgtcgaccagcccttagtggaggatcctaggagtccggaatataatgctaaggagctggtggactacttcctgaatgttgccacagcccaggggcgctattaccggaccaatcatacagtaatgaccatgggcagcgatttccagtacgaaaacgcaaatatgtggtttaaaaacctggacaaattgattcgattggtgaatgctcaacaagccaaggggagttcagtgcacgtcctgtactctaccccggcctgttatctctgggaactgaacaaggctaacctgacatggtctgtcaaacacgacgattttttcccctatgctgatggcccccatcagttttggaccggttacttctcctcccggcccgctttaaaacggtatgaaagactgtcgtataatttcctccaggtctgcaatcagctggaggcgctggtgggcttggcagccaatgtgggtccttacggcagcggcgatagcgccccattgaacgaggcaatggccgtgttacagcatcacgatgccgtgagtggtaccagcaggcagcatgtagctaacgattatgcgcggcaacttgcggccggatggggtccgtgtgaagtgctgctgtccaacgccctggcacgcttgcgggggttcaaagaccactttacgttctgccagcagctgaatatcagcatatgccccctgagccagaccgccgctcggtttcaggttatcgtctataaccctctaggaaggaaagtaaattggatggtgaggctaccggtatccgagggagtgtttgtcgtgaaggatcctaatggcaggaccgtcccaagtgatgtcgtaatcttcccttcttccgactcgcaggcccatccacccgagctgttattttccgcgtcgctaccagctctcggtttctctacatacagcgtggcccaggttcctcggtggaagccacaggcaagagcgcctcagcctatacctcggagatcttggtcccccgcccttacaatcgagaatgagcacattcgggctactttcgacccagataccggccttctgatggagattatgaacatgaaccagcagttactgctgccagtgcgccagaccttcttttggtataatgccagcatcggtgacaacgagtctgaccaagccagcggcgcatacatcttccggccgaatcagcagaagcccttgcctgtctccagatgggctcaaatacacttggtgaagacccctttggtgcaagaggtccaccagaatttctccgcatggtgcagccaagtcgtccgactctacccagggcagcggcacctcgaacttgagtggagcgtgggtcccatccctgtgggagacacgtggggaaaggaggtcatctcccggttcgacacacctctggaaacgaagggccgtttttacaccgatagcaatggtcgggaaattctggagcggaggcgggactacagacctacctggaaacttaatcagacagagccagtggccggtaattactaccccgttaacacaaggatatacatcaccgacggtaacatgcagttgactgtgctcacggacaggagccaaggaggcagctccctgcgggacgggagccttgaactcatggtgcaccgtcggctgctgaaagacgatggtcgcggggtcagtgagccccttatggagaatgggagcggcgcttgggtccgcggcaggcatctcgtcttgctggataccgcccaagcagcggcggctggccaccggctgctggcagaacaggaggtcctcgcccctcaggttgtgctggctcccggcggtggagctgcctacaacctcggcgcccccccgcggacgcagttctcgggcctgaggcgcgacttgccacctagtgttcacttactgaccctcgcatcctggggcccggagatggtgctactgcggctagagcatcagttcgccgtgggagaagactcaggcaggaatctctctgcccccgtcacactcaatctcagggatttattctccacatttaccattactcggctgcaggaaaccacactggtcgcaaaccaattgcgggaagccgcgtccagattgaaatggaccaccaacaccggccccaccccgcatcagaccccctatcagcttgatcccgcaaacattacgcttgaaccaatggagattaggaccttcttggcatccgtgcagtggaaggaggtggacggc

SEQ ID NO: 11624 - DNA, 3033 bp, Artificial Sequence
  derived and/or modified sequence
atgggtgcctacgcacgtgcttcgggtgtgtgcgcgagaggctgtttggattccgccggaccatggaccatgagcagagctctccggccccctcttccgcctttgtgcttcttcctgctcctgctggcagccgctggagcccgggcgggaggctacgagacttgtccgacggtccagcccaatatgttgaacgtgcacctgctgcctcatactcatgacgatgtcggctggctgaaaaccgtggatcagtacttctacggaatcaagaatgacattcaacatgcaggcgtgcagtacatcctggactccgtgatatcggccctcctggcagaccccactcgcaggttcatctacgtcgaaattgcgtttttctcgaggtggtggcatcagcagacgaacgccacccaggaagtggtccgcgacctggtgcgacagggccgcctcgagttcgccaacgggggctgggtgatgaacgacgaggcggccacccactacggagctatcgtggatcagatgactctcggactccgcttcttggaagataccttcgggaacgatggacgcccgcgcgttgcctggcacatcgatccttttggtcattcacgcgaacaggcgagcctgttcgcgcaaatgggtttcgacggtttcttctttggcaggctcgactatcaagacaagtgggttagaatgcaaaaactcgagatggagcaggtctggagggcctcgacttccctgaagccgccaactgccgacctcttcactggcgtgttgcccaacggatacaacccacctagaaatctctgctgggacgtgctgtgcgtggatcagccgctggtcgaagatccaagatccccggaatacaatgcgaaggaattggtcgactacttcttgaacgttgctactgcacaaggacgttactacaggactaaccacactgtcatgaccatgggatccgacttccagtatgagaacgccaacatgtggttcaagaacttggacaaactgatccgcctcgttaacgcccagcaagccaagggctcaagcgtgcacgtcctgtactcaactccagcatgttacctgtgggaactgaacaaagctaacctcacctggagcgtgaaacacgacgacttcttcccatacgcagatgggccccatcagttctggaccggctacttctcgtcgcggcctgctctgaagcggtacgaacgcctgagctataactttctccaggtgtgcaaccagcttgaggctctcgtgggactggccgcaaatgtggggccttacggaagcggagactccgcaccgctgaacgaggccatggccgtcctgcagcaccatgacgcggtgagcggaactagtcgccaacacgtcgccaatgactacgctaggcagctggctgccggatggggcccttgcgaagtgcttctgtcaaatgcactggccagacttagagggtttaaagaccacttcaccttctgccagcagctgaacatctctatctgccctctgtcgcagaccgcggcgcggttccaagtcatcgtgtacaatccgctgggacggaaggtcaattggatggtgcggctgccggtgtcggaaggcgtctttgttgtcaaggatcctaacggcagaacggtgccaagcgatgtggtgattttcccgagtagtgactcgcaggctcaccctcccgagctcttgttctcggctagcctgccggcgctgggtttctcaacctactccgtggcccaggtgcctaggtggaaaccgcaggcccgcgccccgcaacctattccaaggcggtcctggtcccctgccctgactatcgaaaacgaacatatcagggcaacttttgacccagacaccggactgctgatggaaatcatgaatatgaaccagcaactcttgctgcctgtgcgccaaactttcttttggtacaacgccagcatcggagataatgaatcagaccaggccagcggagcttacatctttagaccgaatcagcagaagcctttgccggtgtcgcggtgggctcagatccatctggtaaagacgccgctggtgcaggaggtgcatcaaaacttttcagcgtggtgtagtcaagtcgtccgcctctaccctgggcaacgccacctcgaactcgaatggtccgtggggccaataccagtgggagatacctggggcaaggaggtcatctcacggtttgatactccgctggagacgaaggggagattctatactgattcgaacggacgcgaaatcctcgagcgtcgccgggactaccggcctacctggaaacttaatcagaccgaaccggtggcggggaactactatccggtcaatacccggatctacatcaccgatgggaacatgcagctcaccgttcttacggatcggtcccagggaggttcctctctgagagacggaagcctggagctgatggtgcaccgccgcttgctgaaagatgacggcagaggtgtcagcgaacctctgatggagaacggttccggagcatgggtccggggccgacacctggtgctcctggacaccgctcaggccgccgccgcgggacacagacttctggcggaacaagaagtccttgctcctcaagtggtgctggcgcctgggggcggagctgcgtacaatttgggagcacccccgcggactcaattttctggacttcgccgcgacctgccgccgtcggtgcatcttcttactttggcttcgtggggacctgagatggtgctccttagactggagcaccaattcgctgtgggcgaggactcagggaggaatctgtccgcgccggtcactctcaaccttcgcgacctgttctcgaccttcacgattactcggctgcaagaaaccactctcgtcgccaaccagctgagagaggcggcatcgcgtctgaagtggactacgaataccggaccgaccccgcaccagactccgtaccaactcgaccccgccaacatcaccctcgaaccaatggagatccggacctttctggcctccgtgcaatggaaagaggtcgatgga

SEQ ID NO: 11625 - DNA, 3033 bp, Artificial Sequence
  derived and/or modified sequence
atgggtgcttacgctcgagcgtcgggggtttgcgcgcgtggatgcctagatagcgcagggccatggactatgtcccgcgccttgcgtcccccgttaccccccctgtgcttcttcttgctcctgctggccgcagccggcgcacgggcaggtggttacgagacttgccccaccgtgcagcctaatatgctgaatgtgcacctcctgccccatacccacgacgacgtcggatggttaaagaccgttgaccagtatttttatggtataaaaaacgacattcagcatgccggggtccagtatattctggattctgttatctctgcactgctggccgatccgacacggcgctttatctacgtcgagattgctttcttctccagatggtggcaccagcaaactaatgctactcaagaagtggtacgcgaccttgtgcgacagggacgacttgaatttgccaacgggggttgggtgatgaacgatgaagctgctacacactatggcgcaatcgttgaccagatgaccctgggcctgaggttccttgaggacaccttcggcaacgacggacggccccgtgtcgcttggcacatagatccattcggccactctcgcgagcaggcttccctatttgcccagatgggctttgatggcttttttttcgggagactggactaccaggataagtgggtcagaatgcagaagctggagatggagcaagtgtggagagccagcacgtccctgaagccgcccacagccgatctgttcacgggggtgctcccgaacgggtacaacccccctcggaatctgtgctgggacgtgctgtgtgttgaccagcctttagttgaggacccaagatcccctgaatacaacgccaaggagctggttgactactttcttaacgtcgctaccgctcaagggcggtattatcgaactaatcatacggtcatgactatgggatctgactttcagtatgaaaacgcgaacatgtggtttaagaatttagacaagctcattaggctggtgaatgcccagcaggccaagggctcctcagtgcatgtcctgtactcaactcctgcctgttatctgtgggagctaaataaagccaatctgacctggtctgtaaaacacgacgatttttttccctatgccgacgggccacaccagttctggactggttatttcagttcacggcctgccctgaaaagatatgagagactcagctacaattttctacaggtttgcaaccaacttgaagccttggttggtctggcggcaaacgtcggaccctacggaagcggcgattccgctccactgaatgaggcgatggcagttctgcaacaccatgacgctgtgagtggtacgtctagacagcatgttgccaacgactatgccaggcagttagccgccggttggggaccctgcgaggtcctgctctctaatgcactggcaagacttcgcggatttaaggatcacttcaccttctgccaacaattgaatatctctatttgccccctgagccagaccgccgcacgcttccaagtcattgtctataacccactgggcaggaaagtgaactggatggtccggcttcccgtaagtgaaggcgtctttgtggtcaaggatccgaatggccggacggtgccttctgacgttgtcatttttccttcctccgattcacaggcgcacccaccagagcttttattctcagcgtcactgccagccctgggattctctacctactccgttgctcaggtccccaggtggaaaccccaggctagggccccgcagcctatcccgcgccggtcgtggagtcctgccctcaccatcgaaaacgaacatatccgagctacctttgaccctgacactgggctacttatggagatcatgaatatgaaccaacagcttctgctgcctgtgaggcaaacgttcttttggtacaacgcctctataggtgacaatgagagcgaccaggcgagtggtgcatatatcttcagacctaatcagcagaagccactccccgtgtcccgatgggctcaaatccatctggtgaagaccccgcttgtacaggaagtgcatcagaacttttctgcatggtgctcacaggtcgtcaggctttatcccggccaaagacatctggaactggagtggtccgtgggccccattccggttggcgatacatggggtaaggaagtcattagccgctttgacacgccattggagactaaaggtagattctacacggattccaatggtcgggagatcctagaacgtaggcgtgactatcggcctacatggaagcttaaccaaacagaaccagtggccgggaattattatcctgtgaacacccggatctacattactgatggaaacatgcaattgaccgtgctgacagatcgtagccagggcgggagcagtctgcgcgatggctccctggaactgatggtgcatagacgcctcctgaaagatgatggccgcggagtatcagagcccctaatggagaacggctccggtgcctgggttcgtgggcggcacctggtccttttagacaccgcgcaagccgccgccgccggacaccggctactcgctgaacaggaggttctggctccccaagtggtgctagccccagggggcggggccgcttataatttgggcgcgcctccaagaacccagttctccgggttgagaagggacctgcctccctcagtccatctgctgacccttgctagctgggggccagaaatggtactgctgagactcgagcaccagtttgcggtgggggaggactccgggaggaatctctcagcccccgtcaccctgaatctacgggacctgtttagcacctttacaattacccgcctccaggaaaccaccttggtagccaaccagcttcgtgaggcagcgtctcgactgaaatggactactaacactggtccaaccccccatcagacgccataccagctggaccccgcgaatataacactggaacccatggaaatccggactttcttggcatccgtgcagtggaaggaggtcgatggt

SEQ ID NO: 11626 - DNA, 3033 bp, Artificial Sequence
  derived and/or modified sequence
atgggggcatacgcaagagcgagcggtgtctgtgcccgcgggtgtcttgactccgctgggccttggaccatgagccgcgccctgaggccacctcttccacctttgtgcttctttctgctgctgctcgccgcagcaggtgcccgagcaggcggatacgaaacgtgtcccactgtgcaacctaacatgctgaacgtgcatctgctgcctcatacccacgatgatgtcggttggctgaaaactgtcgaccaatacttttacggaattaagaacgacattcagcatgcaggagttcaatacattctggacagcgtgatctcagcattgctcgcggatcctacccgtagattcatttacgtggaaatcgcgtttttctcacggtggtggcaccagcagaccaatgctactcaggaagtggtgagagatctggtccgccagggacggctggagtttgccaacggtggctgggtgatgaacgacgaagctgcaactcattatggtgccatcgtggatcaaatgactctgggccttagattcctggaggacacttttgggaatgatggaaggcctagagtcgcctggcatatcgatcctttcggccacagcagagaacaagcatcgcttttcgcacaaatgggtttcgacggattcttttttggacgattggattaccaagataagtgggtgcgtatgcagaagttggagatggagcaggtgtggcgtgcatcgacctcgcttaaaccgcccaccgcagatctttttactggggtgcttcccaatgggtacaatcctccacgtaatttgtgttgggatgtcctttgcgtggatcagcctctggtggaggatcctcgttctcctgagtataacgcaaaggaacttgtcgattactttctcaacgtggcgacggctcaggggagatactaccgaacgaaccataccgtgatgaccatgggaagcgattttcagtacgaaaacgcaaacatgtggttcaagaacctcgataagctcatccgtttggtgaacgcacaacaagcgaagggttcgtccgtgcatgtgttgtactccacgcccgcctgttacctttgggaattgaacaaggcaaatctgacttggtccgtgaagcatgatgacttttttccctacgcagacggacctcatcaattttggaccggatacttttcgagccgcccagctctcaaaagatacgaaagactgtcatacaattttcttcaagtatgtaaccagcttgaggcacttgtcggcctggcagccaacgtcggcccatacggatcgggtgattcggcgccccttaacgaagcaatggcagtacttcaacatcatgatgctgtgtcgggaacctcgcggcaacatgtggcaaacgattacgcacgacaactggcagcgggatggggtccatgcgaagtcttgctttctaatgcacttgcaaggctccgtggatttaaggatcactttaccttttgtcaacaactgaacattagcatctgtccattgtcccaaaccgcagcaagatttcaagtcatagtgtacaaccctctgggtcgcaaggtcaattggatggtgagactccctgtgtccgagggggtgtttgtcgtgaaggaccccaatggaagaactgtgcctagcgatgtcgtcatctttccttcgtcggatagccaggcccaccccccagaactcctgttctcggcaagcctgcctgccctcggattcagcacttattcagtcgcccaagtgcctagatggaaacctcaagcacgtgcccctcaacccattccacggcgcagctggtcgcctgcgctgactatagaaaatgagcatatcagagcaaccttcgatccagacactggcctgcttatggaaatcatgaacatgaaccagcaacttctgctccccgtgcgtcagaccttcttttggtataacgcgtccatcggggacaatgagtcggatcaggcatccggtgcatacatcttccgtcctaatcagcagaaaccactgcctgtgagccgctgggctcagattcaccttgttaaaactccactcgtgcaggaagtgcaccagaatttctccgcctggtgctcgcaggtcgtccgtctttacccaggacaaagacatttggagctggagtggtccgtgggaccaattccagtgggtgacacgtggggaaaggaggtgatctctcggttcgataccccacttgaaaccaaagggcggttctacaccgattccaatgggcgagaaatccttgagcgccgcagggattaccgacctacctggaagttgaatcagaccgaaccggtggcaggtaactactaccctgtgaatacccgtatctacataacggatggaaatatgcaacttactgtgctcactgataggtcacaaggcggttcgtcacttcgggatggttcacttgaacttatggtgcataggcgcctgttgaaagacgatggccggggtgtctccgaacctctgatggaaaacggtagcggggcatgggtgcgcggacgccatctcgtgctcctggatactgcacaagcagcagcagccggtcaccgactgctggcagagcaagaagtgcttgctccacaagtggtccttgcgcctggtggtggtgcagcgtacaacctgggagcgccgccgcggactcaattctccggcctgagaagagatctgccaccttcggtgcatctcctgactctggcgtcgtggggaccagaaatggtcttgcttcgactggaacatcaatttgccgtcggagaggattcgggaagaaacctgtcagcgccagtcacccttaaccttcgcgatctgttctccacctttaccatcactagattgcaagaaaccacgctcgtcgcaaaccaactgagagaagcggcgtcaagactgaagtggaccactaacactggacccaccccccaccaaaccccataccaacttgatccagcaaacattacgctggagcctatggaaatccgaacctttcttgcatccgtgcagtggaaggaggtggacgga

SEQ ID NO: 11627 - DNA, 3033 bp, Artificial Sequence
  derived and/or modified sequence
atgggggcctacgcacgggcctccggtgtgtgtgcccgcggatgcctggactctgccgggccatggaccatgtcacgtgcactgcgtcctccactgcccccactgtgtttctttctcctgctgctggccgccgctggagccagggcaggcggctacgagacctgcccaacagtgcaacctaatatgctgaatgtgcatctgctccctcacacccatgacgatgtggggtggctaaaaaccgtggatcagtacttttatggcattaaaaacgatatacaacatgctggagtgcagtatatcctggactctgtgatcagcgcacttttagcagatcctactcggcgtttcatttatgtggaaatcgccttcttttccaggtggtggcatcagcagaccaatgctacacaagaagtcgttagagatctagttcgacagggacggctagaattcgccaacggcggatgggtgatgaacgacgaggctgctacacactatggcgcaatcgttgatcagatgactctcggtctgcggtttctagaggacactttcggcaatgatgggcgtccacgtgtggcctggcacatagacccctttggccactctcgcgagcaggccagtttattcgcccagatgggctttgatggctttttcttcggtcggctggactaccaggacaagtgggtccggatgcagaagcttgaaatggaacaggtgtggagggcttctaccagtctaaaacccccaacagccgacctcttcactggggtgctgcccaacggctataaccctcctaggaatctatgttgggatgtcctatgtgtcgaccagcctctagtcgaggacccacgaagtccagaatacaacgccaaggaacttgtcgattactttctgaatgttgcaacagcccagggccggtactacagaaccaatcacacagtgatgaccatgggatccgactttcagtatgagaacgccaacatgtggttcaagaatctggataagctgattcgactggtgaacgctcagcaggctaaaggctcctccgtccatgtgctgtattcaacacctgcatgctatctgtgggaactcaataaggctaatctgacctggtccgttaagcatgacgactttttcccctacgccgacggcccccaccagttctggaccggctacttcagttcccgaccagctctgaagagatacgagcggctgtcctacaactttctacaagtttgtaaccagctggaggccctggtgggtctggccgcaaatgttgggccctacggaagcggagactctgctccccttaatgaagccatggccgtgctccagcaccatgacgccgtgagtggtacctctcgccagcacgttgctaacgactacgctcggcagctggcagccggctggggaccatgtgaggtgttactgtcaaatgctttagcacgcctgagaggctttaaggaccatttcaccttctgccagcagctaaacatctccatatgccctctgagccaaacagctgcccggttccaggtcatcgtgtataatcctctggggaggaaagtgaactggatggttagactacctgtgagcgagggtgtgtttgtggtcaaggatcccaatggaaggacagttcccagtgacgttgtcatcttcccatctagcgattcccaggcccatccccccgaactactgttttctgcatctctgcctgctttaggtttcagcacatatagtgttgcacaggtgccccgatggaagcctcaggctcgagcaccacagccaattccccgacggtcctggagtcccgccctaaccatcgagaacgagcacatcagagccacatttgaccccgatacaggactcctgatggagattatgaacatgaaccaacagctgctactaccagttagacagacctttttctggtacaacgcctctataggcgataacgagtccgaccaggcttccggcgcatatatctttcgccctaatcaacagaaaccactgccagtgtctagatgggcacaaatacacctggtcaagaccccactcgtgcaggaggtgcatcaaaattttagtgcttggtgctcccaagtcgtcaggctgtatcccggccagaggcatctcgagctggagtggtcagtgggtccaatcccagtgggggatacttggggcaaagaagtcattagtagattcgacacccctcttgaaacaaaagggagattctacaccgatagcaatgggcgtgaaatcctggaacgccggcgagattatcgtcctacttggaagctcaaccagacagagcccgtagccggcaactactatcctgtgaacacacggatctatataacagacgggaatatgcagctgaccgtcctgaccgaccgctcccaaggcgggtcctccttaagggacggctctctggagctgatggtccaccgacggctgctcaaggatgatggtcggggcgtgtccgagccgttaatggagaacggcagtggcgcttgggtccgcggaagacacttagtgctgttagatactgcccaggctgctgctgccggccaccggctcctggcagaacaagaagtgctggccccacaggtggtgctcgcacccggcgggggagctgcctataatcttggcgcccctccccggactcaattctccggcctgagacgcgacctgccacctagtgtgcacttgcttacactcgcctcatggggcccggaaatggtgctgctgagactcgaacatcaattcgccgtgggcgaagactctggccggaatctatctgctccagtcaccctgaacttaagggacctgttctctacatttacaatcaccagactgcaggaaaccaccctagttgccaatcagctgcgggaagccgcaagtcgattgaaatggaccactaataccgggcctacacctcaccagacaccctaccagttagaccccgctaacatcacattggagcctatggagatacgcacattcctggcttccgtgcagtggaaggaggtggacggg

SEQ ID NO: 11628 - DNA, 3033 bp, Artificial Sequence
  derived and/or modified sequence
atgggagcatacgctcgagcatccggagtgtgtgccagagggtgtttggattccgcaggaccgtggactatgtcacgagcgctgcggcctccacttcctccactgtgttttttcctgcttctcctggcggcagcgggagcacgtgcgggaggatacgaaacctgcccaacggtccagccgaatatgctgaacgtgcatcttcttccccatacccatgatgatgtgggatggctgaaaactgtggatcaatacttttacggaattaagaatgacattcaacacgcaggagtgcagtatatcctggattcagtgataagcgcactgctggcggatcccactagaagattcatttacgtggagattgcatttttctcccgctggtggcaccaacaaacgaacgcaacccaggaagtggtcagagatctggtgagacaaggacgcttggaatttgctaacgggggatgggtgatgaacgatgaggcagcaacccactatggtgcaatcgtggatcagatgaccctgggactccgctttctcgaagatacctttggaaatgatggcaggccacgggtcgcatggcatattgatccttttggacattcccgagagcaggcaagcctttttgctcagatgggctttgatggtttcttttttggacgcctggattaccaagacaaatgggtgaggatgcaaaagctggagatggaacaagtgtggcgcgcgtctacctcccttaaacctcctaccgcagacctgtttaccggagtgctcccaaacggttacaatccaccaagaaatctctgttgggacgtgctgtgtgtcgatcagcctctggtggaggatccacggtcgcccgagtacaatgcaaaggaacttgtcgattactttctgaacgtcgcgaccgcacaaggccgatactatcggactaaccatactgtcatgactatgggatcggattttcaatacgagaatgctaacatgtggtttaagaaccttgataaactgattagactggtgaatgcacaacaggcgaagggttcatcggtccatgtgctttactcaactcctgcatgttacctttgggaactgaacaaggcaaacctgacttggtccgtgaagcacgatgacttttttccttacgccgacggaccacaccaattctggacgggatacttctcctcacgtcctgcgctcaagagatacgagcgattgtcttacaactttctgcaagtgtgtaaccaactcgaggcacttgtcggcctggccgccaatgtgggcccctacgggagcggggactcggcgcccctgaacgaagccatggcagttctgcagcatcacgacgcggtgtcgggtacctccagacagcatgtggcaaacgattacgcaagacaactcgccgcgggttggggtccatgcgaagtcctcctgtccaacgccctcgcacggcttcgtggttttaaggatcacttcaccttttgtcaacagctgaacatttcaatttgccctttgtcgcagacggcagcaagatttcaagtgattgtgtacaaccctcttggtcggaaggtcaattggatggtgcggttgccagtgtccgaaggagtgtttgttgtgaaagatccgaacggaaggaccgtgccctcagacgtcgtcattttcccatcctccgattcccaggcccatcctcccgagcttctcttcagcgcatctctgcccgcgctgggatttagcacctactccgtggcccaggtgccaagatggaagccacaagcaagggcacctcagcctatccctagacgctcgtggtcgcccgctctcactatagaaaacgagcacattagagcaacttttgatcctgacactggcctccttatggagattatgaatatgaaccagcagcttctccttcctgtgcgtcaaaccttcttttggtacaatgcgtcaattggggataacgaatccgatcaggcatcaggtgcgtatatcttcaggcctaaccaacagaagccactgcctgtgtcaaggtgggcccaaatacacctggtcaagacccctctggtgcaggaagtgcatcaaaacttctcggcatggtgcagccaagtcgtgcgactttacccaggtcagaggcatcttgaactggaatggagcgtgggaccaatcccagtgggcgacacttggggaaaggaggtgattagcagatttgatacccctcttgaaactaagggaaggttttacaccgactcgaatggtagagaaattctggaaaggcgccgcgactaccgccctacctggaaactcaaccagacggagcccgtggcaggtaattactaccctgtcaacaccaggatttacattaccgatggaaatatgcagctgactgtcctgactgatagatcccagggcggctcctctcttcgcgatggcagcctcgaactcatggtgcataggcgactgctcaaggatgatgggcgtggcgtctcggaacccctgatggagaacggttcaggtgcttgggtgaggggtagacatcttgtcctcctggataccgcacaagcagcagcagccggtcatcgacttctcgctgaacaggaagtactcgcacctcaagtcgtgttggctcccggcggcggggccgcctacaatcttggagcaccacctagaactcagttctccggacttagaagagatctgcctccaagcgtgcatctgcttacgctggcatcatggggaccagaaatggtgcttctcaggctggaacaccagttcgcagtgggagaagattcaggcaggaatcttagcgcgcctgtgaccctgaacctgcgggacctcttttccaccttcactattacccgtctccaggaaactacgctggtggccaaccaactgcgggaggcggcctcgagacttaagtggactaccaacactggtccaacgccccatcagaccccgtaccagcttgatcccgccaacattaccctggagcctatggaaataagaaccttcctggcatccgtgcaatggaaggaagtcgatgga

SEQ ID NO: 11629 - DNA, 3033 bp, Artificial Sequence
  derived and/or modified sequence
atgggagcgtacgcgagagcgtctggagtctgcgcacgtggctgtctcgacagcgcaggcccttggaccatgtcgcgagctcttaggccacctctccctcccctttgcttttttcttctgctgttggctgcagcaggtgcgcgtgccggaggttacgaaacttgtccaacggtgcaacctaatatgctgaatgtgcatcttcttccacatactcatgacgatgtgggatggctgaaaactgtcgaccagtacttctacggtatcaaaaacgatattcagcatgccggggtgcagtacatacttgatagcgtgatctccgccctgctggcagaccccactaggcgctttatctacgtggaaatcgcattcttctcacggtggtggcaccaacaaaccaatgcaacccaggaggtggttagggacctggtgaggcaaggtaggctggagtttgcaaatgggggctgggtcatgaatgacgaagccgccactcattacggagcgattgtggatcaaatgaccctggggctccgcttcttggaagatactttcggaaacgacggacggccacgggtggcatggcatattgacccgtttgggcattcccgagagcaggcgtccctctttgcacagatgggattcgatggtttcttctttgggagactcgattaccaagataaatgggttcgcatgcaaaagctcgaaatggagcaagtgtggcgcgcttcgacttcgttgaagccccctactgcagacctgtttacgggtgtgcttccgaatgggtataatcccccaaggaatctttgttgggacgtgctgtgcgtggaccagccgctcgtcgaagatcctcgatcacccgaatacaacgcaaaggaacttgtggattactttcttaacgtcgccaccgcacaaggacggtattaccggactaaccataccgtgatgactatgggcagcgatttccaatacgaaaacgcaaacatgtggtttaagaatctggacaagctgatccggcttgtcaacgcacaacaggcaaagggatcgagtgtgcacgtgctctactcgactccagcatgttacctgtgggagctgaataaggcaaatcttacctggagcgtcaagcacgatgacttttttccatacgcagacggtccacatcagttttggacgggatacttttcgtcccgacccgcactgaagaggtacgagcggctgagctacaattttctgcaagtgtgcaatcaactggaagcgctggtgggactggcagcaaatgtgggcccctacggttcgggcgattccgcccccctcaatgaggcaatggccgtcctgcagcaccatgacgcagtgagcggaacctcgcgtcaacacgtggcaaacgattacgcccgtcagctggcggccggttggggcccttgtgaggtgctgctctccaatgcacttgctcgcctcagaggatttaaggaccattttaccttttgtcagcaactcaacatctcgatctgtcctctttcccaaactgcagcaagatttcaggtgatagtgtacaatcctcttggacgaaaggtgaactggatggtgcggctgccagtgtcagaaggcgtgttcgtggtgaaggatcctaacgggagaacggtcccgtcggatgtggtgatatttccatcctcggatagccaagcacatccacctgagctgctttttagcgccagcctgcctgcccttgggttttctacttacagcgtcgcccaagtgcctcggtggaaaccgcaggcgcgcgcccctcaaccaattccgagacggtcctggtccccagcgctcactattgaaaacgagcatatccgggccactttcgacccggacaccgggctgctgatggaaatcatgaatatgaaccagcaacttcttctcccagtccgccagacttttttctggtacaatgcatcaatcggcgataacgagtctgatcaggcctcaggggcgtacatttttcgccctaaccagcaaaaaccactccccgtgtcacgctgggctcagattcatttggttaagactcctttggtgcaggaagtgcaccaaaacttttcagcatggtgctcgcaagtcgtgcgactttaccctggacagaggcacctggagcttgaatggtctgtagggccaatacctgtcggtgatacttggggaaaagaagtcatttcacgttttgatactccacttgagactaaggggagattctataccgactcaaacggcagagaaatccttgaacgtcgtagggattacaggcctacgtggaagctgaatcagaccgaacccgtggcagggaactattacccagtcaatactcggatctatatcaccgatggtaacatgcaactgaccgtgctgaccgataggagccagggcgggagctcgctcagagatggatccctggaacttatggtacatcgccgccttctgaaggatgatggacggggggtatccgagcctctcatggaaaacggatcgggagcatgggtgagaggcagacacttggtccttctggatacggcccaagcggcagctgcaggccatagactgcttgcagaacaggaggtgcttgccccacaggttgtcctggcacccggcggtggggccgcgtacaaccttggggccccacccaggactcaattctccgggcttagaagagatctcccaccgagcgtgcatttgctgactctggcatcatggggtccagaaatggtgcttcttcgcctcgaacaccagttcgccgtcggagaggactcgggtcgtaacttgagcgcgcctgtcaccctcaacttgcgtgaccttttctccacctttactataaccagactgcaggagactaccttggtggcgaaccagctgcgggaggcagcttctcgtttgaagtggactacgaatactggtcctaccccacaccaaactccataccaattggatcctgcaaacattactctcgaaccgatggaaattcggactttcctggcatccgtgcagtggaaggaagtggatggt

SEQ ID NO: 11630 - DNA, 3033 bp, Artificial Sequence
  derived and/or modified sequence
atgggagcatacgcccgcgcctcgggtgtgtgcgcacggggctgtctggattcagcagggccctggaccatgtccagggctcttagaccgccacttccacctctgtgcttctttcttcttctgctggcagcggccggtgcacgtgccggagggtatgaaacttgcccaaccgttcaaccaaacatgttgaacgtgcatctgcttccacatacccatgacgatgtgggttggcttaagaccgtcgaccagtacttctacggaattaagaatgatatacaacatgctggcgtccaatacattttggactcagtgatatccgccttgcttgcagacccaaccagacgatttatctacgtggagattgcatttttctctcggtggtggcaccagcaaaccaatgctactcaggaggttgtcagagatctggtgaggcaaggccgactcgagttcgctaacggtggatgggtgatgaatgatgaagcagcaacccattacggagcaattgtggatcaaatgactctcggactccggtttcttgaggacaccttcggtaacgacggtagacccagagtcgcctggcatatcgatcccttcggccattcgagagagcaagcatccctgtttgcacaaatggggtttgacgggtttttcttcggacgcctcgactaccaggacaagtgggtgcgtatgcaaaaacttgaaatggaacaagtctggcgcgcatcaacttccctcaagccacccaccgcagatcttttcactggcgtcctccccaacgggtacaatccgccacggaatttgtgctgggatgtcctgtgcgtggatcaacccctcgtggaggatcccagatcccctgaatacaacgctaaagaactggtggactactttctgaacgtggccaccgcgcaaggtagatactaccggaccaaccataccgtgatgaccatgggctcagattttcaatacgaaaacgcaaacatgtggtttaagaatttggacaaacttattagactggtgaacgcacagcaggcgaagggttcgtcggtgcacgttctttactccactcccgcttgttacctttgggaacttaacaaggcaaacctgacttggtcagtgaagcatgatgactttttcccctacgcagacggacctcatcagttttggactggatacttttcctcccggccagcgctgaaaagatatgaacgcctcagctacaatttcctccaggtgtgcaaccaacttgaagcattggtgggccttgcagcaaatgtgggcccctacggatcaggcgactcggcacctctgaacgaggccatggcggtgctccagcatcacgatgcagtgagcggtactagccggcaacatgtcgcaaacgattacgccaggcagcttgcagcaggatggggtccctgcgaggtgctgctgtcaaacgccctggcacggctcagaggcttcaaggatcattttaccttttgtcagcagctgaatatctcgatctgtcctcttagccagaccgcggcgcggttccaggtgattgtctataatcctcttggaaggaaggtgaattggatggtgcggcttcctgtctcggaaggtgtattcgtggtgaaggatccaaatggcagaactgtgccgtcagacgtggtcatttttccctcaagtgattcgcaagcacatcctcctgaacttcttttttcggcatcgctccccgcactcggattctcaacgtacagcgtggcacaggtcccgagatggaagcctcaggcaagagcaccacaacctattccccggcgatcgtggtcgcccgccttgactatcgaaaatgaacacatccgtgcaaccttcgaccccgataccggcctcctgatggaaatcatgaacatgaatcaacaactgctgctgccagtgagacagacttttttctggtacaatgcttccattggagacaacgaatcagatcaagcctcaggtgcctacatatttcggcctaatcaacagaagcctcttccagtctcgcgttgggcacaaattcatctggttaagaccccactcgtgcaggaagtgcaccagaacttttctgcatggtgttcgcaggtggtccgactgtaccccggccaacgccatttggaacttgaatggtcagtggggcctattcccgtgggggacacttggggtaaggaagtgatttcccgatttgatactcccctggagactaagggtcgtttttacaccgattctaatggacgagagattcttgaacgccgtcgggattacagaccgacctggaagttgaaccagaccgaacctgtcgcaggaaattactaccctgtcaacaccagaatctacataaccgatggcaacatgcaactgaccgtgctgacggaccgatcccaggggggcagctccctcagagatggatcactggaattgatggtccaccggaggctcctgaaggacgatgggaggggagtcagcgagccacttatggagaatggatccggcgcatgggttcgtggccggcaccttgttctgcttgacactgcacaggccgcagcagcaggtcatcgtttgctggcagaacaagaggtccttgcaccacaagtggtgctcgcccctggtgggggagcagcatataacttgggcgcaccacctagaacccaattttccggactccggcgtgaccttccaccaagcgtgcatttgctgaccctggcctcatggggaccagagatggtgctcctgcgtcttgaacatcagtttgcagtgggagaggactcaggcaggaacctgtcggctccagtcaccctgaatcttagggatctgtttagcacgtttacgatcactcgccttcaagaaaccacccttgtcgcaaatcagctccgtgaagctgcaagccggctcaagtggactactaatacgggacctacgcctcatcaaactccttaccagcttgatcctgcaaatatcactctggagcctatggaaattaggacgtttctggcctccgtgcagtggaaggaagtcgatggt

SEQ ID NO: 11631 - DNA, 3033 bp, Artificial Sequence
  derived and/or modified sequence
atgggagcatacgcccgcgcttctggagtctgtgcgcggggatgcctcgattctgcagggccttggacaatgtctcgcgcactccgtccccctttgcccccgctctgcttctttctcctgctgctcgcagccgcaggcgcgagggccggtggctacgagacatgcccaacggtgcagcctaacatgttgaatgtgcacctgctcccccacacgcacgacgatgtcggatggcttaaaactgtcgatcagtacttctatggaatcaagaacgatatccagcatgcgggagtccagtacatcttggacagtgtgatctctgctcttctggccgatcccacccgtagattcatttacgttgaaattgctttcttcagccgctggtggcatcagcagaccaatgcaactcaagaagttgtgagggatctggtcagacagggcagattagagttcgcaaacggcggctgggtcatgaacgacgaggcggcaactcattacggtgcaatcgtcgaccagatgacgttaggactccgctttctcgaggatacctttggcaatgatggacgccccagggttgcctggcacatagacccgttcggccattctagagaacaggcctcgctcttcgcacaaatgggatttgatggcttcttcttcggtcgcctggactatcaagataagtgggtgaggatgcagaaactggagatggagcaagtgtggcgcgcctcgacatcccttaagccgccaaccgcagacctgttcactggagtccttcccaacggttataatccaccgcgcaatctctgctgggacgtactttgcgttgaccagccactggtcgaagatcctcgatcaccagagtacaacgcaaaagagctggttgactattttctgaatgtggctaccgcccagggccgttactatcggacaaaccacaccgtgatgacaatgggtagcgacttccagtacgagaacgcaaacatgtggttcaaaaatctagacaagctgatcaggttggtgaacgcccagcaggctaagggaagctcggtacatgtgctgtactccacccccgcttgttacctgtgggagctaaacaaggcaaacttgacctggtccgtcaagcacgacgacttcttcccctacgccgacggaccacatcaattttggaccggctatttttcctctcgccccgccctgaagaggtatgaacgactgagctacaatttcctgcaggtgtgcaatcaactagaggccctcgtgggtttggccgccaacgtggggccgtatggaagcggcgattcagccccccttaacgaagccatggcggttctccagcaccatgatgccgtcagcggaacctcaagacagcatgttgcgaatgattacgccaggcaactggcggccggatggggtccgtgcgaggtgctgctgtccaacgctttggcacgcctacgaggattcaaggatcacttcacgttctgtcaacaactgaatatatccatctgtccgcttagccaaaccgcggcacgtttccaggtgattgtttacaacccgttgggccgcaaggttaactggatggtgcgcctgcccgtctcagagggcgtattcgttgtaaaggaccctaacggtcgtacagtgccaagcgacgtggtgattttccccagctccgacagtcaggcgcacccccctgagttgctcttcagcgcctctctgccggccctgggattttccacctattcagtcgcccaagtaccgcgttggaaaccacaggccagggctccccaaccgatcccgcgccgcagttggagtcccgctctgaccattgagaacgagcacattcgtgcaaccttcgatccggacacaggattgctcatggaaataatgaacatgaatcaacagctgcttctcccggtgcgccaaacgttcttctggtacaatgccagcatcggtgacaacgagtctgatcaagcttcaggcgcatatatctttcgtcccaaccaacaaaagcccttaccagtgagccgctgggcgcagattcatctggtgaaaaccccgctggtgcaggaggtccaccagaatttctctgcctggtgctcgcaggtcgtgcgtttataccccggccagcgccacttggagttggagtggtccgtcggtccgatccctgttggtgacacctggggtaaggaagtgatttcacgtttcgatactccactagagaccaaggggagattctacacggattccaatggtcgggagatactggaaaggcgacgggattatcgtcctacgtggaaattgaaccagaccgaacctgtcgcgggcaattactacccggtgaatacccgcatttacatcaccgacggaaatatgcagctgaccgtgcttacagatcgcagccaaggtggatcgagccttagagatggcagccttgagctgatggtacaccgaagattgttaaaagatgatggccgtggagtttccgagccccttatggagaatggatccggcgcctgggtccgcggacgccatctggtgttgctcgataccgcgcaagctgcagcggccggtcatcgattgctggctgagcaggaggtcctagccccacaggtcgtgctggcgcctggtggtggggccgcgtacaacctcggggccccaccccgtacccagtttagcggtttgcgaagggatctacccccaagcgtccacctgctgaccttggccagctggggtcctgaaatggtgctgttgcgccttgagcatcaatttgccgtgggcgaagattctggccggaatctatccgcccccgttacgctgaatcttcgcgacctcttctccactttcacaatcacgcggctgcaggagacaacgcttgtggccaatcagcttcgagaggcggcgtctcgtctgaagtggaccacgaacaccggacccaccccacaccagacgccctaccagttggacccggccaacattaccctggagccgatggagattcgtacgttcttggcctctgtgcaatggaaggaggtggatgga

SEQ ID NO: 11632 - DNA, 3033 bp, Artificial Sequence
  derived and/or modified sequence
atgggagcttatgctcgggcgtcaggagtctgcgcaagagggtgcctcgacagcgcggggccgtggaccatgagcagagccttgcgccctccgctgcctcctctgtgtttcttcctgctgctgttggctgccgcgggcgcaagagccggcgggtacgaaacatgtcccacagtgcagcccaatatgctgaacgtgcatcttctgccccatacacacgacgacgtgggttggctgaagacagtggaccaatatttctacggcattaagaacgacatccagcacgcgggcgttcagtatatcttggattctgttattagcgcgctccttgctgacccgactcggcgattcatctatgtcgaaattgcgtttttctcccggtggtggcaccagcagacgaatgcaacacaggaagtggtgcgcgatctggtgcgtcagggacgcctggagtttgcgaacggagggtgggtgatgaatgatgaagctgctacccattatggggcgattgtggatcagatgacactgggcctacgcttcctggaggacacttttggaaacgatggcaggccacgtgttgcctggcacatagatccgttcggccatagtagagagcaagcctcactgtttgcgcagatggggtttgatggttttttctttggccgtctggactaccaggacaagtgggtgcgcatgcagaaattagaaatggaacaagtgtggcgagcttcaacatcattaaaaccacccaccgccgacctgttcaccggcgtccttcccaatggttataatcctccaagaaacttgtgttgggacgtattgtgcgtggatcagccattggtggaagatccccggtcacctgaatacaacgccaaggagctggtggattatttccttaacgtggctactgcacaggggagatactacagaaccaaccacaccgtcatgaccatgggcagtgacttccaatacgagaatgctaacatgtggtttaaaaatctggacaaactcatcaggctcgtaaatgctcagcaggccaagggctcttctgtccacgtcctatactccacccccgcttgctacttgtgggagctaaataaggcaaaccttacttggtctgtgaagcatgacgacttctttccttatgccgacggacctcaccagttttggacggggtatttctcctctcgacccgccctaaaacgctacgagaggctaagctataacttccttcaggtgtgcaaccagctagaggcactggtgggcttggcggccaatgtaggcccttatggttctggggattccgcacctctgaatgaagctatggccgtgcttcaacatcacgatgccgttagcgggacgtcgcgccagcacgttgctaacgactacgccaggcagttggccgcgggatgggggccctgtgaggttctcctctcgaatgcgctcgcccgcttacgcggattcaaggatcacttcacgttctgccagcaactcaatatttctatatgtccactgtcccaaaccgctgctaggttccaggtgattgtgtacaacccactgggacgaaaggtgaattggatggttagactccccgtgagtgagggggtgttcgtggtgaaggacccaaacggaaggactgtgccttccgatgttgtgattttcccaagctcagactctcaggcgcatcctcctgaacttctgttttctgctagcctaccggcccttggtttttcgacctactccgtggctcaggtcccacgttggaagccccaggccagggctcctcagcccatccctcgaagaagttggagcccagcactgaccatcgagaatgagcatataagagccactttcgaccctgatactgggctgttgatggagatcatgaacatgaaccagcagctccttcttccagttcgccaaacgtttttctggtataatgctagcataggagataacgaaagcgatcaagccagtggagcctatattttcaggcccaatcagcagaaacccctgccagtgagtaggtgggcacagatccatctcgtaaagacaccacttgttcaggaggtacaccagaacttcagcgcttggtgttcccaggttgttaggctgtaccctgggcagcggcacctggaattagagtggtctgtggggccaatccccgtgggcgacacgtggggcaaagaggttattagccgatttgacacacctctcgaaactaaggggaggttctataccgacagcaatggccgtgagatcctcgagcgcaggcgtgattaccgcccaacctggaagctgaatcagactgagcccgtagctggaaattactatcctgtgaacacacggatctatatcaccgacggcaacatgcagcttaccgttctgacggacagatcccagggtggctcctccttgagagacggctctttggagctcatggtgcaccgcagactgttaaaggacgacggccggggggtgtcagagcccctcatggagaatggcagcggagcctgggttcgaggccgccatctagttctgcttgacaccgcccaggctgctgccgcaggacatcgtctgttggccgaacaggaagtgctcgccccacaggtagtcctggcgcctggtggcggcgcggcttataatctcggagcccctcctagaacccaattctccggcctccgtcgcgacctgccgccgagtgtccatcttctgaccttggccagctggggtccagagatggttctgctaaggctggaacatcagtttgccgtgggggaagactctggaagaaacctgtccgcccccgttaccctgaacctgagagatctattcagtacattcaccattactcgtctccaggagaccaccctggtcgccaatcaactacgggaggccgcaagccggctgaaatggacaacaaatacaggccccactccacatcaaactccatatcagctcgatccagctaatattaccctggaacctatggaaattcggaccttcttggcgtcggtgcagtggaaggaggtggatggt

SEQ ID NO: 11633 - DNA, 3033 bp, Artificial Sequence
  derived and/or modified sequence
atgggggcttacgcaagggcctctggcgtctgtgcgagggggtgcttggattctgccggcccgtggacaatgtccagggccctgcggcctcctctccctcccctgtgcttcttcctgctgctgctggcagctgccggcgcacgggcaggcggctatgagacttgccctactgtccagcccaacatgttgaatgtacatttgctccctcacacccacgatgacgtcgggtggcttaagaccgttgaccaatacttctacggcataaaaaacgacattcagcacgccggcgtgcagtatatcctggatagcgtgatcagcgccctgctggcagatccaacacgacggtttatttacgtggagatcgccttctttagccggtggtggcatcagcagactaacgcgactcaggaggtggtgcgagacctggtcagacagggtcggctcgaatttgcaaatggcggctgggtcatgaacgacgaggcagccacgcattacggcgccatcgtggaccagatgaccttgggccttcgctttctcgaggatacctttggtaatgatggaagacccagagtggcctggcacatagatcctttcgggcactctagagaacaagcttccctctttgcacagatggggtttgacggctttttctttgggaggcttgactaccaggataagtgggtgagaatgcagaagctggaaatggaacaggtgtggagagcatcaaccagcctgaaaccaccgaccgcagatcttttcactggtgtcctgcccaacgggtacaatcccccaagaaatctgtgctgggacgtgctgtgtgtcgaccaaccgctggtcgaggacccaaggtccccggagtacaacgcgaaggagctggtggactattttttgaacgttgctactgcacagggcagatattaccgaaccaatcataccgttatgacgatgggtagcgacttccagtacgagaatgccaacatgtggttcaagaaccttgacaagctcatacggcttgtcaatgctcaacaggccaagggatcctccgtgcacgtcttgtatagcacgccagcgtgctatctttgggagctcaacaaagcgaacctgacctggtcagtcaagcatgatgatttcttcccatatgccgacggacctcaccagttttggacgggatacttcagttcaaggcctgctttgaaacgctatgagaggctttcatacaatttcctgcaggtgtgcaatcagttggaggccctggttggcctggccgcaaatgtcggcccatacggctcaggagattccgcgcccctgaacgaggcaatggccgtgctccaacaccatgatgccgtcagcggcactagccggcagcacgtcgccaacgactatgcaagacagcttgcagctggatgggggccatgcgaggtcctcctcagtaatgcactggcccggctcagaggttttaaggaccacttcaccttctgtcagcagctgaatatcagcatttgccccctgtctcagacagccgcacgattccaggtaatcgtttacaatccccttggtcggaaagtgaactggatggtgcgccttccagtgtccgagggtgtatttgtggtgaaagatccaaacgggagaacggtgcccagtgatgtcgttattttccccagctctgattcacaggcacacccgcctgagctcctcttttcagcatctctcccagctttggggttctcaacatacagcgtagcccaggtcccgagatggaagccacaggcccgggccccacagccgatcccgagaagatcttggtccccagcgttgactatcgagaatgaacacattcgggccacttttgatcccgatacaggtttgctgatggaaatcatgaatatgaatcagcaacttcttttgccggtgcgccagacattcttttggtataatgcatcaatcggcgacaacgagagtgatcaagccagcggtgcctacatttttagacctaatcagcagaaacccctccccgtgagcaggtgggcacagatacacctggtgaagaccccactggtgcaagaggtgcaccaaaacttttctgcgtggtgttcccaggtcgtgcgactgtatcctggccagaggcatctcgaactggaatggagcgtcgggccgattccggtgggagacacatgggggaaggaagttatcagtcgcttcgatacccccctggagaccaaggggaggttctatacagattccaacggcagggaaatcctggaacgccgccgggactacaggcccacgtggaagctgaaccagaccgaacccgtcgccggaaattactaccccgtcaataccaggatctacatcacagacgggaatatgcagctcacagtgctgacagataggtctcagggggggagcagcctccgggatgggagtttggaacttatggtgcatagacgcctcctcaaggacgacggtaggggcgtctctgagccactgatggagaatgggtccggcgcttgggtgcgcggaagacatctggtcttgctggatacagcccaggccgcagcagctggacacaggctcctggccgaacaagaagtccttgcgccccaggtcgtcctggcccctggcggcggtgcagcatacaatctgggtgccccgccacggactcagttctctggcctgcggcgggacctcccaccgtcagtgcatctgctgaccctggcctcttggggccccgaaatggttttgcttaggcttgagcatcaatttgccgttggtgaagactccggcaggaatctttccgcccctgtcaccctgaacctcagggatctgttctctaccttcaccatcactagactgcaggagacaactctggtcgctaaccaactgcgagaagctgctagtcgactgaaatggaccacaaatacaggtcctacacctcaccagaccccttaccagttggatccagcaaatatcactcttgaacccatggagatccgcaccttcttggctagcgtccagtggaaggaagtagatggc

SEQ ID NO: 11634 - DNA, 3033 bp, Artificial Sequence
  derived and/or modified sequence
atgggggcttatgcacgggcgagtggggtttgcgcacggggttgcctggacagtgcaggtccttggaccatgagtcgcgcattgaggcctccgctcccccccctttgtttctttctgttgctattggcggcggccggagcccgcgccgggggctacgagacatgcccgacagtccagccaaacatgctaaatgtgcatcttttgcctcacacccatgacgacgtcggatggctcaaaactgtggaccagtatttttacggcattaaaaatgacatacaacacgcaggtgtccagtatattctcgattccgtgatttctgctctcctagccgacccaacccgccggttcatatatgtagagatcgctttctttagccgttggtggcaccagcaaaccaatgcgactcaagaagtcgttcgagatttagtcaggcaggggaggctcgaatttgcgaatggcgggtgggtcatgaatgacgaggctgcaactcattatggtgccatagtggatcagatgactttggggcttcgctttctcgaagatacgtttgggaatgatggccggccacgtgtggcgtggcatatcgatcctttcggccattctcgggagcaagcgagcctcttcgctcagatgggcttcgatggcttcttctttggcaggctcgactatcaggataagtgggttcggatgcaaaaactggaaatggaacaggtctggcgggcctctacttccctcaagcctcctacggcagatctgttcactggagtactacctaacggctataaccctccgcgaaacttgtgctgggacgtactttgcgtcgaccagccactcgttgaggatcctagaagtccagaatataatgcgaaagagttagttgactatttcctaaatgtcgcaaccgcccagggccgttactacaggaccaatcatacggtgatgaccatgggatcggattttcagtacgagaacgctaatatgtggtttaagaatttagacaagctgatacgtctcgtaaatgcccagcaggccaagggatcatcagtgcatgttctctattcaacccctgcttgttatctttgggaactgaataaggctaatctgacgtggtccgtaaagcacgacgacttcttcccttatgctgatggcccccaccagttctggacgggctacttttcttcgcgaccggcgttgaagcgttacgaaaggctgagctacaacttcttacaagtttgcaatcagcttgaggctctagtgggcttggctgcgaatgtcggcccgtatggttcgggtgactccgccccattgaacgaggcaatggctgtattgcagcaccacgatgctgtgagtggcacatcgcgccaacacgtcgctaatgattacgccagacagttggctgctgggtggggtccatgcgaggtccttcttagcaatgcactcgctcgattgcgaggttttaaggaccattttaccttctgccaacaactgaatataagcatttgtcccctaagtcaaactgcagcgaggtttcaagttatcgtatacaaccccttgggaagaaaggttaactggatggtccggctccctgtatctgagggagtcttcgtggtgaaggatccgaacggtaggaccgttcccagcgacgttgttatttttccgagctcggacagtcaggctcacccccccgaattgctcttctccgcgtcactcccggccttgggcttcagtacgtattccgttgcacaggtccctcgttggaagccacaggcccgcgcaccacaaccgatcccaaggcgctcctggtcaccagctcttactattgagaatgaacacatacgcgcaaccttcgacccggatacaggccttctaatggagatcatgaatatgaaccagcaactcctcctgccagtacgccagaccttcttctggtacaatgcgtctatcggtgacaacgagagtgatcaggccagtggcgcctatatattccgacccaaccagcagaagccattgcccgtatcgcgttgggcacagatccatttggtgaagactccgctagtccaggaggttcaccagaactttagcgcctggtgttctcaggttgtacgcctttacccgggacagcgccacctcgagcttgaatggagtgtcggtcctattcccgtaggcgacacctggggcaaggaggtgatatcgaggtttgacactccgcttgagacgaaagggcgtttctataccgattcaaatggaagagaaatacttgagagacgcagagactatcgacctacgtggaaactgaatcagaccgagcccgtcgccggaaattactaccctgtcaatactcggatatacatcacagatggaaatatgcaactcaccgttttgactgatagatcgcaggggggttcaagcctccgcgacgggtcgctcgagctcatggtacatcgccgtctgcttaaggatgatggacgaggggtttctgaaccattgatggagaatggttccggcgcatgggtaagaggaaggcacttggttctcctcgacacggcgcaggccgccgccgcagggcatcggctacttgccgagcaggaggtgcttgccccccaagttgttttggcgcctggtggcggtgcagcgtataatctcggagctcctccaagaacccaattctccggattgcggcgtgatttgcctccatccgtacatctcctgactctcgccagctgggggcccgaaatggtactattgaggctcgaacaccaattcgcggttggtgaggatagtggacgaaatctctctgcgcccgtaacgctgaatttgcgagatctcttctccacatttaccatcacacgtctccaagagaccacactcgtggcaaaccaactacgcgaggccgcgtcgcgactgaagtggactacaaacacggggccaaccccacaccaaaccccctatcagctggatcctgccaatatcacattggaacccatggaaattcgcacattcctggcgagcgtgcagtggaaagaagtcgacggc

SEQ ID NO: 11635 - DNA, 3033 bp, Artificial Sequence
  derived and/or modified sequence
atgggtgcgtatgcccgggcgtcaggcgtctgcgcccgcggctgcctcgactccgctgggccctggactatgtctagggccctgcggccacccctcccgcccttgtgtttcttcctgctcctgcttgcggccgcgggagcgagggcaggaggctacgaaacctgcccgactgtgcagcccaatatgctcaacgtccatcttctcccccacactcatgacgatgtggggtggctcaagaccgtcgatcagtacttctacggaatcaagaatgacatccagcacgccggcgtccagtacatcctggattcagtgatttcggcactgctggccgatccaaccagacggttcatctacgtggaaatcgccttcttcagccggtggtggcatcaacaaaccaacgcaacgcaagaagtggtccgggatcttgtgcgccagggaaggctggagtttgcgaacggaggatgggtcatgaatgatgaggcagctactcactatggagccatcgtggatcaaatgactctcgggctccggtttctggaggatacttttggaaacgacggacgccctcgggtggcctggcacatcgacccgttcgggcatagccgggaacaggcttcactgttcgcgcagatgggattcgacgggttcttttttggacggctggactaccaggacaaatgggtgcgcatgcagaagttggaaatggaacaggtgtggcgggcgtcgacttcactgaaacctccgaccgccgacctcttcaccggtgtcttgccaaacggatacaacccgccgagaaacctctgttgggacgtgctctgcgtggaccagcctctcgtggaggatccgcggtcgccagagtacaacgcaaaggagctggtggattacttcctcaatgtggcaaccgcccagggacgctactacagaactaaccatactgtcatgactatgggcagcgacttccagtacgagaacgccaacatgtggttcaagaacctggacaagctgatcaggctggttaacgcacagcaggcaaagggtagctcggtgcatgtactgtactctaccccggcttgctacctctgggaactgaacaaggcaaatctgacctggagcgtgaagcacgatgactttttcccgtacgccgacggaccacaccagttctggaccggatatttctcgagcagaccagccctcaagcgttatgagcgcctgtcgtacaacttcctccaggtctgtaaccagttggaagctctggtgggcctggcggcgaacgtcggtccatacggttccggagactctgcccccctgaatgaggccatggccgtcctgcaacatcacgatgctgtgtcgggcacctctaggcagcacgtggccaacgattacgcccggcagctggccgccggctggggtccgtgcgaagtgctgctctcgaacgctctggcccgcctgcgcggattcaaggaccactttaccttctgccaacaactgaacatctcgatttgccctctgagccaaaccgccgcccggttccaagtgatcgtttacaacccgctgggacgcaaggtcaactggatggtgcggctgccggtcagcgaaggagtgttcgtggtgaaagaccctaatgggcggaccgtgccttccgacgtggtgatcttcccatctagtgactcgcaagcccacccgcccgaactgctcttctcggcctcgcttccggccctgggcttttcgacttactcggtcgcccaggtgccaagatggaagcctcaagccagagcaccgcagccgatcccgcgccgcagctggtcaccggcactgaccattgaaaacgaacatatccgcgccaccttcgaccccgatactggactcctgatggaaatcatgaacatgaatcaacagctgcttctgccagtgcgccaaaccttcttttggtacaatgcgtcgatcggagacaacgagtcggatcaggcctcgggagcgtatatcttccggccaaaccagcaaaaaccgctgccggtttcgcgctgggctcagatccacttggtcaagacccctctggtgcaggaggtgcatcagaatttctccgcctggtgctcccaggtggtccgcctgtacccgggacagcggcatctcgagctggaatggagcgtgggaccgatccccgtgggagacacttggggaaaggaagtgatctctcggttcgacactccacttgagactaaaggcaggttttacactgatagcaatggaagggaaatcttggagcggcggagggactacagaccgacctggaaactgaaccagaccgaaccggtggcaggcaactactaccctgtgaatacccggatttacatcaccgacggcaacatgcaactgactgtgctcaccgatcgctcacaaggcggttcctcacttagagacggaagccttgagctgatggttcaccggcgcctcctgaaggacgacggccggggagtcagcgaaccactgatggagaacggttcaggcgcatgggtacgaggacgccacctcgtcttgctggacactgcgcaggccgctgccgccggccacagactgctggcagaacaagaagtcctcgccccacaggtcgtgctggccccagggggaggggcggcttacaacctcggcgctccaccgcgcactcaattttccggactgcgacgggatctgccacccagcgtccacctcctgaccctggccagctggggcccagaaatggtcctgctccgcctggaacaccagtttgcggtgggcgaggactcgggtcgcaacctgtccgcgccagtcactctcaatctgcgcgatctcttcagcactttcaccatcaccagactccaagagactaccttggttgccaaccagctgcgggaagcggcctcgcggctgaaatggactacgaacactggaccaactcctcatcagaccccgtaccaactggacccggcaaacataaccttggaaccaatggaaatccggaccttcctggcgagcgtgcagtggaaggaagttgacggg

SEQ ID NO: 11636 - DNA, 3033 bp, Artificial Sequence
  derived and/or modified sequence
atgggcgcctatgcgcgcgcctctggtgtctgtgcccgaggatgcctggattcggctggcccatggaccatgagcagggccttgaggcccccactgccaccgctgtgtttcttcctgctgctgctggcggccgccggggcgagggcagggggttacgaaacctgcccaaccgtgcagccgaatatgcttaatgtccacctgctacctcatactcacgatgatgtcggttggctgaaaaccgtcgaccagtatttttacggcatcaaaaatgacattcagcacgctggcgtgcaatacattttggactctgtgatttctgcattacttgccgatccaacgcgacgcttcatatacgttgaaattgcattctttagcagatggtggcatcaacagacaaacgcaacccaggaagtggtgcgcgatctggttcgccaaggccgtctggagtttgcgaatggcggatgggttatgaatgacgaggcggcgacccactacggggccatcgttgaccaaatgaccctgggactgcgctttctagaagataccttcggcaatgatggtagaccacgcgttgcgtggcatatcgatccatttgggcactcccgcgagcaagcttctctgttcgcccagatgggtttcgacggtttcttttttggccgtcttgactatcaagacaaatgggtccgtatgcagaagctggagatggagcaagtttggcgcgccagcaccagcctgaaaccgccaaccgcagacctgttcacaggcgtcctgccgaatggctataacccacctaggaacctttgctgggacgtcttgtgtgtagaccaaccgcttgttgaggatcctcgtagcccagaatacaatgccaaggagcttgtggattattttttgaatgtggcaactgcgcagggacgctattaccgtacgaatcacactgtgatgacgatggggagtgacttccagtatgaaaacgccaatatgtggtttaaaaacttagataaactgatcagacttgtgaacgcacagcaggccaagggcagcagcgtccacgtgctgtatagcacgccggcctgttacctgtgggaactaaataaggcgaatctgacctggagcgtcaaacacgatgacttcttcccctacgccgatgggccgcatcaattctggacgggctatttctcctcacgccccgcgctaaagaggtacgaacgcctatcctacaacttccttcaggtctgcaaccagctggaggccctcgtcggcctggcggcgaacgttggaccttacggaagcggagactccgcgccgcttaatgaagctatggcggtcctgcaacatcatgacgccgttagcggtacgagcaggcaacatgtggcaaatgactacgcgcgccagctggcggcgggctgggggccgtgcgaggtactgttaagcaacgcactggcacgcctgcgcggcttcaaggaccattttacgttctgccagcaactgaacatcagtatctgccctctgagtcaaacagcggcccggtttcaagtgatcgtctacaatccactcggccgtaaggtcaattggatggttcgcctgccggttagcgagggcgtttttgttgttaaagaccctaatggtcgcacggtgccttccgatgttgttatttttccgagttctgatagtcaggcccaccctccggagctgctctttagcgctagcctgcccgccctgggttttagcacgtatagcgtggcccaggtcccccgttggaagccgcaggctcgcgcgccacagcctattccgcgccgtagttggagtcctgcgctgactattgaaaacgagcacatccgtgcaaccttcgacccggacactggcctgttgatggagatcatgaacatgaaccaacagctgctgctgccggttcgtcagaccttcttctggtacaacgcctccattggtgataatgagagcgatcaggcttccggtgcttacatattcaggccgaaccaacagaaaccattgccggtcagcagatgggcgcagatccaccttgtgaagaccccgctggtgcaggaggtgcatcaaaacttctctgcctggtgtagccaagtcgtgcgcctgtacccgggccaacgccatctagaactggagtggagcgtgggcccgattccagtaggtgacacctggggtaaggaggttatctctcggttcgacactccactggaaaccaaaggtcgattttacacggatagcaacggtcgcgagattctcgaacgccgacgagattacagaccgacatggaaactgaatcaaaccgagccagttgcaggtaactactacccagtaaatacgcgaatctacatcacggacggtaatatgcagctgacggtcctgactgatagaagccaaggcggtagcagtttgcgagacggtagcctggagctgatggttcaccgccgtctgctgaaagatgatggacggggcgtcagcgagcccttgatggaaaacggaagcggggcatgggtccggggtcgccacttagtcttgctggatactgcgcaagccgcggccgcaggccatcgcctcttggcagagcaggaagttctggcaccgcaggtggtgctggcgccaggtggtggagcagcgtataacctgggtgccccgccgcgcacccagttcagcggactgcgccgcgacctgcctcctagcgtccacctgttgaccctggcatcttggggtccagaaatggtcttactacgccttgaacaccagtttgctgtcggcgaagacagcgggcgtaatttaagcgcacctgtcaccctgaacctgagagaccttttcagcacctttaccataactcggcttcaagaaaccactctggttgctaatcagctgcgcgaggcagctagccggcttaaatggacgacaaataccgggccgaccccccaccaaacaccttaccagctggatccggcgaatattaccttggagccaatggaaattcgcaccttcttggcctccgttcagtggaaggaagttgatggc

SEQ ID NO: 11637 - DNA, 3033 bp, Artificial Sequence
  derived and/or modified sequence
atgggcgcctacgcaagagcatcaggggtgtgtgctagaggatgcctcgattctgcaggcccttggaccatgagcagagcactgaggcctccactgccaccactttgcttttttcttctgctgctggcagcggcaggggcgagagcaggaggatacgaaacctgccccactgtgcaacccaacatgctgaacgtgcacctgcttcctcacacccacgatgacgtcggatggctgaaaaccgtggatcaatacttttatggtatcaagaacgacatccaacatgccggagtgcaatacattctggattccgtgattagcgcactgctcgccgacccaacgcgacgttttatctacgtcgagattgcgtttttctcgcggtggtggcaccagcagaccaatgcgactcaagaggtcgtccgcgacttggtgaggcagggtagactcgaatttgccaacggaggttgggtgatgaacgatgaggctgcaacccattacggagcgatcgtcgatcagatgactttgggactgcgttttctcgaagatacctttggaaacgacggacgcccaagagtggcctggcacattgacccattcggccatagccgggagcaagctagccttttcgcccagatgggcttcgatggatttttcttcggacgcctggattaccaagataaatgggtgagaatgcaaaaacttgaaatggagcaggtctggcgcgcaagcacgagcctgaagcctcctaccgccgatttgttcaccggagtgctgcccaacggttacaatccaccccggaatctttgctgggatgtgttgtgtgtcgatcagcctcttgtggaagatcctagatcgcctgagtacaacgcaaaagagctcgtggactattttctcaacgtggccacggcccaaggtaggtactaccggactaaccacactgtcatgaccatggggtccgactttcagtatgagaacgcaaacatgtggttcaagaatcttgacaagctgattcggcttgtgaacgcacaacaagcaaagggctcatcagtgcatgttctttactcgacccccgcgtgctacctttgggaacttaacaaagccaacctcacttggagcgtcaagcatgacgatttcttcccttacgcagacggaccacatcagttttggactggatacttttcctcaaggcctgctcttaagcgatacgagcgcctctcttacaactttctgcaggtgtgcaaccaactggaagcgctcgtgggcctggcagcaaacgtgggaccgtacggatcgggtgattctgcacctcttaatgaagccatggccgtgctgcagcatcacgatgcagtgagcggaacctcgcggcagcatgtggcgaatgactacgcaagacaactcgcagcaggatggggtccttgtgaagtgcttctgtccaatgcccttgccaggctcagggggttcaaggatcattttaccttttgtcaacagcttaacatttcgatatgcccactgtcgcagaccgcagcacggtttcaagttattgtgtataaccctctcggcaggaaggtgaactggatggttagactccccgtttccgaaggagtgttcgttgtgaaggatccaaacggtagaactgtcccctcggacgtcgtgattttcccctcgtccgattcgcaggcccacccacctgagctcctttttagcgcctcgctccctgctctggggttttcgacctactccgtggcccaagtgcccagatggaagcctcaagcaagagctcctcaacctataccacgtcggtcgtggtcccccgcacttactatagagaatgagcatattcgcgcaacctttgatcccgatactggtctgcttatggagatcatgaatatgaatcaacaacttttgcttccagtccgacagaccttcttttggtacaacgcatcgatcggagataatgagtcggatcaagcatccggtgcttacatttttcggcctaatcagcagaaaccacttcccgtctcaagatgggcacaaatacatctggtcaagactccacttgtgcaagaagtgcaccagaacttttctgcatggtgctcgcaagtggttagactctaccctggtcagcgacatctcgaactggagtggtcggtgggacccatccctgtcggggacacttgggggaaagaagtcatctcgcgctttgatactccattggaaaccaaaggtagattttacactgactccaatggtagagaaattctggagaggaggagagattacagacctacctggaagctgaaccagactgaacctgtcgcaggcaattactacccagtcaatactagaatctacatcacggacggcaacatgcaacttacggtgctgactgaccgctcacaaggtggatcgagcctgagagatggttctcttgagctgatggtgcatagacggcttctgaaggatgatggcagaggagtttcagaacctttgatggagaatggaagtggcgcatgggtgcggggtcgtcatcttgtgctcctggacactgcacaagctgccgctgcagggcatcggcttcttgcagagcaagaagtgcttgcaccacaggtggtgctggcaccaggaggaggagcagcctacaatcttggagcaccaccaaggacccaattttcagggctgaggcgcgatctgccaccgtctgtgcatctcctcacccttgcgagctggggtccagaaatggtcctgctgagacttgaacatcaattcgcagtgggagaagattcggggagaaatcttagcgcacctgtcacccttaatctgcgagatcttttttctacctttacgattactcgtttgcaggagacgacccttgtggccaatcagctgagagaagccgcgtcgaggcttaagtggactaccaataccggcccaactcctcatcagaccccttaccagctcgatcccgccaacatcacccttgaaccgatggaaattcgcacttttctcgcaagcgtgcaatggaaagaggttgacggg

SEQ ID NO: 11638 - DNA, 3033 bp, Artificial Sequence
  derived and/or modified sequence
atgggcgcttatgcacgggcttccggagtgtgcgcaaggggctgccttgacagcgccggtccctggacgatgagccgtgcattacgaccccctctcccccctctgtgtttcttcctgttgcttcttgccgctgcaggcgcaagagccgggggatatgagacctgccccaccgtgcagccgaatatgttgaacgtgcaccttctcccacacactcatgatgatgttggctggctgaagaccgtggatcagtacttctacggcatcaagaatgacatccagcacgccggagtccagtacattttagattccgtaatttccgctctgctcgctgaccctacaagacgctttatttatgttgagatcgccttcttctcacggtggtggcaccagcagaccaacgcaactcaggaggtggtgagggacctggtgaggcaaggacggctggagttcgcgaatggcggctgggtaatgaatgatgaagccgcaactcactatggcgcgatagtggaccaaatgaccttagggctcaggttcttggaggatacattcggtaacgatggacgcccccgagtggcgtggcacatcgatccatttggccattcccgcgaacaggctagtttgttcgcacagatgggcttcgacgggttttttttcggtaggttggactaccaagacaaatgggtgaggatgcagaagctggagatggaacaggtgtggcgggccagtacttctctgaaacctccgaccgcagatctgtttaccggcgtgctgccaaatggctacaaccctcctcgcaatctgtgttgggatgtgctgtgcgtggatcagcccctcgtagaggatccgcgctcgcccgagtataatgctaaggaactcgtcgattactttctcaatgtagccaccgctcaaggaagatactataggaccaaccatacagtgatgacgatgggctccgactttcagtacgaaaacgccaacatgtggttcaagaacctcgataaactcatacggctggttaacgcgcagcaggctaagggttccagcgtccatgttctttatagcacccctgcctgctacctgtgggaattgaacaaggctaatctgacctggtccgtgaagcatgatgatttttttccatatgcggatggcccacaccagttttggacgggctacttttccagcaggcctgccttaaagagatatgaaagacttagctataactttctgcaggtctgtaaccagttagaggcacttgtgggactggccgctaacgtgggcccatacggatccggcgacagtgccccgctgaacgaggctatggctgtcctccagcaccacgatgctgtttccggcacgtctcgccaacatgtcgcgaatgattatgcgagacaattagctgccggatggggcccctgcgaagtcctcctctcaaacgcattagctcgacttcgggggtttaaggaccacttcaccttctgccagcaattgaacatcagcatatgtcccctctctcagactgcagcgcgcttccaggtgattgtgtacaacccactcggcagaaaagtgaactggatggtccggctgccagtctctgagggcgttttcgtggttaaggatcctaatggcagaacagtcccctccgacgtggtgatttttccgtcatctgactctcaagcacatccccctgaacttctttttagcgcttccctccctgctttgggcttcagcacttatagtgtggcccaggtgccccgctggaagcctcaggcgagggcgccacagcccataccacgtagaagttggtcacctgcactgaccatcgagaacgagcatattagagcaacattcgaccccgatacgggtctactcatggaaatcatgaacatgaaccaacagctcttgttaccagttagacagacattcttttggtacaatgcgagcattggcgataatgagagtgaccaagcttctggcgcctatattttccgtcccaaccaacagaagcccctgcccgtgagtcgatgggcccagatacacctggtcaaaactcccctggttcaggaggtgcatcaaaactttagcgcatggtgttctcaggtggtacgactctaccctggccagcggcatttggagctggagtggagcgtgggcccaattcccgtcggagatacatggggcaaggaggtgatcagtcggtttgatactcccctagaaactaaaggccggttttacaccgattccaacgggagggaaatccttgaacggagaagggattacagacctacctggaagctcaatcaaaccgagcctgtggctggcaactactacccagtcaatacccgtatctatattaccgacggaaacatgcaactgaccgtgcttaccgacagatcccaaggcggatcttcactccgcgatgggtccttagagctaatggtgcacagacgcctcttaaaggacgacggcaggggagtttcagagcctttgatggagaacgggagcggtgcttgggtacgcgggcgccatctcgtactcttggacactgcccaggcagccgctgcagggcacaggctgctcgccgagcaggaggtcctggctcctcaggtcgtgctagcgccgggcggaggggccgcctataacctcggagctcccccacgcacacagttctccggccttagacgagatttgccgccgagcgtgcacttattgactctggcctcgtggggtcctgaaatggtgctgctcagactagaacatcaatttgcagtcggcgaggatagcggacgcaacttgtctgctcccgttacactgaacctcagagatctgttttccactttcaccatcacccgactacaagaaacaactctagttgcgaatcaacttcgggaggctgccagccggctgaagtggaccactaatacaggtccgaccccgcatcaaacaccctaccagcttgatcccgctaatatcacactggagcctatggagatccggaccttcttagccagtgttcagtggaaggaggtggacgga

SEQ ID NO: 11639 - DNA, 3033 bp, Artificial Sequence
  derived and/or modified sequence
atgggggcgtacgctcgggcgtccggagtgtgtgcaagaggctgtctcgactccgccggaccatggaccatgtcgcgcgcacttaggcccccgttgcccccgctctgtttctttctgttgctgctggcggcggccggggcgcgcgcaggaggatatgagacttgtcccaccgtgcagcctaacatgctgaacgtgcacctgctgccacatactcacgacgatgtgggctggttgaaaaccgtggatcagtacttctacggaattaagaatgatatccaacatgctggagtgcaatacatcctggattccgtgatctctgcactgctcgccgaccctactcggcggttcatctacgtggaaattgcttttttcagcaggtggtggcaccagcaaactaatgccactcaagaggtggttcgtgaccttgtccgccagggaaggttggagttcgcgaacggaggctgggtgatgaacgacgaggcagccactcactacggggctatagtcgaccagatgactctgggcctccgcttcctcgaagatacctttggaaatgacggcagaccccgcgtggcatggcatatagatccgttcggccactcccgggagcaggcgtccttgttcgcacaaatgggattcgatggcttcttcttcggcagactggactaccaggacaagtgggtccggatgcagaagctcgagatggaacaggtatggcgagcctccacctccctgaaaccacctaccgccgatctgttcactggtgtgcttccgaatggatacaatccgccccggaacctgtgctgggacgtgctgtgtgtggaccaaccgctcgtcgaagatccacggtcgccggagtacaacgccaaagaacttgtggattactttctgaatgttgcaacggcgcagggccggtactaccggacgaaccacactgttatgaccatgggatccgactttcagtacgaaaacgcgaatatgtggttcaagaacctggacaaactgatccggttggtgaacgcccaacaggccaaggggtcatcggtgcacgtcctgtactcgacccccgcttgctatctctgggagctgaacaaagcaaacctgacctggtccgtgaaacatgatgatttcttcccgtacgccgacgggccacatcagttctggacgggctacttttcctcccggccagctttgaagcgctacgaacggctgtcgtacaatttccttcaggtctgcaaccagctggaagcactggtgggactcgccgccaatgtgggtccgtacggttcgggtgatagcgccccgctgaatgaggctatggcggtgctgcaacaccacgacgccgtctcggggacttctcggcaacacgtggccaacgattacgcgaggcaactcgcggccgggtggggtccatgtgaagtcctgttgtcaaatgcattggctaggctccgtgggtttaaggaccacttcacgttttgccagcagctgaatatcagcatctgcccgctctcccagaccgctgcgcgctttcaggtgatcgtgtacaaccctctgggccgcaaagtcaactggatggtgcgattgccagtgtctgagggagtgtttgtggtgaaagacccgaatggaagaactgtgccgtcagatgtggtcatcttcccttcgtcggattcacaggcccatccgcccgaacttctgttttcagccagcctgccggcactgggattctcaacttacagcgtggcgcaggtgccaaggtggaaacctcaggcgagggctccacagccgatcccgcgccgctcgtggagcccagctctcactattgaaaatgagcacatccgggccactttcgatccagataccggcctgttgatggagattatgaacatgaaccaacaactgctcctgcctgtgcgccaaaccttcttctggtacaacgcatcgatcggcgataatgagtcggaccaagcgtccggggcctacatctttagaccgaaccagcagaagccgctcccagtctcgcgctgggcgcagatacacttggtgaaaactcctctcgtccaagaagtgcatcaaaacttctcggcatggtgctcacaagttgtgcgactgtacccgggacagcgccatctggagctggaatggtcagtgggtccgatcccggtcggagacacctggggaaaggaggtgatcagccgctttgacactcccctcgaaaccaaaggccggttttacaccgactccaatgggagagagatcctggaacggagaagagactaccgccctacttggaaactcaatcagacggagccggtggcaggaaattactacccggtaaatacccgcatatacatcaccgacggaaacatgcaactgaccgtgctcacggatcggtcccaaggcggatcatccctgcgggacgggtcgctggaactcatggtgcacaggcgcttgctgaaggatgacggacggggagtcagcgagccactgatggaaaacggcagcggcgcctgggtgcgcggacgccatctggtcctcctggataccgcccaggctgcggcagcgggacacagattgctggcagaacaggaggtcttggcgccacaggtcgtgctcgctccgggaggtggcgccgcctacaacctcggtgccccaccaagaactcaattttccggactccggcgcgacctgcctccctcagtgcatctgctcactctggccagctggggacctgagatggtcctgctcagactggaacatcaattcgcagtgggcgaggactctggtcggaacctgagcgcccctgtcactctgaatcttcgcgatctcttctcaaccttcactatcacccgcctgcaggaaaccactctcgtcgctaaccaacttcgcgaggcagcatcgcgcctgaaatggactaccaacactggtcctacgccacaccaaaccccttaccagctggatccggcgaatatcaccctggaaccgatggagatccggacctttctggcctccgtgcagtggaaggaagtggacgga

SEQ ID NO: 11640 - DNA, 3033 bp, Artificial Sequence
  derived and/or modified sequence
atgggcgcctacgcgcgggcatccggagtgtgtgcccgcggatgcctggactcggcgggcccatggaccatgtcgcgggcactccggccgccactcccaccgttgtgcttctttctcttgctgcttgcggctgccggggcgcgggctggaggatacgaaacttgtccgactgtccagccgaacatgctgaacgtgcacttgctcccccacacccacgacgacgtgggctggttgaaaacggtggatcagtacttctacggaatcaagaacgacatccaacacgctggtgtgcagtacattctggacagcgtgatctcagctcttctcgccgaccctactcgcagattcatctacgttgagatcgccttcttctcgcggtggtggcaccaacagaccaacgcaacgcaggaggtggtgcgtgacctggtccggcagggacggttggaattcgctaatggtggatgggtcatgaatgacgaagcagccacccactacggagccatcgtggaccaaatgacgcttggactgcggttcctggaagatactttcggaaacgatggacgcccccgggtggcttggcatatcgacccgttcggacattccagggagcaggcgagcctgttcgcgcaaatgggcttcgatggattctttttcggacgactggattaccaggacaaatgggtcaggatgcaaaagctggaaatggaacaggtctggagagcgtccactagccttaagccaccaaccgcggatctcttcactggcgtgctgccgaacggatacaacccgccgcggaacctctgctgggatgttctgtgcgtggatcaaccactggtggaggaccctcggagcccagaatacaatgcgaaggaactggtggattacttccttaatgtggctaccgcccagggccggtactaccgcactaaccatactgtcatgaccatgggtagcgactttcagtatgaaaacgctaatatgtggttcaaaaatctcgataagttgatcagactggtcaacgcgcagcaagccaagggttcctccgtccatgtcctctactcaacgccggcctgctacctctgggaactgaacaaagccaacctcacctggagcgtgaaacatgacgactttttcccgtacgccgacggtcctcatcaattctggactggatacttctccagccgcccggctctcaaacggtacgagaggctctcgtataactttctgcaggtctgcaaccagctggaggcgctcgtgggactggccgccaacgtgggcccgtacgggtctggcgacagcgctccgctgaacgaggcaatggctgtgctccagcaccatgatgcggtgtccggcacttcgagacagcacgtggcaaatgactacgcgcgccagttggccgccggctgggggccttgcgaagtgctcctctcgaacgcactcgcacggctgcgcggcttcaaagaccatttcaccttttgccagcagctgaacatctccatttgcccgctgtcacagaccgccgccagattccaggtcatcgtgtacaacccgttgggacgcaaggtgaactggatggtgagactgcctgtgagcgagggtgtgtttgtggtgaaagatccgaatggtcggactgtgcccagcgacgtggtcatttttccaagctcagatagccaggcacacccgccagagttgctgttctcggcgtcactcccggctttgggcttttccacctactcagtggcccaggtgcctcgctggaagccgcaggcaagagcaccgcaacctatcccacgccggagctggtcccctgccctgacgatcgagaatgagcacatccgcgcgaccttcgacccggacactggactgctgatggaaatcatgaacatgaaccaacaactcttgttgcccgtccggcagaccttcttctggtacaatgcctccatcggggacaacgaatccgatcaagcgagcggggcctacatcttccgcccgaatcaacagaagccactgccagtgtcacgctgggctcaaattcacttggtgaaaacgccattggtccaggaggtgcatcaaaacttcagcgcatggtgcagccaggtggttcgtctctacccgggacaacgccatctggaattggagtggtccgtaggacctatcccagtgggggacacttgggggaaggaggtgatctcaagatttgatactccattggagactaaaggacggttctacaccgacagcaatggacgtgagatcctcgaacgccgcagagactatcggccgacttggaaattgaaccagaccgagccggtggcgggaaactactacccggtgaatactagaatttacatcaccgacgggaacatgcaactcactgtcctcaccgataggtcacagggcgggtcctcacttcgcgatggaagtcttgagctgatggtccatagacggctcctcaaggacgatggcagaggagtcagcgagcctctgatggaaaacggttcgggcgcatgggttcggggacgccatctggtgctcctggataccgcccaagctgccgccgcggggcaccggctgctggcggaacaggaagtgctggcaccgcaagtggtcctcgcccccggcggaggagccgcctacaatcttggggctccacccagaacccagtttagcggactccggcgcgatctccctccgagcgtccatctgctcactctggcctcgtggggaccggagatggtcctcttgagactcgaacaccaattcgcggtgggcgaggattcaggtcggaacctgtcagctcctgtgaccctcaacctgagagatctctttagcactttcaccatcacgcggctgcaggaaaccaccctggtcgccaatcaactcagagaggccgcttcccgccttaagtggaccaccaacaccggcccaaccccgcaccagaccccgtaccagctggacccagcaaacattacgctggaacctatggaaatccggacctttttggcatcagtgcagtggaaggaagtggatgga

SEQ ID NO: 11641 - DNA, 3033 bp, Artificial Sequence
  derived and/or modified sequence
atgggagcctacgccagagcctcaggggtctgtgccaggggatgtcttgacagcgcagggccatggacgatgtccagggcattgcggcctcccctgcccccactttgtttttttcttctcctgctggctgccgctggggcgcgagctgggggatatgaaacctgtcccaccgttcaacccaacatgctgaacgtacatttgctgccgcacactcatgacgatgtcgggtggctcaagactgtggaccagtacttctacggtattaagaatgatattcagcatgccggggtccagtatatcctagatagcgtgatttcagctctgttagcagacccaacgcggcggttcatttacgtggagatcgccttcttttccaggtggtggcatcaacaaacgaacgcgactcaggaagtcgtgcgggacctcgttaggcagggtaggttagagttcgcaaatgggggctgggtgatgaatgatgaagccgccactcactatggggcaatcgtggatcagatgactttagggctgagattccttgaagatacctttggcaatgatgggcgccctcgggtggcttggcacattgacccgtttggacactcaagagagcaagcctccctctttgcgcagatgggcttcgatggcttctttttcgggaggctggactaccaggataaatgggtaaggatgcaaaaacttgaaatggagcaggtgtggagggcatctacctcgctaaaacctccaaccgcagatctgttcacgggggtgctgcctaacggctacaacccccctagaaatttgtgctgggacgtcttgtgtgtagatcagccgctggttgaggacccaaggagtcccgagtacaacgctaaagaacttgtggactatttcttgaatgtggcgaccgcccagggccgatactatcggacaaatcatacagtcatgaccatgggctccgactttcagtacgagaatgcaaacatgtggttcaagaacttggacaaattgatccgcctagttaacgcccagcaagcaaagggatcatccgtccatgtgctgtactctacacccgcctgttatctgtgggagcttaacaaggccaacctgacctggtccgtcaagcacgacgacttctttccatatgcggatggcccgcaccagttttggacagggtatttcagctcgcggcccgccctgaagaggtacgaacgcctgagttacaacttcctccaggtctgtaaccagctggaagctctggttggcctagcggcaaatgttggcccttacgggtctggcgatagtgccccactgaacgaggctatggctgtccttcagcaccacgatgctgtatccgggacttcccggcagcacgtcgccaacgattacgctcgtcagctggctgcgggatgggggccctgcgaggtacttctaagcaatgcgctggctagactgaggggattcaaggatcatttcaccttctgtcagcagttaaatatttctatttgccccctctcacaaactgctgcgcggttccaggtgattgtgtacaatcctttaggccgaaaggtgaactggatggtgagactgcccgtcagcgaaggggtgttcgtggttaaagatcctaacggccgaacagtgccatccgacgtagtgatcttcccgagttccgacagccaggcacatccacctgaactgctgttttccgcgagtctcccagcgctgggcttttctacgtactctgtcgcacaggttcctaggtggaagccacaggccagggcacctcagccaattccgagaagatcctggtctccggcactgacgatagagaatgaacacatccgcgcaacgtttgatcctgacaccggcctgctaatggagatcatgaatatgaaccagcaactcctcctccccgtgaggcagacttttttctggtataatgcatccattggcgacaatgaatcagaccaggcttctggtgcgtacatctttagacctaaccagcagaagccactcccggtctcacgatgggcacaaatccacttggtgaagactcctctggtgcaagaggtccatcaaaacttctcagcatggtgttcccaggtggtgcggctgtatcccggacagagacatctggagctggaatggtctgtaggacctatacccgttggtgatacgtggggcaaagaggtgatctcgcgatttgacactccactcgaaaccaaaggcagattctataccgacagtaacggacgtgagatactcgagcggaggagagattacaggcctacatggaagttgaatcagaccgaacccgtggcaggaaactactatccggttaacacccgcatttacatcacagatgggaatatgcagctgacggtgttgaccgatcgttcccagggcggaagtagtctgcgggacggatcgctcgaactaatggtgcatagacgtctactgaaggacgatggaagaggcgtgtccgagcccctcatggaaaacggctccggagcatgggtgcgagggcgccatttggtgctcctggacaccgcacaggctgcggctgctggccatcgcctcctcgccgaacaagaggttcttgccccccaggtggtgctggcccccggtggaggagccgcttataacctgggggctccccctcgcacccagttttccggcctgagacgggatctgccgccttcggtacatttgctgactcttgcctcctggggtccagagatggtgctcctaaggctggagcatcagttcgcagttggggaggattcgggcagaaatttgtctgctcctgtcacccttaatctccgcgatcttttctcaaccttcaccataaccagacttcaggaaacaacacttgtggccaaccagctaagggaggctgcctcccgattgaagtggaccaccaacacaggtccaaccccacatcaaaccccctatcagcttgacccagcgaatataacactggagccaatggaaatcaggacctttctcgcatccgtgcagtggaaggaagtggacggt

SEQ ID NO: 11642 - DNA, 3033 bp, Artificial Sequence
  derived and/or modified sequence
atgggagcttacgcaagagcgtctggtgtgtgtgcccgcgggtgtcttgactccgcgggtccgtggactatgagccgtgctctccgcccacctttgcccccactgtgttttttcctcttgctgctggctgcagcgggagctcgagcaggcggctacgaaacctgtcctaccgtgcagcccaacatgcttaacgtgcatctgctcccacacacccatgatgatgtcggatggcttaagaccgtcgatcagtacttttatggcatcaaaaacgacattcagcatgcgggggtccaatacatcctggatagcgtgatttcagcactgctcgccgaccccactcgtaggtttatctacgtggaaattgcattcttttcgagatggtggcaccaacaaaccaacgcgacccaagaagtcgtcagagatctggtccgccaggggcggctggaattcgcaaatggcggttgggttatgaacgacgaagcagcgactcattacggtgcaatagtcgaccagatgacccttggcctgcgcttcctggaggacactttcggcaatgacggacgaccacgggtggcttggcacattgaccctttcggacattcgcgggagcaggcatctctttttgcccagatgggcttcgacggcttctttttcggacgactggattaccaggataaatgggtgcggatgcagaagctggaaatggaacaagtgtggcgggcatccacttccctgaagccgccaactgcagatttgttcaccggagtccttccgaatggttacaatccaccacgtaatttgtgctgggatgtgctgtgcgtggatcaacctcttgtggaagatccgagatccccggaatacaacgcaaaggaactggtggattactttctgaacgtggcgaccgctcaaggtcggtactaccgtaccaaccatactgtgatgaccatgggttcagattttcaatacgaaaacgcaaacatgtggtttaagaacttggataaacttattaggctggtcaatgcgcaacaagcgaaggggtcgtcggtccacgtgttgtactccacccctgcatgctatctttgggaactgaacaaagcaaacctgacctggtcggtgaagcatgacgacttttttccctacgccgatgggccacatcaattttggaccggttacttctcatcgcggcccgcactgaaaagatacgaacgcctgtcctacaacttcctgcaagtgtgcaatcaactggaggctcttgtcggactcgcagcaaacgtggggccttacggaagcggtgactccgcaccccttaacgaagccatggccgtcctccagcaccatgatgcagtctccggaactagcagacaacatgtcgccaacgactacgcgcggcaactcgcagccggatggggcccatgcgaagtgctcctcagcaacgcgctggcgaggctcagaggttttaaggatcactttactttttgccagcaactgaacatttcaatctgcccgctctcacagaccgctgctagatttcaggtcatcgtgtacaatccgctgggcagaaaggtgaactggatggttagacttccagtgtcagaaggagtctttgtcgtgaaggatcctaacggacgtactgtgccatcagatgtggtgatctttccttcctcagattcccaggcacatcctcctgaactccttttttcagcatcgttgccggccctgggtttctccacttactcagtcgcacaagtgccacggtggaaaccccaggcaagagccccgcagccaattccacggagatcctggagcccagctctgactattgagaatgagcatatccgcgccacctttgatcctgatactggacttctcatggagatcatgaatatgaaccagcagctcctgcttcctgtgcgccaaacgtttttctggtacaacgccagcataggagacaacgagtccgatcaggcctcaggggcatacattttcaggcctaatcaacagaagccacttcccgtgtcacgctgggcgcaaattcatcttgtcaaaactcctctcgttcaggaagtccatcaaaacttctccgcttggtgctcccaagtggttcgtctctaccccggtcagcgccatcttgaactggaatggtccgtggggccaattccagtcggcgatacttggggcaaggaagtgatctcccggttcgacacgccactggaaaccaaaggccgattctatacggattcaaacgggcgcgaaatcctcgaaaggagaagagattaccgccctacctggaagttgaaccagactgaaccagtggcaggaaattactaccccgttaacaccaggatttacattaccgacgggaacatgcagttgactgtgctgacggaccgctcgcaaggtggatcgagccttcgcgacggttcgcttgaactgatggtgcatcgccgccttctcaaagatgacggccggggggtgtccgaaccactcatggaaaacggatcgggggcatgggtcagaggtagacatctcgtgctgctggatactgcacaggcggcagctgcaggacaccgcctccttgctgaacaagaagtgctggcgcctcaagtcgtcctcgcacccggaggcggagcggcgtacaatctgggagcaccgcctagaactcagttctcgggccttagaagggaccttcctccctccgtgcatcttcttactcttgcttcgtggggacctgagatggtgcttcttcgattggagcatcagttcgcagtcggtgaagattcaggaagaaatcttagtgcacctgtgactctcaacctccgcgatctgtttagcacctttactataaccaggctccaggaaaccaccctcgtcgctaaccaacttagggaagcggcctcgaggcttaaatggaccactaataccggacccactccacatcaaactccctaccaacttgatcctgccaatatcactctggaacctatggaaatccggacgtttttggcatcggtgcaatggaaggaggtggacggt

SEQ ID NO: 11643 - DNA, 3033 bp, Artificial Sequence
  derived and/or modified sequence
atgggtgcatatgcccgcgctagcggagtgtgtgcacgcggatgcctggactccgcagggccttggactatgagtcgggctctccgcccccctctccctccactgtgttttttcctgctgcttttggccgctgcgggtgcgagggcaggagggtacgaaacctgtcctacggtgcagcctaacatgcttaacgtgcacctcttgccacatacgcacgatgatgtcggctggctgaaaaccgtggaccagtacttttatgggatcaaaaatgatatccaacatgcaggtgtgcaatacattctggattcggtgataagcgccttgcttgcagatccaacccggcgctttatctacgtggaaattgcattctttagccgctggtggcatcagcaaaccaatgcaacccaggaagtcgtgcgcgaccttgtgaggcagggaaggttggaatttgcaaacgggggctgggtcatgaacgacgaggctgcaactcactatggcgctatagtggatcaaatgaccctgggactccgcttcctcgaagatacctttggaaacgacggacgcccaagagtggcttggcatatagatcctttcggacattcgcgggaacaggcatccctttttgcacaaatgggcttcgatggatttttctttggaaggctggattaccaagataagtgggtgcggatgcaaaagctcgaaatggaacaagtgtggagggcatcaacctcgctgaaaccccctactgcagacctctttactggagttctgcctaatggatacaatccacctcgcaatctctgctgggacgtcctttgcgtggatcagcctctggttgaagatcctagatcaccggaatacaatgcaaaggaactggtggattactttctgaatgtggcaactgcccagggaagatactaccgcacgaaccatactgtcatgactatgggctctgattttcagtacgagaatgccaacatgtggtttaagaatcttgataaactgatccgcctggtgaacgcacagcaggccaagggctccagcgtgcacgtgctgtactccaccccggcctgctacctgtgggaacttaacaaggcaaacctcacctggtccgtcaagcatgatgacttctttccatacgcagatggacctcatcagttttggaccgggtacttctcgagccggcctgcacttaagagatacgagcgacttagctacaactttctccaagtgtgtaatcaactggaagccctggtggggctggccgctaacgtgggaccttacggatcaggtgacagcgccccgctgaacgaagcgatggctgtccttcaacatcacgatgcagttagcggcacgtcacgccagcacgtcgccaacgattatgcaagacaacttgcagcaggatgggggccctgtgaagtccttctgtccaatgcgctggccaggctgcgcggatttaaggatcacttcaccttctgccagcagctgaacatttccatctgtcccctgtcgcagactgcagcacgatttcaagtgattgtgtacaatcctttggggagaaaggtgaattggatggtccggcttcccgtgtcagaaggcgtgtttgtggtcaaggacccgaacgggcgcaccgtgccgtcagacgtggtgatatttcccagcagcgactcgcaagcccatcctccagaactgcttttttccgcgtcgctccctgccttgggattttcgacctactcagtggcacaggtccctagatggaagcctcaagcgcgagcaccacagcctattccacgtcgatcgtggtccccggccctgactatagagaacgagcacattcgtgccacctttgaccctgacactggtctgctgatggagatcatgaacatgaaccagcaactgcttttgcctgtgcgccagacttttttctggtacaacgcgtccattggggacaacgagtcggaccaggcaagcggagcctatatctttcgtccgaaccagcagaaacccctcccagtttcccgctgggcccagatccatctggtcaaaacccctcttgtccaagaagtccaccagaatttctcggcgtggtgttcacaagtggttcgcctttacccgggacaaagacatctggaactggaatggtccgtgggtcccattcctgtgggagatacctggggcaaggaggtgatttcacggttcgatactcctctcgagactaaaggcagattttacactgacagcaacggtagagaaattctcgaaagacgtcgtgattaccgaccgacctggaagctgaatcaaactgagccagtggcaggtaactactaccctgttaacacccgtatatacatcactgacggtaacatgcaacttaccgtgctgactgatcggtcacaaggaggatcgtcgctgagagatggttcgctggaacttatggtgcatagacggcttctgaaggatgacgggcgaggtgtctccgagccgttgatggaaaacggatcaggagcatgggtgaggggtcggcatttggtgctccttgacactgcacaggccgccgcggctgggcaccgccttctggcagagcaagaagtgctggcaccacaggtcgtgttggccccaggcggaggggctgcgtacaacctcggcgcaccccctagaacccagttttcgggactgagacgggaccttccgccttccgtgcatctgcttaccctggcgtcctggggaccagaaatggtgctgctgcgcctggaacaccaattcgcagtgggagaggactcgggacgcaacctgtcggctccagtgactctgaatctgagagatcttttctccacttttacgatcactcggctgcaagaaaccactcttgtggcaaatcaacttcgtgaagccgcgagccggttgaaatggactacgaataccggacccacccctcatcaaaccccttaccagcttgatcctgctaacataaccctggaacccatggagattagaacctttctggcatcggtccagtggaaggaagtcgacggc

SEQ ID NO: 11644 - DNA, 3033 bp, Artificial Sequence
  derived and/or modified sequence
atgggagcatacgcacgcgcatccggtgtctgtgcgcgaggttgtttggacagcgccggcccctggaccatgtcacgggcattgaggcctcctctccctcctctgtgttttttcctgcttctgctggccgcagcaggtgccagagctgggggttacgagacgtgtcctactgtgcagccgaatatgctgaacgtgcatctgctgccacatactcacgacgatgtgggttggctgaaaaccgtggaccagtacttttacggaataaagaatgatatacaacatgccggcgtgcaatacatccttgatagcgtgatttcagcactccttgcggatccgacgaggcggttcatttacgtcgaaatcgctttcttctcccgctggtggcaccaacagaccaatgcaactcaagaagtggttagagacttggtccgacaaggacgactggagtttgcaaacggtggttgggtcatgaatgatgaagccgcaacccattacggtgcgatcgtggaccagatgaccctcggacttagatttctggaagatacttttggtaacgatggacgtccgcgagtggcctggcatattgacccatttgggcactcgcgcgaacaagccagcctttttgcacagatgggcttcgatggattcttttttgggaggctcgactaccaagataaatgggttagaatgcagaaactcgaaatggaacaggtctggcgggcaagcacttcgctgaagcctccaaccgccgatctgtttaccggggtgcttcctaacgggtacaaccccccaaggaatctgtgttgggatgttctttgcgtggaccaaccgctcgtcgaagatcccagaagccctgagtacaatgcaaaggagctcgtggattacttcctgaatgtggcaaccgcacaaggtaggtattacaggactaaccacacggtgatgaccatgggatccgatttccaatatgaaaacgcaaacatgtggtttaagaacctggataagctgatccgactggtcaatgcacaacaggcaaagggctcctcagtccatgtcctttattccacccccgcatgctacctctgggagctgaacaaggctaacctcacgtggtccgttaaacatgacgacttctttccatacgcagatggcccacaccaattttggaccgggtacttttcaagtcgccctgccctcaagcgatacgaacgactttcgtacaatttccttcaggtgtgcaaccagcttgaagcattggtgggactggctgccaacgtgggaccctacggttcgggagattccgctccgcttaatgaagctatggcagtcctgcaacatcacgatgcagtgtcaggaacttccaggcagcatgtcgcgaatgactatgcaagacaacttgccgctggctggggaccatgtgaggtcctgctctctaatgctttggcacgccttcggggtttcaaagatcatttcaccttttgtcagcaattgaacatctctatttgccctctgagccagactgcagcacgcttccaagtcatcgtgtacaaccccctgggaagaaaggtgaactggatggtgagactcccagtttcggagggagtgtttgtggtcaaggacccaaacggtcggacggtgccttctgatgttgtgatttttccttcctccgactcccaagcgcatccacctgaactcctcttttcggcctctctgcccgcacttgggttctccacttactctgtggcacaggtcccacgctggaagcctcaagcacgggcaccgcaacctattccacggagatcctggtcgccggccctgactattgaaaatgaacatatcagggcgacgtttgatcccgacactggcctgcttatggagattatgaacatgaaccagcaactgctccttcccgtcagacaaactttcttttggtacaacgcgagcatcggagataacgaaagcgatcaggcctccggagcatacatctttagacctaatcagcagaagcctttgccagtgtcgcggtgggcacaaattcatctcgtcaagacccctcttgtgcaggaagtgcaccaaaacttcagcgcctggtgttcgcaagtggtcagattgtacccggggcagcgccatcttgagcttgaatggagcgtggggccaattcccgtcggagatacctggggcaaagaagtgatttcgcgcttcgatactccccttgaaaccaagggaaggttttacaccgatagtaacggtcgggaaatacttgaaagacgtagagactaccggcctacctggaaactgaaccagactgaaccggtggccggtaattactacccagtgaacaccagaatctacattactgacggtaacatgcaacttacggtgctgaccgaccgatcacaaggcgggagctcactgagggatggttcgttggagttgatggtccacagacgactgcttaaggatgatggacgcggagtgtccgagccgttgatggagaacggaagcggtgcctgggtgcgaggacggcacctggtgcttcttgatactgcacaggcggccgcagccggtcatcggcttcttgcggagcaagaagtgctcgcgcctcaggtcgtgctcgccccagggggcggggctgcctacaacttgggtgctcctccacgtacccagtttagcggacttaggcgagatttgcctccatccgtgcatctcctgacccttgcctcctgggggcctgagatggtgctcctgcgcctggaacaccaatttgcagtgggcgaggactcgggacgaaatctcagcgccccagtgaccctcaatctgagggaccttttttcgacttttaccattactcgacttcaggaaaccaccttggtggccaatcaactgcgagaggccgccagccgactgaaatggactacgaacaccggaccgaccccacatcaaactccttaccaactggaccctgccaacattactttggagccgatggaaataaggacgttccttgcgagcgtacaatggaaggaagtggatggc

SEQ ID NO: 11645 - DNA, 3033 bp, Artificial Sequence
  derived and/or modified sequence
atgggcgcctatgcaagagcgtccggcgtttgtgcccgcggatgtctggatagtgccggtccatggaccatgagtagagcactgagaccgcctctgccccccctttgcttcttcttgctgctgctagcagccgctggagcccgcgccggcggctacgaaacctgcccgactgttcaaccgaatatgcttaatgtacatcttctcccgcatacacatgacgatgttggctggctgaaaacagtagatcaatacttttatggcatcaaaaatgatattcagcacgcaggagtgcagtatattcttgattctgtgatctctgctctccttgcagaccccacgagacgctttatatatgttgaaatcgcctttttcagtagatggtggcatcagcaaacgaatgcgacccaagaagtagtacgagacttagttcgccaaggccgcctggaatttgccaacggtgggtgggtgatgaacgatgaagctgctacacactatggtgctattgttgatcagatgacgctgggccttagatttctcgaagacacgtttgggaacgacggacgtccgagagtggcgtggcacattgacccattcggtcattcaagagaacaggcgtcgctgtttgctcaaatgggtttcgatggcttctttttcggcagattggattaccaagataagtgggtgaggatgcaaaagctcgaaatggaacaggtctggcgagccagtacttcactcaaaccgccgaccgcagatcttttcactggagtcctgccgaacggttataacccgccgcgcaatctgtgctgggacgttctttgtgtagaccagccgttagtagaggacccgaggtcgcctgaatataatgccaaagagttggtcgattactttctaaatgtagctacggcacaaggccgttactatcggacgaatcacacagtgatgaccatgggttctgattttcagtacgaaaatgcaaatatgtggtttaagaatttggataaattgataaggctggtgaatgctcagcaagctaaaggcagctcggtccatgttttgtatagcacgccggcatgctacctctgggaactgaacaaggcaaacttaacatggagcgtgaaacatgatgacttttttccgtatgccgatgggccacaccagttctggaccggatattttagctcacgcccggccctgaagcgctatgagagactttcttataactttttgcaagtctgtaatcagttagaggcccttgttgggctggccgcaaacgtaggtccttatggaagcggcgattcagcaccccttaatgaggctatggccgtgttgcagcatcacgatgccgtttcaggtacttcccggcagcatgtagccaatgattatgcgcgacaactagcggctggttggggaccttgcgaggtactgttgtcaaacgcactggcacgtttgcgtggttttaaagatcattttacgttctgtcaacaattgaatatctcaatttgcccgctgagccagacggccgcccggtttcaagtaatcgtttataatcctttaggacgtaaagttaactggatggttcgtcttccggtgtcagaaggggtatttgtagtcaaggatccgaacggccggacggtgccatctgacgtggtgatctttccgtcgtccgatagccaagctcatccaccggaacttctatttagtgcatcacttccggcgttaggcttttcaacatattcagttgcgcaggtacctcggtggaaaccacaggcgagagccccgcagccgatcccacggaggagttggtccccggctctcacgatcgagaatgaacatatccgagccacgtttgatccagatactggactgctaatggagatcatgaacatgaatcagcagttgctcttgcccgtgaggcagacattcttctggtataatgccagtattggggacaatgaatctgaccaggcttccggggcctacatttttcggccgaatcagcaaaaaccgttgccggtgtcaagatgggcccagattcatcttgtaaagactcctctggtacaagaagtccatcaaaacttctcagcctggtgctctcaggtcgtccggttatatcctggtcaacgccatctagagttggagtggtctgtcggacctatacccgtgggcgatacctggggaaaagaagttatatcaagatttgataccccgttagaaacaaagggcagattttacacggactcgaatggaagggagatcctggaacggagacgcgattatagaccgacatggaaactgaaccagacggaaccggttgcaggcaattactatcctgtcaacactcgtatttacattactgacggaaacatgcaactgacagtattgacagatagatctcagggagggtcatcactacgcgacggctctttggaactgatggtgcatcggaggcttctgaaagacgatgggcgtggagtgagcgaacctcttatggaaaacggaagcggagcctgggtgcgtggaagacatctagttttattagatacagcacaagctgcggcggctggccatcgcctactggccgaacaagaagttttagccccccaggtagtattggcgcctggtggcggtgcggcatataaccttggggcgccaccgaggactcaattttcgggcttacgcagggatcttcctccttcagtacatctgttaactttagcttcttggggaccggaaatggttcttttacgtctcgaacatcaatttgccgtcggtgaagattcaggtagaaatttatccgcaccggtgacactgaacttaagagacttgttttcgacattcactattaccagactgcaagaaacaacattggtagccaaccagttgcgcgaagcagcctcacgccttaaatggaccacaaatactggaccgacgccgcatcaaacaccgtatcagttggaccctgcaaacatcaccttagaaccgatggaaatcaggaccttcttggcgtcagttcaatggaaagaggttgacgga

SEQ ID NO: 11646 - DNA, 3033 bp, Artificial Sequence
  derived and/or modified sequence
atgggtgcttacgcaagagcctccggtgtgtgcgcacggggctgtcttgactcagcaggaccttggaccatgtccagggcgctgcgaccgccacttcctccgctgtgtttctttctcctgctccttgcagcagccggggcaagagcaggaggatacgaaacctgtcccactgtccagccaaacatgctcaatgtgcatcttcttccccatacccacgacgacgtgggttggctgaaaaccgtggatcagtacttctacgggataaagaacgacatccaacatgccggagtgcagtacattcttgattccgtgatctcggccctgctggcagatcctacccggagattcatttacgtggaaatcgcatttttctcacggtggtggcaccagcaaaccaacgccactcaagaagtggtgcgagatctggtgaggcaaggacgactggagtttgcaaatggaggttgggtgatgaacgatgaagcagccacccactacggtgcaatcgtggaccaaatgaccctcggtttgcgctttctcgaggacacctttgggaacgacggacgtccaagagtcgcatggcatatagacccttttggacattcccgcgaacaagcatcgctctttgcgcagatgggttttgatggtttctttttcggccgtctggactatcaggataaatgggtgcggatgcaaaagttggagatggagcaagtctggagggcttcgacttcacttaagcctcctacggctgatctcttcactggcgtgcttcctaacggctacaatcctcccaggaatctttgttgggatgtgctgtgcgtcgatcaaccactggtggaggacccccgttcccctgaatacaacgccaaggaactggttgattactttttgaacgtcgcgaccgcccaagggcggtactacagaacgaatcacaccgtcatgactatgggttcggatttccaatacgaaaatgcgaacatgtggtttaagaacctcgataagctcattagactggtgaacgcacaacaggctaagggatcatccgtgcatgtcctgtactccacccctgcttgttacctttgggagcttaacaaggccaacctgacgtggtccgtcaagcatgatgatttctttccttacgctgatggtcctcatcaattttggactggttacttctcctcccggcccgcacttaagcgctacgaacggctttcatacaactttctccaagtttgtaaccagcttgaagctcttgtgggtctggcagccaatgtgggaccatacggctccggggattcagcgccactcaatgaggccatggcagtgttgcagcaccatgacgcagtgagcggcacttcgcgccagcatgtggccaacgattacgcccgccaacttgcggcaggctggggtccatgcgaagtgctgctctcgaacgccctggcacgcctgagaggtttcaaggatcactttacgttctgtcagcagcttaacatctcaatttgtcctctttcacagacggcagcaagatttcaggtgatcgtgtacaacccccttggtcgaaaggtgaactggatggtgaggctgccagtctccgaaggagtgttcgtggtgaaagaccccaatggacggaccgtcccttcagatgtggtgatcttcccatcctccgattcgcaagcacatcctcccgaattgctgttttcagcctcactgcctgcacttggattctcgacctactctgtggcacaagtgcctagatggaaacctcaggcacgagcaccgcagcccattccacgacggtcatggtcgcccgcactcactattgaaaatgagcatattagagccaccttcgatccagacaccggactcctgatggaaatcatgaacatgaaccagcagctcctccttccggtgagacaaactttcttttggtataacgcatccattggtgataatgaaagcgaccaggcgtccggcgcatacattttccgacctaatcagcaaaagccactgcccgtcagccggtgggcccagatccaccttgtgaaaactcctctggtgcaggaggtccaccaaaactttagcgcatggtgtagccaagtggtgcgactgtacccaggacagcgtcatcttgaacttgaatggtcggtgggacctattcctgtgggggacacctggggaaaagaggtgataagcaggtttgatacgccgctggaaaccaagggccggttttacactgatagcaatggcagagaaattctggaacgtcggcgtgattaccggccaacctggaagctgaatcagactgaacctgtggctggtaattactatccagtgaataccagaatctacataactgacggcaacatgcagctgaccgtcctcacggatcgcagccaggggggttcctccctccgagacggatcgcttgagctcatggtccacagaaggctgttgaaagacgacggccgcggagtgtcagaacctctgatggaaaatgggagcggggcctgggtgagggggaggcatcttgtcctgctggatactgcacaggcagcagccgccggacatagacttctcgcggagcaagaggtccttgccccacaagtcgtgctggcacctgggggtggagccgcttacaatctcggtgcaccccctagaacccagttttcagggcttagacgtgatcttcctcctagcgtccatctgcttacgctcgcatcgtggggccctgaaatggtgctgttgcggcttgaacatcaatttgcagtcggggaagattcgggtcgcaatctttccgcacctgtgacccttaacctccgagatctctttagcacctttactattaccagactgcaagaaacgaccttggtggcaaatcagcttagagaagctgcgtccaggctgaagtggacgacgaataccgggcctaccccgcaccaaacgccataccaactcgatccggctaacattacccttgaacccatggagattcgaacttttcttgcatcggtccagtggaaggaggtcgacggc

SEQ ID NO: 11647 - DNA, 3033 bp, Artificial Sequence
  derived and/or modified sequence
atgggagcatatgcaagagcatcaggagtttgtgcaagaggatgtttagattcagcaggaccttggactatgagtcgtgctttacgtccacctttaccaccactttgtttttttttattattattagctgcagcaggggcacgtgccggaggatatgaaacatgtccaactgttcaaccaaacatgttaaatgttcatttattaccacatactcatgatgatgtgggttggttaaaaacagttgatcaatatttttatggtattaaaaatgatattcaacatgctggagtacaatatattcttgattcagttattagtgctcttttagcagatccaactagacgatttatttatgttgaaatcgcatttttttcaaggtggtggcatcaacaaacaaatgcaactcaagaagtagttagagatttagtaagacaaggtagattggaattcgctaatggtggatgggttatgaatgatgaagcagcaacacattatggagcaattgttgatcaaatgacacttgggttaagattccttgaagatactttcggtaatgatggaagaccacgagtagcatggcatattgatccatttgggcatagtagagaacaagcttctttatttgcacaaatgggatttgatggttttttctttggtcgattggattatcaagataagtgggttagaatgcaaaaacttgaaatggaacaagtttggagagcttctacttcacttaaacctccaacagcagatctatttacaggagttttaccaaatggatacaaccctccaagaaatttatgctgggatgtactttgtgttgatcaaccacttgttgaagatccacgttctcctgaatataatgctaaagaattagtagactatttcttaaatgttgctacagctcaaggaagatattatagaacaaatcatacagttatgactatgggttcagattttcaatatgaaaatgcaaatatgtggttcaagaatttagataaattaataagacttgttaatgcacagcaagcaaaaggttcatcagttcatgtattatactcaactccagcatgttacttatgggaacttaataaagctaaccttacatggtctgttaaacatgatgactttttcccatatgcagatggaccacatcaattttggacaggatatttttcatcacgtccagctttaaaaaggtatgaaagacttagctataactttcttcaagtttgtaatcaacttgaagctttagttggattagcagctaatgttggaccttatggatctggtgattctgctccacttaatgaagcaatggctgttttacaacaccatgatgctgtatctggaacatctagacaacatgttgcaaatgattatgcaagacaacttgctgctggttggggaccttgtgaagttttattatctaatgctttggctagacttagaggatttaaagatcattttacattttgtcaacaacttaatatatctatttgtccattatcacagactgctgctagatttcaagtcattgtttataatccacttggaagaaaggttaattggatggttagattacctgtgtcagagggtgtttttgttgttaaagaccctaatggtagaactgttcctagtgacgttgttatttttccatcttcagattcacaagctcatccaccagaattgttattttcagcatcattaccagctttgggtttttcaacatatagtgttgcacaagtacctagatggaaaccacaagcaagagcaccacaacctattccaagaagatcatggtcaccagccttaacaattgaaaacgaacatattagagcaacttttgatccagatactggacttttaatggaaataatgaatatgaaccaacaacttcttttaccagttagacaaacatttttttggtataatgcatcaatcggagataatgaaagtgatcaagcatcgggagcttatatattcagaccaaatcaacaaaaaccattaccagttagtagatgggcacaaattcatttagtaaaaacaccattagttcaagaagtacatcaaaacttttcagcatggtgttcacaagttgttagactttatccaggacaaagacatttggagttagaatggagcgtcggtcctattccagtaggagatacttggggaaaagaagttatatctagattcgacacaccattagaaacaaaaggaagattttatactgattcaaatggaagagaaattcttgaaagaagaagagattatcgtcctacatggaagttaaatcaaacagagccagttgctggtaattattacccagtaaatactagaatctatattactgatggaaatatgcaattaacagttcttactgatagatctcagggaggtagtagtttaagagacggatcacttgaattaatggtgcatagaaggctacttaaagatgatggtagaggtgttagtgaaccacttatggaaaacggttcaggtgcttgggtaagaggtagacatctagttttattagatactgcacaagctgctgcagccggacatagattacttgcagaacaagaagtattagcaccacaagttgttttagcacctggaggaggagcagcttataatttaggagcaccaccaagaacacaatttagtggtttaagaagagatttgccaccttcagttcatttactaactttagcatcttggggtccagaaatggtattattaagactcgaacatcaatttgcagttggtgaagattcaggaagaaacctttcagccccagtaaccttaaatttacgagatttattttcaacatttacaattactagattacaagaaactacacttgtagcaaatcaattaagagaagcagcttcaagactcaagtggacaactaatactggaccaacacctcatcaaacgccatatcaattagatccagcaaatattactttagagccaatggaaattcgtacctttctagcttcagtacaatggaaagaagtagatggt

SEQ ID NO: 11648 - DNA, 3033 bp, Artificial Sequence
  derived and/or modified sequence
atgggagcttatgctcgagcgtctggcgtgtgtgcaaggggttgcctggattcagctggcccttggaccatgagcagagccttgcggccaccacttccccctctctgcttttttctgcttcttctggccgccgccggtgcaagagctggaggttacgagacttgtccaaccgtgcagccgaacatgctcaatgtccaccttcttcctcacacccatgatgatgtgggctggctgaaaactgtggatcaatacttctatggaattaagaacgatattcaacacgctggtgtgcaatacatacttgattcggtcatctcggccctgctggcagatccgactaggaggttcatatatgtggaaattgcattcttttcacggtggtggcatcagcaaaccaatgcaacgcaagaagtggtccgcgatcttgtgcgtcagggacgccttgaattcgcaaacggtggatgggtgatgaatgatgaagcagcaactcattatggtgcaatcgtggatcagatgaccctgggcctccgctttctggaagatactttcggaaacgacggcagaccacgagtcgcatggcatattgatccatttggtcatagccgggaacaggcaagcctgttcgcacaaatgggttttgacggtttcttttttggacgtctggattaccaagataagtgggtgaggatgcagaagctggagatggaacaggtctggcgtgcgagcaccagccttaagcctccaactgcagatctctttactggagtgctgccaaacggatacaaccctccccgcaacctttgctgggatgtgctgtgtgttgaccagcctctggtggaggaccctagatcccctgaatacaatgcaaaggagctggtcgactacttccttaacgtcgcaaccgcacaaggacgatactaccgcaccaatcataccgtgatgacgatggggtcggatttccagtacgaaaacgcgaacatgtggttcaagaaccttgataagctcattcgcctggtgaatgcacagcaagcaaagggatcctccgtgcacgtcttgtactccactcccgcctgctacctctgggaactgaacaaagccaacttgacgtggtcagtgaagcatgatgactttttcccgtacgcggatgggcctcatcaattctggactggatacttctccagcagaccggcacttaagcgctacgagagactcagctacaattttcttcaagtgtgtaatcaactggaggcacttgtcggacttgcagcaaacgtgggaccgtatggttcgggagattcggccccactgaacgaagcaatggctgtccttcagcatcacgatgcagtttcagggacttcgaggcaacacgtggctaacgattacgcgcgtcagctggcagcaggatggggcccttgcgaagtgctgctgtcaaacgcattggctaggctgcgagggtttaaagatcatttcactttttgtcaacagctcaacataagcatttgtccattgtcacaaactgcagcccgctttcaagtcatagtctacaacccccttggaagaaaggtgaactggatggtgcggcttccagtctcggaaggagtgtttgtggtcaaggatccaaatggtagaaccgtgccctcagatgtcgtgatctttccttcgtcggatagccaagcccaccctcctgaacttcttttttccgcatcgctgccagcccttggattcagcacctactcggtcgcgcaagtgcccagatggaagccccaggcacgtgcacctcaacctatacctagaagaagctggtcccctgcccttaccatcgaaaatgagcatatccgcgcaacttttgatccagatactggactcctgatggaaatcatgaacatgaaccaacaactccttctgccagtgcgtcaaacctttttctggtacaatgcatccattggtgataacgagtccgatcaggcttcaggtgcctacatattccgccccaaccaacagaagccccttcctgttagccgttgggcccagatacatctggtgaaaacccccctggtccaggaagtgcaccagaatttctccgcctggtgctcccaagtcgtcagactttaccctggtcaacgccacctcgagctggagtggtccgtgggtcctattccagtgggagacacttggggtaaggaagtgatcagccggtttgacactcctctggagacgaagggcaggttctacactgactcaaacggccgcgagattcttgaacgccgaagagactacagacctacttggaaactgaaccaaaccgagcctgtggcaggcaactactaccctgtcaacactcgtatttacattaccgacggcaacatgcaacttactgtgcttaccgatagatcacaaggaggatcctcgctgagagatggatcgctcgaactcatggtccatcgacggttgcttaaggacgacggaagaggagtgtcggagccactgatggaaaatggctcgggtgcctgggttcgaggtcggcacctggtgctgctggacactgcccaggcggcggcggcgggacacagactgctggcggaacaagaagtgcttgcacctcaggtcgtgctcgcacctggtggaggtgcagcctacaacttgggtgcaccacccaggacccagttttccggtcttaggagagatctcccaccatccgtgcaccttctgaccctggcatcatggggacctgagatggttttgctgcgcctggagcaccagttcgccgtgggcgaagattcagggcgtaatctgtcagcgcctgttactttgaacttgagggatcttttttccacgtttaccatcactcgactccaagaaaccactctcgtcgcaaatcaactgagggaagcagcaagccgcctcaagtggactactaacaccgggccgacccctcatcagaccccataccagcttgatcccgcaaacatcaccttggagcctatggagattagaaccttccttgcatccgtccagtggaaagaggtggacgga

SEQ ID NO: 11649 - DNA, 3033 bp, Artificial Sequence
  derived and/or modified sequence
atgggggcatacgctagagccagcggtgtgtgcgcccgggggtgcctggattcggccggtccgtggactatgtcgagagctctgaggcctcctctcccacccctgtgtttcttcctcctgctgctggcagcagcgggtgcacgggccggaggatacgagacgtgccctaccgtgcagccgaatatgctgaacgtgcatttgctgccacacacccacgatgacgtgggatggctcaagaccgtggatcagtacttctacggaatcaagaacgacatccagcacgcgggtgtccagtacatcctggattcggtgatctcggcactgctcgctgacccgacccgccgctttatctacgtcgagatcgcgttcttctcccgctggtggcatcagcagactaacgccacgcaagaggtggtgcgggacttggttcgccaagggcggctcgagttcgccaacggtggatgggtgatgaacgatgaagcagcaacccattacggagccatcgtcgaccagatgactcttggactccggttccttgaagatactttcggaaatgatggtagaccccgagtggcctggcacattgacccgttcgggcactcaagggaacaggcatctctgttcgcccagatgggattcgatggattctttttcggccgcctggactaccaggacaagtgggtgcggatgcaaaagttggaaatggaacaggtgtggagagcttccacctccctcaaaccgcctactgccgatctcttcaccggagtgctgcctaatggatacaaccctcctcggaatctgtgctgggatgtgctgtgcgtggatcaaccgctcgtcgaggacccgcgaagcccggaatacaacgcgaaggagttggtggactactttctgaacgtcgcgacggcccaaggaagatactaccggactaatcacaccgtcatgactatgggctccgacttccaatacgagaacgcaaacatgtggttcaagaatctggacaaactgatccgcctggtgaacgcacagcaggccaaaggatcctcagtccatgtgctgtactccactcccgcctgttacttgtgggagttgaataaagcaaatctgacgtggtccgtcaagcatgatgacttttttccatacgcggacggacctcatcagttctggactggatatttctcgtctcggccggcactcaaacgatacgaacgtctctcatacaacttcctgcaagtgtgtaatcaactggaggccttggtgggtttggcggcgaacgtgggcccctacggatccggagattcagccccgctgaatgaggccatggcagtgctccaacaccacgacgctgttagcggaaccagccggcaacacgtggcgaacgattatgccagacagctggccgcgggctggggaccatgtgaggtgctgttgtctaacgccctcgctagactgcgcggtttcaaggaccatttcaccttttgccaacagctcaatatctcgatctgcccgctgtcccaaacggccgcccgcttccaagtgatcgtgtacaaccccttgggacgcaaggtcaactggatggtgcgcctgccagtgtcggagggagtgtttgtggtgaaagacccgaatgggcgcactgtgccgtccgatgtggtgattttcccatcaagcgactcgcaggcacacccaccagagcttctgttctcggcgagcctgcctgctctgggcttcagcacctattcggtggcacaagtcccccgatggaagccgcaggcacgcgctccacaaccgatccccagaagatcgtggagcccagccctcaccatcgaaaacgaacacattagggcaaccttcgacccagacacgggattgctcatggaaatcatgaacatgaatcagcagctccttcttcctgtgcggcagactttcttctggtataacgcctcgatcggagacaacgagtccgaccaggcctcgggagcatacattttcagacctaatcagcagaaaccgctgccagtgtcccggtgggcccagattcatctggtgaaaacccctctggtgcaggaagtgcaccagaatttctccgcctggtgctcgcaggtggtgagactgtaccctggccaacggcaccttgagctcgaatggtccgtgggaccaatcccagtgggtgacacttggggaaaggaagtcatttcgaggtttgatactcctctcgaaactaagggccgcttctacaccgactcaaatggccgcgaaatcctcgaacggaggcgcgattaccggccgacctggaagctgaaccagaccgagcccgtggctggaaactactacccggtgaataccagaatttacatcactgatggaaacatgcaactgactgtgctgaccgaccgctcacaaggcggctcatccctgcgggatggatcgctcgagcttatggtgcatcggcggctcctcaaggatgatgggcggggagttagcgaaccactcatggagaacggaagcggtgcgtgggtcagaggacgccatcttgtgctcctggataccgctcaggctgcggcggcaggccatcgcctgctggccgaacaagaagtgctggcgccacaagtcgtcctggccccaggcggtggagcagcgtacaacctcggagctccgcctcggacccaattctccggcctgcgccgcgatctgccaccctccgtgcatctgctcaccctcgcgtcttggggccccgagatggtgctgctgcgactcgaacaccaattcgcagtcggggaggactcaggaagaaacctctccgctccagtcactctcaatcttagggatctcttctcaactttcactatcacccggctgcaggaaaccaccctggtggccaaccagctgagggaagctgcatcacggctcaaatggactactaacaccggccccactcctcaccaaaccccgtaccagctcgaccctgcaaatatcaccctcgaacccatggagatccgtaccttcctggcatcggtgcagtggaaggaagtggacgga

SEQ ID NO: 11650 - DNA, 3033 bp, Artificial Sequence
  derived and/or modified sequence
atgggcgcctacgctagggcgtcaggtgtgtgcgcaaggggctgtctggattccgcagggccatggactatgtctagagcactgcgccccccattgccacctctctgtttcttcctcctcctgctggcagctgctggggccagggccggagggtacgaaacctgcccaaccgtccaacccaatatgcttaatgtccatctgcttccgcacacccatgacgacgtcggatggctgaaaaccgtggaccagtacttttatggcattaagaatgatatccagcacgccggcgtacagtatattctcgactccgtcatctccgccctgttggccgatcccactcggaggtttatctatgtggagatcgccttcttcagtaggtggtggcatcagcaaacaaatgcaacccaagaggtcgtgcgggatttggtgcgccaaggaagactggagtttgctaacggcggttgggtcatgaatgacgaggcagcaacacattacggcgctatcgtggaccaaatgaccctggggctgagatttttggaggacacctttgggaacgacggacgcccgcgggtggcctggcacatcgaccctttcggccacagtagggaacaggcctcccttttcgctcagatgggcttcgacgggtttttcttcggtaggctggactatcaagataaatgggttaggatgcagaagttggaaatggagcaggtgtggcgagcttctaccagtctgaagccgcctaccgctgatctgttcaccggcgtcctgcccaatgggtacaacccacctcggaatctttgctgggatgtgctctgcgtagaccagcccctggtggaagatccccgcagcccagaatataacgctaaggaacttgtggattattttttgaacgtcgcgaccgcacagggtcgctactatagaactaaccatacagtgatgacaatgggtagcgacttccagtatgaaaacgccaacatgtggttcaaaaacctggacaagctcatccggctggtcaacgcacaacaggccaaagggtcttccgttcacgtgctctattccaccccggcctgctatctgtgggagttgaacaaggccaacttgacatggtcagtgaagcacgatgattttttcccttacgccgatggccctcatcaattctggactgggtacttctcatcaaggcctgctcttaagcgctatgaaagactgtcctataattttctgcaggtatgcaatcagctcgaggccctcgtaggactggctgccaatgtgggcccttacgggagcggagactctgccccgcttaacgaggcgatggctgtgctgcaacaccacgacgcagtgagcggcacctccagacagcacgtcgctaacgattacgcgaggcagctggccgctggctggggcccctgtgaggtactcctctctaacgcactcgcaagactgcgcgggttcaaggaccatttcactttctgccagcagctgaatatatccatctgtccgcttagccagactgccgcaagattccaagtgatcgtgtataacccccttgggcggaaggtaaattggatggtgcggctgcccgtcagtgagggagtgtttgtggtaaaagaccccaatgggcggaccgtgcctagcgacgtggtgattttcccctcaagcgactcacaggctcatccgcctgagctgctgttctccgccagtctgcctgctctgggctttagtacttacagcgtagcccaggttcccagatggaagccccaggctcgggcaccacagcctatcccaagacgctcctggagcccagccctgacaattgagaatgagcacattagagccaccttcgatcctgacacgggcctgttgatggagattatgaatatgaatcaacaacttctcctcccggttcgacagacattcttttggtataacgcctcaatcggggataatgagtctgaccaggctagcggagcatacatctttaggcctaaccagcagaagccgcttccagtgtccagatgggcccagatacatcttgtgaagacaccgttggtgcaagaggtgcatcagaacttctcagcttggtgcagtcaagtcgtcaggctgtatcctggtcagcggcatctggagctggagtggtccgtcgggcccatcccagtgggtgatacttggggaaaagaggtaatttcccgctttgacactcccttggagacaaaaggtcgcttctacaccgacagcaatggacgcgaaattctcgagcgcaggcgagactataggccaacttggaagctgaatcagaccgagccggtggctggaaactactatccagtaaataccagaatctatatcaccgatgggaatatgcagttgaccgtgctgaccgataggagtcagggcggctcttctctgcgggatggatctctcgaacttatggtacatcgccggctgttgaaggacgacggaaggggagtgtccgagccattgatggagaatggcagcggcgcttgggtgcggggtaggcatttggttctgctcgatacagctcaggcggccgcagctgggcataggcttctggccgagcaggaagtgctggcacctcaagtggttctcgcgcccggaggcggagccgcctataaccttggagctccgccaaggacacaattcagcggcttgcggcgcgacctgcccccgagtgtccaccttctgactctggccagttgggggcctgaaatggttttgctgcggctcgagcatcaattcgcagtcggggaagattctgggcgcaatttgagcgctcccgtaacactgaacctcagggacctgttttccacgttcaccattacacggttgcaggagactacacttgtcgctaaccagctgcgggaagcggcgtcccggttgaaatggaccactaacactggacctacaccccatcagactccctatcaactggatccggctaatattacactggagccaatggagatacgaacatttctggcctcagtccaatggaaggaggtcgacggc

SEQ ID NO: 11651 - DNA, 3033 bp, Artificial Sequence
  derived and/or modified sequence
atgggggcctatgcgagagcaagcggtgtgtgcgcgcgggggtgcctggattctgccggaccttggacaatgtcgcgcgcccttaggccccctctcccccctctgtgtttctttctgctgctcctggcagcggccggcgctcgggcaggcggatacgagacatgccctacggttcagcctaatatgctcaacgtgcacctccttcctcacacgcacgacgacgtggggtggctcaaaacagtggatcagtacttctatgggatcaagaatgatatccagcatgccggagttcaatatattctagattcagtgatttcagcattgttggcagaccctacgcgacgcttcatttatgttgagatcgcgtttttcagtcgctggtggcaccagcagacaaatgcaacacaggaagtagtgcgggacctggtcaggcaaggtcgtctagaatttgctaatggggggtgggtcatgaacgatgaggctgccacacactacggcgccatagtcgatcagatgacactgggacttcgttttttggaagatacgtttggcaatgatggccgcccccgagtggcttggcacattgacccgtttggccatagcagagagcaggcgtcactttttgcccaaatggggttcgatgggtttttctttggcagattggattaccaggataagtgggtgcgaatgcagaaactagaaatggaacaagtctggagagcatcgacgtctctgaagcctcccacagctgacctgttcacaggagtgttgcctaacgggtataacccccctcggaacctctgctgggatgtgctgtgcgtggatcagcctcttgtggaagatccacgctcacccgagtataacgcgaaggaactcgtggattacttccttaatgtcgccaccgcccaggggagatactatcgtaccaatcacacggtcatgacaatgggcagcgactttcagtacgagaatgccaatatgtggtttaagaaccttgataagttgatcaggcttgtcaatgctcaacaggccaaaggaagcagcgtccatgtgctatattcaacaccggcatgttacctgtgggaattaaataaagctaacttgacatggagcgtcaagcacgacgacttttttccatatgccgacggcccccaccaattttggacgggttacttctcgtcgcgcccagcactcaagagatacgaacgcctgagctacaacttcctgcaagtgtgtaaccaactagaggctctggtagggctggcagcaaatgtggggccctatggatccggagatagtgcgccactgaatgaggcaatggccgttttgcagcaccacgacgccgttagtggcacatctcgccagcatgttgccaatgactacgctaggcagctcgccgccggatggggaccttgtgaagttctgttgtcaaatgccttggcccggctccgcggctttaaggatcatttcaccttctgccagcagttgaacatctctatttgtccattaagccagaccgccgcccgattccaagtgatagtctataatccccttggacgcaaagttaattggatggtgcggctccctgtgtccgaaggagtgtttgtggtgaaggatcctaacggccggactgtccctagcgacgtcgtgatcttcccgagtagcgactcacaggctcatcctcccgagctactgtttagcgcctcacttcccgctctaggcttttccacctattctgtggctcaggtgcctagatggaagccacaagcacgggcgccacagccaattcccagacgcagttggagccctgctctgaccatcgagaacgagcatattcgagcgacgtttgacccagatactggactcctcatggagatcatgaacatgaaccagcagctcttactaccagtgaggcagacctttttttggtacaacgccagcataggcgataacgagtcggaccaggcctccggcgcctatatcttccgacctaaccagcaaaagcccctgcctgtctctcgctgggcgcagatccatctggttaaaacacccctggtacaagaagttcatcagaacttttctgcctggtgctcccaagtcgtgaggttgtacccaggtcagcgccacctcgaactagaatggagcgtggggccgattccagtgggagacacatggggtaaagaagttatttctcgatttgatactccacttgagactaaggggcgtttctacactgactcaaatggccgagagatattggagaggagaagagactataggcctacgtggaagctgaatcagacggaaccagttgcagggaactactatccagtgaatacacgcatttacattaccgatggcaatatgcagctaacagttcttaccgatcgatcccagggcggttcttcactgagagatggcagcctggagctgatggttcatagacgcctgctgaaggacgacgggagaggtgtgtccgaacctctaatggaaaacggatctggcgcttgggtgcgcggtcgacacctggtactcctggacaccgcacaggccgccgccgccggccatcgtcttcttgcggagcaggaggttttggccccacaggtggtgctggccccaggcggcggtgccgcgtacaatctgggagctccacctagaacacaatttagcggcctgaggcgggatctgccgccgagcgtccatcttctgaccctggcttcgtggggaccagagatggttttactcaggctggaacaccagtttgcggtaggcgaggactccggccggaatctttccgctccagtcacattgaacctgcgggatctgttttccacctttactatcacacggctgcaggaaaccaccctcgtagccaaccagctgagggaagcagcctcgaggttgaaatggaccactaacactgggcctactccacaccaaacaccctaccaactggatcccgctaatatcactctggaacctatggagattcgcacctttctggcatccgtacagtggaaagaggtcgatggt

SEQ ID NO: 11652 - DNA, 3033 bp, Artificial Sequence
  derived and/or modified sequence
atgggcgcttacgcccgggcttccggggtttgcgcccggggctgcctcgactctgccggaccctggactatgagcagagctctgcgaccgccattgccccccttgtgtttcttcttacttctgctggcagcagccggcgcgcgcgccggtggatacgaaacttgcccgactgtgcagcccaacatgttgaatgtccatttgctgcctcatactcatgacgacgtggggtggctcaagacagtggaccaatacttctatgggatcaaaaatgacattcagcacgcaggtgtccagtacatcctggactctgttatctctgcattgcttgccgacccaacgcggcgcttcatctatgttgaaattgcttttttcagcaggtggtggcatcaacagaccaacgccacacaggaggtcgtgcgggatctcgtgaggcagggacgcttagagtttgccaatggcgggtgggtgatgaatgatgaggctgcaacccattatggtgccatagtcgaccaaatgacactcggactgcgttttctggaggacacctttggaaacgatgggaggcctagggttgcatggcatatcgatcccttcggccattcgcgcgaacaggcgagtcttttcgctcaaatgggcttcgacggattttttttcggaaggctcgactatcaggataagtgggtgcgaatgcaaaagttggagatggagcaggtgtggagggctagtactagcttgaaaccccccactgccgatctgtttactggcgtgcttcccaacggttacaatccccccagaaatctctgttgggatgtgctgtgtgtggatcagcctctggtggaagatcctcggtcacctgaatataacgccaaggagctagtggattacttcctgaacgtcgctaccgcgcaggggaggtattatcgcacgaaccatactgtcatgacaatgggctcggatttccagtacgaaaatgctaacatgtggtttaagaatctggacaagctcatccgtctcgtgaacgcgcagcaggcaaagggtagcagtgtccatgtgctgtattccacccccgcctgttacctatgggaactgaacaaagcgaacttaacctggagcgtgaaacatgatgactttttcccttacgctgacggcccacaccaattttggacaggttacttttcctcccgacctgctctgaaacgatacgagcgcttaagctataattttctccaggtatgcaaccagctggaggcactcgtgggtctagccgctaatgtgggcccttatggctcaggcgactcggctcctctcaatgaggccatggcagtcctgcagcaccatgacgccgtcagtgggacatccagacagcatgtggctaatgactatgcccgacaactagctgctgggtggggcccctgcgaagtgctcttatcaaatgccttggccagattgcgagggttcaaagatcactttacattttgccagcagctgaatattagtatctgtccactgtcccagaccgctgcacgtttccaggtgatcgtgtataacccgcttggtaggaaggtgaattggatggttcgcctgccagtgagtgagggagtgttcgttgtcaaagaccccaacgggaggactgtgccttctgatgtggttatttttccgagcagcgactctcaagctcatccacccgagctgttatttagtgccagtctgcctgcactgggcttcagtacatacagtgtcgcgcaagtacctcgctggaaaccacaggcgagagccccacagcccatccccagacgcagctggtccccagcactgacaatagaaaacgagcacatcagagccactttcgaccctgatactgggctgctgatggagattatgaatatgaaccagcagcttcttcttcccgttagacaaacttttttttggtacaacgcttctataggggataacgagtccgatcaggcaagtggtgcgtatatatttaggcctaatcagcagaaaccgcttccagtgtctaggtgggcccagattcatctggtgaaaactcctcttgtacaggaggtccaccaaaacttttcggcctggtgcagtcaggttgttcgcctgtacccaggccagcgccatctggaactcgagtggtcggttggaccaattcctgtgggagacacgtggggcaaggaggtcatcagtcgattcgatacacctctggagacgaaaggcaggttctatacagactctaatgggcgggaaattctggagcgaaggagagactaccggcccacgtggaaattaaatcagaccgagcctgttgccggaaattactatcctgtgaacacacgtatctacattactgacggaaacatgcaactcactgtcctaacggatagatcacaggggggatccagcctccgggatgggtctttagagctaatggtgcatagacgcctccttaaggacgacggtcgcggggtaagcgaaccattaatggagaacgggtccggcgcctgggtcaggggaaggcacttggtacttcttgacaccgctcaggccgcggctgcagggcaccgcctattagcagagcaggaggtccttgcacctcaggtggtgctggcacccggaggcggggccgcctataacctcggcgccccccctcggacccagttctcagggctccgcagggacctgccgccttcagtccatttgcttactttagcctcatgggggcctgagatggttctcctacgcctggaacaccagttcgctgtcggcgaggacagtggccggaacctcagcgcacccgtgaccctgaatttgcgcgaccttttctctacgttcactataacacgtcttcaggaaacaacgctcgtcgctaatcagcttcgggaagccgcttcacggcttaagtggaccaccaacacgggccccacaccacatcagacaccttatcagctcgaccctgcaaacatcacactcgaaccaatggaaataagaactttcctagcatcagtgcaatggaaagaggttgacggc

SEQ ID NO: 11653 - DNA, 3033 bp, Artificial Sequence
  derived and/or modified sequence
atgggagcgtacgcccgcgcttcgggagtgtgcgctcgcggatgcctggactcggctggaccatggaccatgtctcgcgccctccggccaccactgccaccactctgtttctttctgctcctgctggctgcggccggagcgagggccggagggtacgaaacctgtcctaccgtgcagccgaacatgctgaacgtgcatctcctcccacatacccacgacgatgtgggttggctgaaaactgtggatcaatacttttatggcatcaagaatgacatccaacatgccggggtccagtacatccttgactcggtgatctccgcgctgctggcggacccaacgcggcgcttcatctacgtggagattgcgttcttctcgcggtggtggcatcagcagactaatgccactcaggaggtcgtgcgggacctggtgcggcagggaaggctggagttcgccaacggaggttgggtgatgaacgatgaggccgccacccattacggggcgattgtagaccagatgacgctcggacttagattcctggaggatacctttgggaacgatggcaggccgcgggtcgcctggcatatcgatccttttggacactccagagagcaggctagtcttttcgcgcagatgggtttcgacggcttcttcttcggtcggctcgattaccaggataagtgggtccgcatgcaaaaactggaaatggaacaggtgtggcgggcgtcgactagcctgaaacctccgaccgccgacctgttcactggcgtcctgccgaacgggtacaacccgccaaggaacctctgctgggacgtgctgtgcgtggaccagcccctggtggaggacccccggtcccctgagtataatgccaaagaactggtcgactacttcttgaacgtggcaacggcgcaggggcggtactaccgcaccaaccacaccgtgatgaccatgggcagcgatttccaatacgagaacgctaacatgtggttcaagaacctcgacaagctcatcaggctggtgaatgcccaacaggccaaggggtctagcgtgcacgttctctactcgactccagcatgttacctgtgggaactcaacaaggccaacctgacctggtccgtcaagcacgacgacttctttccgtatgcagacggaccacaccagttctggactggatacttttcatcccgacccgcgcttaagcggtacgagaggctgtcctacaatttcctccaagtgtgcaatcagctggaagctctggtgggcctcgccgcaaacgtcggaccctacggcagcggagattccgctcctctgaacgaagccatggcagtgctgcaacatcacgatgcagtgtcaggaacctcccgccagcacgtggcaaatgattacgcccgacagctcgccgccggctggggtccatgtgaagtccttctctccaatgcgttggcaaggctgcgcgggttcaaggaccacttcaccttttgccagcaactcaacatatccatctgtccgctgtcgcagactgcggcgcggttccaggttatcgtgtataatccgctgggtagaaaggtgaactggatggtgcggcttccggtgtccgagggagttttcgtcgtgaaggaccccaatggcaggactgttccgtcggatgtcgtgatattcccgtcctccgattcacaagcccacccgccggaactcttgttctcggcttcgctccctgctttgggattctccacctactcggtggcgcaggtgccaaggtggaaacctcaggcacgagccccgcagcccatcccgcggcgctcttggtcgccggctctcactattgagaacgaacacatccgcgcaaccttcgacccggataccggactgttgatggagattatgaatatgaaccaacaacttttgctccccgtgcgccagacgttcttctggtacaacgcgtcaatcggagacaacgagagtgaccaggcctcaggagcatacatcttcagaccgaatcaacaaaagccactgccggtgtcgaggtgggcccaaattcatttggtgaaaacgcctttggtgcaagaagtgcaccaaaacttttccgcctggtgttcccaggtggtccggctgtacccgggacagcggcacttggagcttgagtggtcggttggccctattcccgtgggcgacacttggggaaaggaggttatttcgcgcttcgacactccgctggagactaagggccgcttttacacggattcaaatggacgcgaaatcctggaacgacgaagagactacagacccacgtggaagttgaaccagactgaaccggtggcgggaaactattacccggtgaacactcgtatatacatcaccgatggcaatatgcaactcacggtcctcactgatagatcgcaaggaggcagctccctgcgcgacgggtccctcgagctgatggtacaccgcagactgctcaaggatgacggtcgcggcgtctccgagcctctgatggagaacggttccggagcatgggtgcgtggacgccatctggtcttgttggacaccgcacaagcagcggcggccgggcaccggctcctcgccgaacaggaagtgcttgcccctcaggtcgtcctggcccctggaggaggagccgcctacaatctcggagcaccgccgcgcactcagttttcgggcttgcggcgcgacctgccgccttccgtgcatctgcttacgcttgcatcatggggaccagagatggtgctcctgagactggaacaccagtttgcggtcggagaagatagcggaagaaacctgagcgcccccgtgaccctgaatctccgggacctgttcagcactttcaccatcactcgcctgcaggagactactcttgtcgcaaaccaactccgcgaggctgcctcacggctcaaatggactaccaatactggtccgacccctcatcaaactccataccagttggacccggccaacattaccctggagccaatggaaatccgaaccttcctggcttccgtgcaatggaaagaagtggacggt

SEQ ID NO: 11654 - DNA, 3033 bp, Artificial Sequence
  derived and/or modified sequence
atgggcgcctacgccagggcatccggcgtgtgcgctagaggatgcctcgactccgctggaccgtggaccatgagccgagcgctgcgccccccactgcctcccctttgcttttttcttctgctgcttgccgcggccggagcgcgtgcaggcggctatgaaacttgccctaccgtacagccaaacatgctgaacgtgcacctgctgccgcatacccacgatgatgtgggatggctgaaaacagtggatcagtacttctacgggatcaagaacgacattcaacacgccggggtccaatatatccttgattctgtgatatcagctctccttgccgatcctactcgacgattcatatacgtggaaatcgcatttttttcccgctggtggcatcaacagaccaatgcgacccaggaggtggtgcgcgatctggttcgtcagggccggctggaatttgccaatggtggctgggtgatgaacgacgaggctgcaactcactacggagcaattgttgaccagatgacactgggtttacggttcctagaagacacttttggcaacgatggcaggcctcgcgtggcatggcacattgatccattcggtcacagccgcgagcaggcatccctttttgcccagatgggatttgacggattcttcttcggccgtctagattatcaggataaatgggtacgcatgcagaagctggaaatggagcaagtctggcgtgcgtctacttctcttaagccgcctactgctgatctgttcacaggtgtgctaccaaacggatacaaccccccaagaaacttatgttgggacgtgctgtgtgtagatcagcctcttgtagaagacccaagatctccagagtataatgccaaagagttggtggactattttctgaacgtagccacagcacagggtaggtattacagaacaaaccatactgtaatgacgatgggatcagatttccaatacgagaatgccaatatgtggtttaaaaacctcgataaactcattcgactggtcaatgcacagcaggctaaaggaagcagcgtccatgtgctgtacagtacacctgcctgctacctttgggaactgaacaaggcaaaccttacgtggtctgtgaagcacgatgacttcttcccttacgctgatgggcctcatcaattctggacgggatactttagctcccgccctgctctgaagcgttatgaaagactctcctataactttctacaggtgtgcaatcagctggaagctttagtgggcctggcagctaatgtgggaccttatggatccggcgacagtgcccctctgaacgaagctatggccgtgttgcaacaccatgacgccgtctccgggacctcaagacagcatgtggcaaacgattatgcgcgacaattggcagcaggctggggaccatgtgaagtccttctgtcaaatgcgcttgcccggcttagagggttcaaggaccactttaccttttgccagcagctcaacatttccatctgccccctctcccagaccgccgcccgatttcaggtcatcgtctacaatcccctgggccgaaaggtgaactggatggtgagacttcccgtaagcgagggcgtgtttgtggtaaaagaccccaatggcaggactgtgccaagcgacgtggtgattttccctagctctgactcccaggcccacccccctgagttgctcttcagtgcttccttgccagctcttggtttttccacctactccgtggcgcaagtcccaagatggaaaccgcaggcccgcgcccctcagccaatcccgcgccgctcctggagcccggctctgactatcgaaaacgagcacattagggctactttcgaccctgacaccggcctactgatggagatcatgaacatgaaccaacagctcttactgcccgtgaggcagacattcttctggtacaacgcaagcatcggcgataatgaatcagaccaggcttccggggcctatatcttccgcccaaatcagcagaagccccttccagtgagtcgatgggcccagatccacctcgtgaagactccactcgttcaagaagttcaccagaacttctccgcctggtgtagccaggtcgttagactgtacccaggacagcgtcaccttgaactggagtggagcgtgggtccaattcccgtgggggatacttggggtaaggaagtgatctccaggtttgacacgccactggagaccaaggggagattttacacagattcgaacggacgggaaatcctggaacgcaggagagattaccggccgacgtggaagctaaaccagactgagccagtcgccggaaattattaccccgtaaacacacgaatatacatcacagacggcaacatgcagctcacagttcttaccgacagaagtcagggagggagttccctccgggatgggtccctcgaattgatggtgcaccgtaggctgctgaaggacgacggaaggggcgtgtctgaacccctgatggagaacgggtctggcgcatgggtgaggggcaggcacttagtgctgctggacactgcgcaggcagcggcagctgggcaccgcctgctggctgaacaggaggtcttagcccctcaagtggtcttggctcctggcggcggcgcagcctataatctaggtgctcccccacgcacccagttcagtggcctgcgacgagacctccccccatcagtgcacctcctcacactggcttcgtggggcccagaaatggtcctgctacgactggaacaccagttcgcggtcggcgaggatagtggccggaacctctccgcacccgtgaccctgaacctgcgggatttgttctcaacgttcactataacccggctccaggaaaccacgttggtggcaaaccagctgagggaggctgcatcccgcctgaagtggacaacgaacaccggaccaacgccccaccagaccccctaccaattggatccagctaacattacactggaacctatggagatccggacctttctagcatccgtgcagtggaaggaggtggacggg

SEQ ID NO: 11655 - DNA, 3033 bp, Artificial Sequence
  derived and/or modified sequence
atgggtgcgtatgcgcgtgcgtcgggtgtatgtgcgcgaggttgtttagattcggcgggtccgtggacgatgtcgcgagcgctacgtccgccgctaccgccgttatgtttttttctattactattagcggcggcgggtgcgcgtgcgggtggttatgaaacgtgtccgacggttcaaccgaatatgttaaatgtacatctattaccgcatacgcatgatgatgtaggttggttaaaaacggtagatcaatatttttatggtataaaaaatgatatacaacatgcgggtgtacaatatatattagattcggttatatcggcgctactagcggatccgacgcgacgatttatatatgttgaaatagcgtttttttcgcgttggtggcatcaacaaacgaatgcgacgcaagaagttgtacgtgatttagttcgacaaggtcgtttagaatttgcgaatggtggttgggtaatgaatgatgaagcggcgacgcattatggtgcgatagtagatcaaatgacgctaggtttacgatttttagaagatacgtttggtaatgatggtcgtccgcgagttgcgtggcatatagatccgtttggtcattcgcgtgaacaagcgtcgttatttgcgcaaatgggttttgatggttttttttttggtcgactagattatcaagataaatgggtacgtatgcaaaaattagaaatggaacaagtatggcgtgcgtcgacgtcgctaaaaccgccgacggcggatttatttacgggtgtattaccgaatggttataatccgccgcgtaatctatgttgggatgtactatgtgtagatcaaccgttagtagaagatccgcgttcgccggaatataatgcgaaagaactagttgattattttctaaatgttgcgacggcgcaaggtcgatattatcgtacgaatcatacggtaatgacgatgggttcggattttcaatatgaaaatgcgaatatgtggtttaaaaatctagataaactaatacgattagtaaatgcgcaacaagcgaaaggttcgtcggtacatgtactatattcgacgccggcgtgttatttatgggaactaaataaagcgaatttaacgtggtcggtaaaacatgatgatttttttccgtatgcggatggtccgcatcaattttggacgggttatttttcgtcgcgaccggcgctaaaacgttatgaacgtttatcgtataattttttacaagtttgtaatcaattagaagcgttagtaggtttagcggcgaatgtaggtccgtatggttcgggtgattcggcgccgttaaatgaagcgatggcggttttacaacatcatgatgcggtatcgggtacgtcgcgacaacatgttgcgaatgattatgcgcgtcaattagcggcgggttggggtccgtgtgaagttctactatcgaatgcgttagcgcgactacgtggttttaaagatcattttacgttttgtcaacaattaaatatatcgatatgtccgctatcgcaaacggcggcgcgatttcaagttatagtttataatccgctaggtcgtaaagttaattggatggtacgtttaccggtttcggaaggtgtatttgtagttaaagatccgaatggtcgaacggttccgtcggatgttgtaatatttccgtcgtcggattcgcaagcgcatccgccggaattactattttcggcgtcgttaccggcgctaggtttttcgacgtattcggtagcgcaagtaccgcgttggaaaccgcaagcgcgtgcgccgcaaccgataccgcgtcgatcgtggtcgccggcgttaacgatagaaaatgaacatatacgtgcgacgtttgatccggatacgggtctattaatggaaataatgaatatgaatcaacaattactattaccggttcgacaaacgtttttttggtataatgcgtcgataggtgataatgaatcggatcaagcgtcgggtgcgtatatatttcgtccgaatcaacaaaaaccgctaccggtttcgcgttgggcgcaaatacatctagttaaaacgccgttagttcaagaagtacatcaaaatttttcggcgtggtgttcgcaagtagtacgattatatccgggtcaacgtcatttagaactagaatggtcggtaggtccgataccggtaggtgatacgtggggtaaagaagtaatatcgcgatttgatacgccgttagaaacgaaaggtcgattttatacggattcgaatggtcgagaaatactagaacgtcgtcgtgattatcgtccgacgtggaaattaaatcaaacggaaccggtagcgggtaattattatccggtaaatacgcgaatatatataacggatggtaatatgcaactaacggtattaacggatcgttcgcaaggtggttcgtcgctacgtgatggttcgttagaattaatggttcatcgtcgactattaaaagatgatggtcgaggtgtatcggaaccgttaatggaaaatggttcgggtgcgtgggtacgtggtcgtcatctagttctattagatacggcgcaagcggcggcggcgggtcatcgattactagcggaacaagaagtactagcgccgcaagtagtactagcgccgggtggtggtgcggcgtataatttaggtgcgccgccgcgaacgcaattttcgggtctacgacgtgatctaccgccgtcggtacatctactaacgttagcgtcgtggggtccggaaatggtattactacgtctagaacatcaatttgcggttggtgaagattcgggtcgaaatttatcggcgccggtaacgttaaatctacgtgatttattttcgacgtttacgataacgcgattacaagaaacgacgttagtagcgaatcaactacgagaagcggcgtcgcgactaaaatggacgacgaatacgggtccgacgccgcatcaaacgccgtatcaattagatccggcgaatataacgctagaaccgatggaaatacgtacgtttttagcgtcggttcaatggaaagaagttgatggt

SEQ ID NO: 11656 - DNA, 3036 bp, Artificial Sequence
  derived and/or modified sequence
atgggcgcctacgccagagccagcggcgtgtgcgccagaggctgcctggacagcgccggcccctggaccatgagcagagccctgagaccccccctgccccccctgtgcttcttcctgctgctgctggccgccgccggcgccagagccggcggctacgagacctgccccaccgtgcagcccaacatgctgaacgtgcacctgctgccccacacccacgacgacgtgggctggctgaagaccgtggaccagtacttctacggcatcaagaacgacatccagcacgccggcgtgcagtacatcctggacagcgtgatcagcgccctgctggccgaccccaccagaagattcatctacgtggagatcgccttcttcagcagatggtggcaccagcagaccaacgccacccaggaggtggtgagagacctggtgagacagggcagactggagttcgccaacggcggctgggtgatgaacgacgaggccgccacccactacggcgccatcgtggaccagatgaccctgggcctgagattcctggaggacaccttcggcaacgacggcagacccagagtggcctggcacatcgaccccttcggccacagcagagagcaggccagcctgttcgcccagatgggcttcgacggcttcttcttcggcagactggactaccaggacaagtgggtgagaatgcagaagctggagatggagcaggtgtggagagccagcaccagcctgaagccccccaccgccgacctgttcaccggcgtgctgcccaacggctacaacccccccagaaacctgtgctgggacgtgctgtgcgtggaccagcccctggtggaggaccccagaagccccgagtacaacgccaaggagctggtggactacttcctgaacgtggccaccgcccagggcagatactacagaaccaaccacaccgtgatgaccatgggcagcgacttccagtacgagaacgccaacatgtggttcaagaacctggacaagctgatcagactggtgaacgcccagcaggccaagggcagcagcgtgcacgtgctgtacagcacccccgcctgctacctgtgggagctgaacaaggccaacctgacctggagcgtgaagcacgacgacttcttcccctacgccgacggcccccaccagttctggaccggctacttcagcagcagacccgccctgaagagatacgagagactgagctacaacttcctgcaggtgtgcaaccagctggaggccctggtgggcctggccgccaacgtgggcccctacggcagcggcgacagcgcccccctgaacgaggccatggccgtgctgcagcaccacgacgccgtgagcggcaccagcagacagcacgtggccaacgactacgccagacagctggccgccggctggggcccctgcgaggtgctgctgagcaacgccctggccagactgagaggcttcaaggaccacttcaccttctgccagcagctgaacatcagcatctgccccctgagccagaccgccgccagattccaggtgatcgtgtacaaccccctgggcagaaaggtgaactggatggtgagactgcccgtgagcgagggcgtgttcgtggtgaaggaccccaacggcagaaccgtgcccagcgacgtggtgatcttccccagcagcgacagccaggcccacccccccgagctgctgttcagcgccagcctgcccgccctgggcttcagcacctacagcgtggcccaggtgcccagatggaagccccaggccagagccccccagcccatccccagaagaagctggagccccgccctgaccatcgagaacgagcacatcagagccaccttcgaccccgacaccggcctgctgatggagatcatgaacatgaaccagcagctgctgctgcccgtgagacagaccttcttctggtacaacgccagcatcggcgacaacgagagcgaccaggccagcggcgcctacatcttcagacccaaccagcagaagcccctgcccgtgagcagatgggcccagatccacctggtgaagacccccctggtgcaggaggtgcaccagaacttcagcgcctggtgcagccaggtggtgagactgtaccccggccagagacacctggagctggagtggagcgtgggccccatccccgtgggcgacacctggggcaaggaggtgatcagcagattcgacacccccctggagaccaagggcagattctacaccgacagcaacggcagagagatcctggagagaagaagagactacagacccacctggaagctgaaccagaccgagcccgtggccggcaactactaccccgtgaacaccagaatctacatcaccgacggcaacatgcagctgaccgtgctgaccgacagaagccagggcggcagcagcctgagagacggcagcctggagctgatggtgcacagaagactgctgaaggacgacggcagaggcgtgagcgagcccctgatggagaacggcagcggcgcctgggtgagaggcagacacctggtgctgctggacaccgcccaggccgccgccgccggccacagactgctggccgagcaggaggtgctggccccccaggtggtgctggcccccggcggcggcgccgcctacaacctgggcgccccccccagaacccagttcagcggcctgagaagagacctgccccccagcgtgcacctgctgaccctggccagctggggccccgagatggtgctgctgagactggagcaccagttcgccgtgggcgaggacagcggcagaaacctgagcgcccccgtgaccctgaacctgagagacctgttcagcaccttcaccatcaccagactgcaggagaccaccctggtggccaaccagctgagagaggccgccagcagactgaagtggaccaccaacaccggccccaccccccaccagaccccctaccagctggaccccgccaacatcaccctggagcccatggagatcagaaccttcctggccagcgtgcagtggaaggaggtggacggctag

SEQ ID NO: 11657 - DNA, 2853 bp, Artificial Sequence
  derived and/or modified sequence
atgctgaacgtgcacctgctgccccacacccacgacgacgtgggctggctgaagaccgtggaccagtacttctacggcatcaagaacgacatccagcacgccggcgtgcagtacatcctggacagcgtgatcagcgccctgctggccgaccccaccagaagattcatctacgtggagatcgccttcttcagcagatggtggcaccagcagaccaacgccacccaggaggtggtgagagacctggtgagacagggcagactggagttcgccaacggcggctgggtgatgaacgacgaggccgccacccactacggcgccatcgtggaccagatgaccctgggcctgagattcctggaggacaccttcggcaacgacggcagacccagagtggcctggcacatcgaccccttcggccacagcagagagcaggccagcctgttcgcccagatgggcttcgacggcttcttcttcggcagactggactaccaggacaagtgggtgagaatgcagaagctggagatggagcaggtgtggagagccagcaccagcctgaagccccccaccgccgacctgttcaccggcgtgctgcccaacggctacaacccccccagaaacctgtgctgggacgtgctgtgcgtggaccagcccctggtggaggaccccagaagccccgagtacaacgccaaggagctggtggactacttcctgaacgtggccaccgcccagggcagatactacagaaccaaccacaccgtgatgaccatgggcagcgacttccagtacgagaacgccaacatgtggttcaagaacctggacaagctgatcagactggtgaacgcccagcaggccaagggcagcagcgtgcacgtgctgtacagcacccccgcctgctacctgtgggagctgaacaaggccaacctgacctggagcgtgaagcacgacgacttcttcccctacgccgacggcccccaccagttctggaccggctacttcagcagcagacccgccctgaagagatacgagagactgagctacaacttcctgcaggtgtgcaaccagctggaggccctggtgggcctggccgccaacgtgggcccctacggcagcggcgacagcgcccccctgaacgaggccatggccgtgctgcagcaccacgacgccgtgagcggcaccagcagacagcacgtggccaacgactacgccagacagctggccgccggctggggcccctgcgaggtgctgctgagcaacgccctggccagactgagaggcttcaaggaccacttcaccttctgccagcagctgaacatcagcatctgccccctgagccagaccgccgccagattccaggtgatcgtgtacaaccccctgggcagaaaggtgaactggatggtgagactgcccgtgagcgagggcgtgttcgtggtgaaggaccccaacggcagaaccgtgcccagcgacgtggtgatcttccccagcagcgacagccaggcccacccccccgagctgctgttcagcgccagcctgcccgccctgggcttcagcacctacagcgtggcccaggtgcccagatggaagccccaggccagagccccccagcccatccccagaagaagctggagccccgccctgaccatcgagaacgagcacatcagagccaccttcgaccccgacaccggcctgctgatggagatcatgaacatgaaccagcagctgctgctgcccgtgagacagaccttcttctggtacaacgccagcatcggcgacaacgagagcgaccaggccagcggcgcctacatcttcagacccaaccagcagaagcccctgcccgtgagcagatgggcccagatccacctggtgaagacccccctggtgcaggaggtgcaccagaacttcagcgcctggtgcagccaggtggtgagactgtaccccggccagagacacctggagctggagtggagcgtgggccccatccccgtgggcgacacctggggcaaggaggtgatcagcagattcgacacccccctggagaccaagggcagattctacaccgacagcaacggcagagagatcctggagagaagaagagactacagacccacctggaagctgaaccagaccgagcccgtggccggcaactactaccccgtgaacaccagaatctacatcaccgacggcaacatgcagctgaccgtgctgaccgacagaagccagggcggcagcagcctgagagacggcagcctggagctgatggtgcacagaagactgctgaaggacgacggcagaggcgtgagcgagcccctgatggagaacggcagcggcgcctgggtgagaggcagacacctggtgctgctggacaccgcccaggccgccgccgccggccacagactgctggccgagcaggaggtgctggccccccaggtggtgctggcccccggcggcggcgccgcctacaacctgggcgccccccccagaacccagttcagcggcctgagaagagacctgccccccagcgtgcacctgctgaccctggccagctggggccccgagatggtgctgctgagactggagcaccagttcgccgtgggcgaggacagcggcagaaacctgagcgcccccgtgaccctgaacctgagagacctgttcagcaccttcaccatcaccagactgcaggagaccaccctggtggccaaccagctgagagaggccgccagcagactgaagtggaccaccaacaccggccccaccccccaccagaccccctaccagctggaccccgccaacatcaccctggagcccatggagatcagaaccttcctggccagcgtgcagtggaaggaggtggacggctag

SEQ ID NO: 11658 - DNA, 3036 bp, Artificial Sequence
  derived and/or modified sequence
atgggggcctacgccagagcaagtggcgtctgtgcacggggctgtctggacagcgccgggccatggactatgtctcgggccctccggccccccttgcccccactatgcttcttcctgcttctcctggcagcagctggagcccgcgctggggggtacgaaacctgtcccacagttcaacccaacatgctgaatgtccacctacttcctcatacccatgacgatgtcggctggctaaagacagtggatcaatacttctacggaattaagaacgatatccagcacgcaggtgtacagtatatccttgacagcgttattagtgctctgcttgctgatccgaccaggcgattcatttatgtagaaattgcttttttctcacgctggtggcaccagcagacaaatgctacgcaggaggttgtcagggatctcgtccgccagggcagactcgagtttgccaatggtggctgggtaatgaacgatgaggctgccacccactatggggctattgtggatcagatgacgcttggccttagatttctcgaagataccttcggcaatgacggtcgcccacgcgtcgcctggcatattgatccttttggacactctagagaacaagcctctctgttcgctcagatgggttttgatgggtttttcttcggcagactggactaccaggacaagtgggtgagaatgcagaagctggaaatggaacaggtttggcgagccagcacctcgctgaagcctcctactgcagacctctttaccggtgttctccctaacggctataacccaccccgcaacctgtgttgggatgtcctctgcgtagaccaaccattggtcgaagatcccagaagccccgaatacaatgctaaggaactggtcgactactttctcaacgtcgcgacagcccaaggccggtattaccggaccaatcacactgttatgactatgggctctgactttcagtacgagaacgcaaacatgtggtttaagaatttggacaagctcataaggttggtcaacgcacagcaggcaaaggggtccagcgtgcacgtcttatatagtacgcccgcatgctacctttgggagctcaataaggccaatctaacttggagtgtgaaacatgacgacttcttcccatacgccgatgggccccaccagttttggaccggatattttagctcccgacctgctcttaaaagatatgagagactgtcctacaatttccttcaagtttgcaatcagctggaagcactggtcggtctggccgcgaacgttgggccctatgggtcaggtgattccgcccccctgaacgaggcaatggccgtactgcagcaccatgatgccgtcagtggtacttcacgccagcatgtggcaaacgattacgcccggcagctggctgcagggtggggcccttgcgaggtgcttctgagcaatgcactggctaggctgcgggggttcaaggaccattttacattctgccagcagttgaacatatctatctgccccctgagtcagacggcagcacggtttcaggtcatcgtctataacccgctgggcagaaaagtcaactggatggtccggctgcctgtctcagaaggcgtcttcgtagtcaaagaccccaacggtagaacggtcccttccgatgtggtgatcttcccaagtagtgactcccaggcacacccccctgaactgttatttagtgcctctctgccagctttggggttcagcacctattctgtggcccaggtacctcgctggaagccacaggcccgggccccgcagcctattccgcgccgcagctggtctcccgcactcactatcgagaacgagcacatacgtgcaacctttgatcccgacaccggtcttcttatggaaataatgaatatgaaccaacaactgctcttgcctgtgcggcagacattcttctggtataatgccagtatcggtgacaatgaatcagatcaggcctctggcgcctatatatttcgaccaaatcaacagaaaccactcccggtaagccgatgggcccagattcatcttgtgaagacccccctggtgcaagaagtgcaccaaaatttcagcgcctggtgctctcaggtggtgagactgtaccctggacagcggcacctagaattggagtggagcgtcggacctatcccggtaggagacacctggggtaaggaggttatcagtagattcgatacaccattggaaacaaaggggaggttctacactgattctaacggtagggagatcctagagagacggcgagattaccgaccaacgtggaaactcaatcagactgagcccgtggctggaaactactaccctgtgaacactaggatctatatcacagacggcaatatgcagctgaccgtcctaactgatcgctcacagggcggatcttcactccgcgacggtagcctggagctcatggttcacaggaggctgctcaaggacgacgggcgaggcgtgtccgagccgttgatggagaatggtagtggcgcctgggtgcgtggtcgtcacctggtcctgctcgatacggctcaggccgctgcggctgggcacagactcttagccgagcaggaagtactggccccccaagtcgtcctggcccccgggggcggggccgcctacaatctcggggcccccccacggacccagtttagcggtctgagaagagatctgcccccatccgtacacctgctgacgctggctagctggggaccagaaatggtgctgttgcgacttgagcaccagttcgccgtcggggaagacagcggcaggaatctaagtgctcctgttacccttaatctgcgcgacctgtttagtacttttaccattacccgtctgcaagaaactacgctagtggctaatcagctgcgcgaagcagcatcaaggctgaaatggaccacaaacaccgggcctactcctcatcaaactccctatcagttggaccccgctaacataaccctcgaacccatggaaattcggaccttccttgcctcagtacagtggaaggaggtagatgggtag

SEQ ID NO: 11659 - DNA, 2853 bp, Artificial Sequence
  derived and/or modified sequence
atgctgaatgtgcaccttctccctcacacccacgatgatgtcggttggctcaagaccgtggaccaatacttctacggtatcaagaatgatatccaacacgctggcgtgcaatatatcctggattctgtgatttctgctctgcttgcagacccaactcggcggttcatctatgtggaaattgcgttcttctctagatggtggcatcaacagacaaacgccacacaggaagtggttagagacttagtcagacagggcaggctggagttcgcaaacgggggatgggtcatgaatgatgaggctgcgactcactatggagccattgtggaccagatgacactcgggctccgcttcctcgaagacacttttggcaacgatggtagaccccgagttgcttggcacattgatccttttgggcattctcgggaacaggcaagtctttttgcgcagatggggtttgacgggtttttcttcggacgcctcgattaccaggacaaatgggtgcgaatgcagaaactcgagatggaacaagtttggagagcatcaacctccctaaaaccaccaacagccgacttgtttaccggtgtgttgcccaacggctacaatccccccaggaatctatgctgggacgtgctatgcgtcgaccaaccgctggtggaggaccctcgcagccctgaatacaatgccaaagaactagtcgattatttcctgaacgtcgctacagcccagggaaggtactaccgcaccaatcacaccgtgatgaccatgggaagcgacttccagtatgaaaacgccaacatgtggtttaaaaatcttgacaaactgatccggctggtgaacgcgcaacaggcaaaggggagcagtgtgcatgtgctgtatagcacccccgcgtgttacctgtgggaactgaataaagctaatctgacatggtctgtgaaacatgacgacttctttccttatgctgacggcccccatcaattttggacaggatacttctcatcacgtccggcacttaaacgctacgaacggctgagctacaattttctgcaggtttgtaatcagctggaggctctggtcggcctcgctgcgaacgttggcccctacggatctggtgacagtgcgccgctaaacgaggcaatggcagtcctgcagcatcatgatgctgtgtctggtacatcacgacaacacgtcgctaacgactacgctaggcaactggccgcggggtggggaccctgcgaagtcctgctgtctaatgcactggctaggctacggggattcaaagatcattttactttttgccaacaactgaatatctctatttgccctctctcacagacagcagcacgattccaggtgatagtgtataatccactgggccgaaaagtgaattggatggtgcgcctgccagttagtgaaggggtgttcgtggtgaaggacccgaatggaaggactgtgccatcagacgtcgtgatattccctagcagtgattcgcaggcacatccccccgagctgctcttctctgcaagtttacccgccctggggttctcaacatactccgtagctcaggttccccggtggaaaccacaggcccgagctccacagccaattcctagaaggtcttggagtccagccctcaccatagaaaatgagcatataagagcgacatttgatccagataccggtctgctcatggagatcatgaacatgaaccagcagctgctgctccctgttcgccaaacgtttttttggtacaacgcatcgattggggataacgagtctgaccaggcctctggggcttacatttttcgaccaaaccaacaaaagcctctccctgtgagccggtgggctcagatccacctagtcaaaacccccctggtgcaagaggtccaccaaaacttcagcgcttggtgtagccaggtcgttcgtctgtatccgggtcaaaggcatcttgaactggagtggtccgtcggccctattcctgtgggcgacacctggggtaaggaagtgatttccaggtttgacacgcctctcgagaccaaaggtcgcttctataccgattccaacggtagagaaattctcgaacgcagaagggactatcgcccaacttggaaactgaaccagactgaacctgtagctggcaattactaccccgtcaatactagaatctatataactgatggcaacatgcagctgactgtgctgaccgataggtcacagggaggaagtagcttgcgagatggcagcctcgagctcatggtgcatcgccgcctactcaaggacgacggacgcggagtctccgagccactcatggagaatggtagcggtgcttgggtgcgtggacgacaccttgtccttctcgacaccgcacaggccgcggcagcaggccatagattactcgctgaacaagaggtgctggctcctcaggttgtcttggcccccggtggcggagctgcatacaatctgggagctcccccaagaacccagttctcaggcctccgcagggacttgcccccaagcgtgcatttgctgacactcgctagttgggggccggagatggttctgttacgattagagcaccagtttgccgttggcgaggacagcgggcgtaacctgtccgccccagtcacactgaacttaagggatctgttcagcacgttcacaattactcgtctgcaagaaaccaccttagtggccaatcagttaagggaggcagcctccaggcttaaatggaccacgaatacaggacctacccctcatcagactccatatcagctggaccccgctaatatcactctagagcccatggaaattcgcacttttttagccagtgtgcagtggaaggaagtcgacggatag

SEQ ID NO: 11660 - DNA, 3036 bp, Artificial Sequence
  derived and/or modified sequence
atgggcgcctatgcccgggccagcggcgtgtgtgcccggggctgcctggacagcgctggcccctggaccatgagccgggccctgcggccccccctgccccccctgtgcttcttcctgctgctgctggccgctgctggggcccgggccggcggctatgagacctgccccaccgtgcagcccaacatgctgaatgtgcacctgctgccccacacccatgatgatgtgggctggctgaagacagtggaccagtacttctacggcatcaagaatgacatccagcacgccggcgtgcagtacatcctggacagcgtcatcagcgccctgctggccgaccccacccggcgcttcatctacgtggagatcgccttcttcagccgctggtggcaccagcagaccaatgccacccaggaggtggtgcgggacctggtgcggcagggccgcctggagtttgccaacggcggctgggtgatgaatgatgaagctgccacccactatggagccatcgtggaccagatgaccctgggcctgcgcttcctggaggacacctttggaaatgatggccggccccgggtggcctggcacatcgaccccttcggccacagccgggagcaggccagcctgtttgcccagatgggctttgatggcttcttcttcggccgcctggactaccaggacaagtgggtgaggatgcagaagctggagatggagcaggtgtggagggccagcaccagcctgaagcccccaacagctgacctcttcaccggggtgctgcccaacggctacaaccccccaagaaacctgtgctgggatgtgctgtgtgtggaccagcccctggtggaggaccccaggagccctgagtacaatgccaaggagctggtggactacttcctgaatgtggccacagcccagggccgctactaccgcaccaaccacacagtgatgaccatgggcagtgacttccagtatgaaaatgccaacatgtggttcaagaacctggacaagctgatccggctggtgaatgcccagcaggccaagggcagctctgtgcacgtgctgtacagcaccccagcctgctacctgtgggagctgaacaaggccaacctgacctggagcgtgaagcatgatgacttcttcccctatgcagatggcccccaccagttctggacaggctacttcagcagcaggcctgccctgaagagatatgagcggctgagctacaacttcctgcaggtgtgcaaccagctggaggccctggtgggcctggccgccaacgtgggcccctacggcagcggggacagcgcccccctgaatgaggccatggctgtgctgcagcaccatgatgctgtgtctggcaccagccggcagcacgtggccaatgactatgcccggcagctggccgccggctggggcccctgtgaggtgctgctgagcaatgccctggcccggctgcggggcttcaaggaccacttcaccttctgccagcagctgaacatcagcatctgccccctgagccagacagctgcccgcttccaggtgattgtgtacaaccccctgggcaggaaggtgaactggatggtgcggctgcctgtgtctgaaggagtgtttgtggtgaaggaccccaatggaagaacagtgcccagtgatgtggtgatcttccccagcagtgacagccaggcccaccccccagagctgctcttcagcgccagcctgcctgccctgggcttcagcacctacagcgtggcccaggtgccccgctggaagccccaggcccgggccccccagcccatcccccggcgctcctggagccctgccctgaccattgaaaatgagcacatccgggccacctttgatcctgacaccggcctgctgatggagatcatgaacatgaaccagcagctgctgctgcctgtgcggcagaccttcttctggtacaatgccagcatcggggacaatgaaagtgaccaggccagcggggcctacatcttccggcccaaccagcagaagcccctgcctgtgagccgctgggcccagatccacctggtgaagacccccctggtgcaggaggtgcaccagaacttcagcgcctggtgcagccaggtggtgcggctgtacccaggccagaggcacctggagctggagtggagcgtgggccccatccctgtgggggacacctggggcaaggaggtgatcagcagatttgacacccccctggagaccaagggccgcttctacacagacagcaatggccgggagatcctggagcggcggcgggactaccggcccacctggaagctgaaccagacagagcctgtggccggcaactactaccctgtgaacacccgcatctacatcacagatggcaacatgcagctgactgtgctgacagacaggagccagggcggcagcagcctgagagatggcagcctggagctgatggtgcaccggcggctgctgaaggatgatggccggggcgtgtctgagcccctgatggagaatggcagcggggcctgggtgcggggccgccacctggtgctgctggacacagcccaggccgctgctgctggccaccggctgctggccgagcaggaggtgctggccccccaggtggtgctggcccctgggggcggggccgcctacaacctgggcgccccacccaggacccagttcagcggcctgcggcgggacctgcccccatctgtgcacctgctgaccctggcctcctggggccctgagatggtgctgctgcggctggagcaccagtttgctgtgggagaagattctggaagaaacctgagcgcccctgtgaccctgaacctgcgggacctcttcagcaccttcaccatcacccggctgcaggagaccaccctggtggccaaccagctgcgggaggccgccagccggctgaagtggaccaccaacacaggccccaccccccaccagaccccctaccagctggaccctgccaacatcaccctggagcccatggagatccgcaccttcctggcctctgtgcagtggaaggaggtggatggatag

SEQ ID NO: 11661 - DNA, 2853 bp, Artificial Sequence
  derived and/or modified sequence
atgctgaatgtgcacctgctgccccacacccatgatgatgtgggctggctgaagacagtggaccagtacttctacggcatcaagaatgacatccagcacgccggcgtgcagtacatcctggacagcgtcatcagcgccctgctggccgaccccacccggcgcttcatctacgtggagatcgccttcttcagccgctggtggcaccagcagaccaatgccacccaggaggtggtgcgggacctggtgcggcagggccgcctggagtttgccaatggaggctgggtgatgaatgatgaggccgccacccactacggggccatcgtggaccagatgaccctgggcctgcgcttcctggaggacacctttggaaatgatggccggccccgggtggcctggcacatcgaccccttcggccacagccgggagcaggccagcctgtttgcccagatgggctttgatggcttcttcttcggccgcctggactaccaggacaagtgggtgaggatgcagaagctggagatggagcaggtgtggagggccagcaccagcctgaagccacccacagctgacctcttcaccggggtgctgcccaacggctacaacccccccaggaacctgtgctgggatgtgctgtgtgtggaccagcccctggtggaggaccccaggagccctgagtacaatgccaaggagctggtggactacttcctgaatgtggccacagcccagggccgctactaccgcaccaaccacacagtgatgaccatgggcagtgacttccagtatgaaaatgccaacatgtggttcaagaacctggacaagctgatccggctggtgaatgcccagcaggccaagggcagctctgtgcacgtgctgtacagcaccccagcctgctacctgtgggagctgaacaaggccaacctgacctggagcgtgaagcatgatgacttcttcccctatgcagatggcccccaccagttctggacaggctacttcagcagcaggcctgccctgaagagatatgaaaggctgagctacaacttcctgcaggtgtgcaaccagctggaggccctggtgggcctggccgccaacgtgggcccctacggcagcggggacagcgcccccctgaatgaggccatggctgtgctgcagcaccatgatgctgtgtctggcaccagccggcagcacgtggccaatgactatgcccggcagctggccgccggctggggcccctgtgaggtgctgctgagcaatgccctggcccggctgcggggcttcaaggaccacttcaccttctgccagcagctgaacatcagcatctgccccctgagccagacagctgcccgcttccaggtgattgtgtacaaccccctgggcaggaaggtgaactggatggtgcggctgcctgtgtctgagggcgtgtttgtggtgaaggaccccaacggccgcacagtgcccagtgatgtggtgatcttccccagcagtgacagccaggcccaccccccagagctgctcttcagcgccagcctgcctgccctgggcttcagcacctacagcgtggcccaggtgccccgctggaagccccaggcccgggccccccagcccatccccaggaggtcctggagccctgccctgaccattgaaaatgagcacatccgggccacctttgatcctgacaccggcctgctgatggagatcatgaacatgaaccagcagctgctgctgcctgtgcggcagaccttcttctggtacaatgccagcattggagacaatgaaagtgaccaggccagcggggcctacatcttccggcccaaccagcagaagcccctgcctgtgagccgctgggcccagatccacctggtgaagacccccctggtgcaggaggtgcaccagaacttcagcgcctggtgcagccaggtggtgcggctgtacccaggccagaggcacctggagctggagtggagcgtgggccccatccctgtgggggacacctggggcaaggaggtgatcagcagatttgacacccccctggagaccaagggccgcttctacacagacagcaatggccgggagatcctggagaggagaagagactaccggcccacctggaagctgaaccagacagagcctgtggccggcaactactaccctgtgaacacccgcatctacatcacagatggcaacatgcagctgactgtgctgacagacaggagccagggcggcagcagcctgagagatggcagcctggagctgatggtgcaccggcggctgctgaaggatgatggccggggcgtgtctgagcccctgatggagaatggaagtggggcctgggtgcggggccgccacctggtgctgctggacacagcccaggccgctgctgctggccaccggctgctggccgagcaggaggtgctggccccccaggtggtgctggcccctgggggcggggccgcctacaacctgggcgccccacccaggacccagttcagcggcctgcggcgggacctgccccccagcgtgcacctgctgaccctggcctcctggggccctgagatggtgctgctgcggctggagcaccagtttgctgtgggggaggacagcggcaggaacctgagcgcccctgtgaccctgaacctgcgggacctcttcagcaccttcaccatcacccggctgcaggagaccaccctggtggccaaccagctgcgggaggccgccagccggctgaagtggaccaccaacacaggccccaccccccaccagaccccctaccagctggaccctgccaacatcaccctggagcccatggagatccgcaccttcctggcctctgtgcagtggaaggaggtggatggatag

SEQ ID NO: 11662 - DNA, 3036 bp, Artificial Sequence
  derived and/or modified sequence
atgggcgcctacgcccgggccagcggcgtgtgcgcccggggctgcctggacagtgcgggaccatggactatgagccgtgcccttcggccccccctgccacccttgtgtttttttctcctgctccttgcggccgccggagcacgagctggcggatatgagacttgcccaactgtccagcccaatatgctaaacgtgcacttgctgcctcatactcatgacgatgttggttggttgaagaccgtcgatcagtacttttacggaattaagaatgacattcaacatgccggtgttcaatacatactggattctgtcatctccgccctattggctgatccaactagacgattcatctacgtggaaattgctttcttctcaagatggtggcatcaacagacaaatgcaacacaagaagtggttagggatctggtgaggcagggacggcttgaatttgccaacggcggttgggtcatgaatgatgaagcggctacccactatggcgctattgtggaccagatgaccctggggctgcgctttttggaagacacatttggcaacgatgggcgaccacgcgtcgcatggcacattgatccatttggccacagtcgcgagcaggcttccctgttcgctcagatgggcttcgatggttttttctttggtaggcttgactaccaggacaagtgggtgcgtatgcagaagctggaaatggaacaagtctggcgcgcctccacatcactgaaaccaccaacagccgatctcttcaccggagtgttgccgaacgggtacaatccacctagaaacttgtgttgggacgtgctttgtgtggatcaaccgcttgtggaggacccccgctctcccgaatacaacgccaaagagttggtggactattttctaaacgtcgccacagcccagggacgatattaccgaacaaaccacactgtgatgacgatgggaagtgattttcagtacgagaatgccaatatgtggtttaaaaatcttgataaacttatccgcctggtgaatgcacagcaggcgaaagggtcttctgtacatgtgctatactctaccccagcttgttatttgtgggaactcaataaggcaaatttgacatggagcgtgaagcatgacgatttcttcccttatgccgacggccctcaccagttttggacgggctatttcagctccagaccagccctgaaacggtatgagcgcctgtcttataactttttgcaggtgtgtaatcaactggaagcgctggtgggacttgccgccaatgtgggcccatacggttcaggcgactcagccccccttaacgaagcaatggccgtgctgcagcatcacgacgctgtgtccggtaccagcaggcagcatgtggccaacgattacgctcgccagctggctgccggatggggaccatgcgaggttctccttagtaacgctctcgcccgcctgcgagggttcaaagatcactttacattctgtcagcagcttaatatctcaatctgtcctctatcccaaaccgctgctcgctttcaggtgatcgtgtacaacccactgggtcgaaaagttaactggatggtgcggttaccagtgtccgagggcgttttcgtggtgaaagatcccaatgggcgtacggtccctagcgacgtggtgatttttccctcaagcgatagccaggcccatcctccagaacttcttttctccgcatcgttaccagccctcggtttctctacctactctgtagcccaggtgcctaggtggaaaccacaggcacgtgcgccacagcccatccctagaagaagctggagccccgccctgacaatcgagaacgaacacatccgggcaacctttgatcccgatacgggtctgttgatggagataatgaatatgaaccagcagttactgctgcccgtccgacaaactttcttttggtacaacgcaagcatcggggataacgagtctgaccaggcatctggcgcttacattttccgcccaaaccagcagaaaccgctcccggttagccgttgggcacaaattcacctggtgaagacacctctagtgcaagaagtgcaccagaatttctcagcatggtgcagtcaggtagtgcggctttatcctggacagcgacatcttgagctcgagtggagcgtggggccaatacccgttggtgacacatggggaaaggaagtgatctctcggttcgatacaccgttagagaccaagggcagattttatacagacagtaacgggagggagatattagagaggcgaagggattacaggccgacttggaaactgaaccaaacagaacccgtagcgggcaattactatcctgtgaatacccggatctatattaccgacgggaatatgcaattgaccgttcttactgataggtctcagggtggaagttctctgcgtgacggaagtcttgagctaatggtgcatcgccgactgcttaaagacgatgggcgcggagtctctgaaccactgatggagaatggctcgggcgcttgggtacgggggcgccacctggtattgttggacaccgcacaggccgcagcagccggccaccgcctactggctgagcaggaagtgttggcgccacaggtcgtgctggcaccgggagggggcgcagcgtacaacctgggagctccacctagaactcaattctcaggtctgaggcgtgatttaccacccagcgtgcacttgctcacgttagcgagttgggggccggaaatggttctgttacggttagagcaccagtttgctgtaggtgaagatagcgggaggaaccttagcgcccccgtgaccctcaatttacgggacctgttttctaccttcactatcacaagactccaggagacaacactggtggctaaccagctgagagaggccgcctcacgcctgaaatggacaaccaataccggaccgacgccacatcagactccgtaccagctcgatccagccaatatcactctcgagcccatggagattcggactttcctggcctctgtacaatggaaagaggtggatggctag

SEQ ID NO: 11663 - DNA, 2853 bp, Artificial Sequence
  derived and/or modified sequence
atgctgaacgtgcacctgctgccccacacccacgacgacgtgggctggctaaaaactgtcgatcaatacttctacggcattaaaaatgacatacagcatgctggcgtccagtatatcctggatagtgtgatatctgctctgctagccgacccaactcggcgcttcatctacgttgaaattgctttcttttcccgttggtggcatcagcagaccaacgcgacgcaagaggtcgtgcgcgacctcgtccgccaaggtcgcctggagttcgctaacggtgggtgggttatgaacgacgaagctgcaacacactacggtgcaatcgtggaccagatgaccttgggtctcaggttcctggaagacacgttcggtaacgacgggcggccacgcgttgcgtggcatatcgatccatttgggcactcccgtgaacaagcctcactcttcgctcagatgggctttgacggcttttttttcggaaggctggattaccaggacaaatgggtgagaatgcagaagctcgagatggaacaagtctggcgggcgtccacctctctgaagccccctactgctgacctgttcactggcgttctccccaatggatataatcctccgaggaacttgtgttgggacgttctttgtgtggatcagccgctcgtcgaggacccaaggagtccggagtacaacgcgaaggagctcgtagactattttctgaacgtggcaactgcccagggacggtactatcgcactaaccacaccgttatgactatgggaagtgacttccaatacgagaatgctaacatgtggtttaagaacctggataagctcattcgtttggtgaacgctcagcaggccaaggggtccagcgtgcatgttctgtattcaacccctgcatgttacctgtgggagcttaataaagcaaaccttacctggtcagtcaagcatgacgactttttcccgtacgcggatggccctcatcagttctggaccggctacttcagctctagacccgctcttaagcgttatgagagactgtcctacaacttcctgcaggtttgcaaccaactagaagcactcgtcggcctggcagcaaacgtagggccctatggcagcggggattcagctcccttaaacgaggctatggccgttttgcagcatcatgatgctgtgtctggcaccagcagacagcacgtggccaacgattatgcgcggcagcttgcagccggctggggaccatgtgaggtactgctaagtaacgccctggccagactccgggggttcaaagaccactttacattctgtcaacagttaaatatttcaatttgtccactgtctcaaacagcggcccgttttcaggtcattgtgtacaatcccctgggcaggaaagttaactggatggtgcgactacctgtgtcagagggcgtcttcgtggtcaaggacccaaatggacgcaccgtcccttctgatgtggttatcttcccctcctctgactcgcaagcccatcctcccgagctcctgttcagcgcatccctccctgcactgggattcagcacatattcagtagcccaagtgccgagatggaaaccacaggccagagccccgcaaccaatccctcgccgctcttggtcacccgctctgactatcgagaacgaacatatccgcgctacattcgatccagacactggcctcctaatggagatcatgaatatgaatcagcagttactcctaccggtgaggcagacttttttctggtacaacgcctctatcggtgacaatgaatcagatcaggcatccggagcatatatcttcaggcccaaccaacagaaacctctgcccgtcagccggtgggctcagatccacttggtgaagactcctttagttcaggaagtccatcagaacttctctgcctggtgcagccaggttgtgaggctgtacccaggtcagagacatctagagcttgaatggagcgtagggccgatcccggtgggggatacgtggggtaaggaggtcatcagcagatttgatactcctctcgagacaaagggtaggttttataccgattccaacggccgcgaaatccttgagcggaggagggactaccgccctacttggaaactgaaccagacagaacccgtcgcaggaaactactacccagttaatacccgcatctacatcacagatggcaatatgcagcttactgtgctgacagaccgatcccaggggggctctagcctgagagacggatccctcgagctcatggttcaccgtcgcctgctaaaagatgacgggcgaggagtatctgaacccctcatggagaatggcagcggagcttgggtgagaggacggcatctggttttgcttgatactgcccaggcggccgctgcgggccacaggctgcttgctgaacaagaagtgctcgctccacaggttgtgttagctcccggcggcggcgctgcttataaccttggggctcccccgaggacccagttctccggcttgaggagagacttgccgccttctgtgcaccttctaaccctcgcgagctggggcccagagatggtgctgctgaggctcgaacatcagttcgctgtcggggaggattcaggccggaacctttccgcccctgtgacactcaatctgcgagacctgtttagcaccttcacaatcacccgcctgcaggaaactacactggtagcgaatcagctgcgggaagctgcatccaggctgaaatggaccacgaacaccggccccacccctcatcaaactccataccagttagacccagctaatattacgctggaaccaatggagatacgcacattcctcgccagtgtccagtggaaggaagtggatggctag

SEQ ID NO: 11664 - DNA, 3036 bp, Artificial Sequence
  derived and/or modified sequence
atgggggcatatgctagagcctccggcgtgtgtgcgcgtggatgcttggattctgccggaccgtggaccatgagcagagcgttaagaccgccactcccgcctttgtgtttttttctgttgctgcttgctgccgcaggtgcccgagcaggaggatatgagacttgtcctaccgtgcagcctaacatgctcaacgtgcatctgctgccgcatacccacgatgatgtggggtggctgaaaactgtggaccagtacttttatgggattaaaaatgacattcagcacgccggtgttcaatatattcttgattctgtgatttccgccctcttagcagatcccactcgaaggtttatatacgttgagatcgctttcttctcaaggtggtggcaccagcagacaaacgctacacaggaggtggtaagggacttggtgcgccagggacgcctagagttcgctaatggtggatgggttatgaatgatgaagcagcaacccactacggggctattgtagaccagatgacactggggctgaggttccttgaagatacctttggaaatgacggtcgaccgagggtggcctggcacattgacccatttgggcactctagagagcaagcaagcttgttcgctcaaatgggctttgacggctttttctttgggaggctggattatcaggataaatgggtcaggatgcagaagctggagatggagcaggtgtggcgcgcttcaacatcactcaagccgcctacagccgacctgttcaccggcgttctgcccaatggttacaacccacccaggaacctttgttgggatgtcctttgtgtagatcagcctcttgtggaggatcccagaagccccgagtacaacgccaaggagctggtcgactactttctgaacgttgccacagcgcagggcagatactaccggaccaatcacacggtgatgaccatgggcagcgacttccagtatgagaacgccaatatgtggtttaagaacttggacaaattgattcgcctggtgaacgcacagcaggctaaggggtcgagcgtccatgtgctctactcaactcccgcatgttatctatgggagttaaacaaggccaacctaacatggagcgtaaagcatgatgatttctttccatatgccgatgggccacatcaattttggacaggctatttttctagcagaccagcactcaagcggtacgagagactgagttataatttcttgcaagtatgtaaccagttggaggccttggtgggattagccgctaacgtgggcccatatggatctggagattctgctcccctgaacgaagccatggcggtgctgcagcaccatgacgctgttagtgggacctcgcgtcaacatgtggccaatgactatgccagacagcttgcagcaggctggggcccatgtgaggtcttgctttcaaatgctctggccagactccgcggtttcaaggaccacttcacattttgccagcagctgaatatctctatatgccccctctcacagaccgccgctaggttccaggtcattgtgtataatcccctcgggaggaaggtcaactggatggtgcggctgccagtgagcgaaggagtatttgtagtgaaggacccaaacggaaggacagtgcccagcgatgtagtcatctttccgtctagcgatagtcaggctcatcccccagagctgctgttctcagcctcgctccctgccttgggcttctccacttattcagtggcacaggttcctagatggaaacctcaggcaagggctccacagccaattccaagacgatcatggagccctgctctcaccatcgaaaacgaacacatacgggctacattcgaccctgacaccggccttcttatggagattatgaacatgaaccagcagttgctgctgccagttcgtcagaccttcttttggtataatgcctccatcggggataatgaatcggaccaggcttccggagcttacatctttcgtcccaatcagcagaaacccctgccggtatctcggtgggctcagatacaccttgttaaaacacccctggtgcaggaggtccaccaaaacttcagtgcatggtgttcacaggtcgtacgcctgtacccgggtcagcgacacctggagctggagtggagtgtgggaccgatccccgtaggcgacacttgggggaaggaggtcatttccaggtttgacacaccactggagaccaaaggacgattttacacagatagtaacggtagggagatactggaaaggcgacgcgattaccgtccgacatggaagctgaatcaaacagaacccgttgctggcaattattatcccgtcaacactaggatttacatcacagacggcaatatgcagctcacagtgttaacagaccggagccagggtggctcctccttgcgtgatggatctctcgagctgatggtacaccgcagactgctcaaagacgatggaaggggcgtttccgagcctctgatggagaatgggtctggcgcatgggtgcgtgggaggcatctggtgctattggatacagctcaggcagccgctgccggacataggctcttggccgaacaggaggttctggccccacaggttgtgttagcaccgggtggcggagccgcttacaacttaggcgctcccccaagaacgcagttttcaggactacgccgtgaccttccgccttccgtccatcttctgaccctggcatcttggggccctgagatggtgctcttacgccttgagcatcagtttgcggtgggagaggactctggcagaaatctgtcggctcccgtgactctgaatctcagagatctgttcagcactttcacgattacacgccttcaggagaccactctggtggcgaaccagctgcgggaggcggctagtaggctgaaatggacaactaacaccggccctacacctcaccagaccccctaccagctggatccagctaacatcacactagagccgatggaaattcgcacatttctcgcttctgtgcagtggaaagaggtggacggttag

SEQ ID NO: 11665 - DNA, 2853 bp, Artificial Sequence
  derived and/or modified sequence
atgctaaatgtacacctcctgcctcacactcacgacgacgtgggctggctgaaaactgtcgatcagtacttttatgggatcaaaaacgacattcagcacgctggcgtccaatacatactggacagtgtgatttccgcactgcttgccgatccgacacgaagatttatttatgtggaaatcgccttttttagccgttggtggcatcaacagacaaatgccacgcaagaggttgtccgggacctggtgcgacaaggacggctagaattcgctaatggcggttgggtaatgaatgacgaagctgctactcattacggggcaattgtggatcagatgactcttggactgaggtttctcgaggataccttcggcaatgatggtcgccctcgagtggcatggcatatagatccgtttgggcacagtcgcgaacaagcgtcactgttcgcccagatgggttttgacggattcttttttggtcgattagactatcaggacaaatgggttcgcatgcagaagttggaaatggagcaggtgtggcgcgcatcgacttcactgaagcccccaacagcagatttgttcaccggcgtgctgcccaatggctataacccacctagaaatctgtgttgggatgtgctctgcgtagaccagccactcgtggaagatcctcggtcccccgaatataatgccaaagaactggtggattatttcctgaacgtcgctacagctcagggacggtactatcgcacgaatcacacggtgatgaccatgggaagtgattttcagtacgaaaacgccaatatgtggtttaagaatctggacaaactgatcagactggtgaacgcacagcaggcaaagggaagctcggtccacgttttgtattccactcccgcttgttacttgtgggaactgaacaaagcaaacttgacttggtccgttaagcacgacgatttctttccatatgccgacggcccacaccagttttggactggctactttagttctcgcccagctctgaaacgctatgagcgcctgagttacaactttctgcaagtttgcaatcagttggaggcccttgtcggactggcggcaaatgtgggcccttatggatcgggcgacagtgccccactgaacgaggctatggctgtgttacagcatcacgacgctgtgtctgggacaagccgacaacacgtggctaacgactacgcccgtcagctggccgctggttggggcccatgtgaggtccttctaagcaacgcactcgcacgcctcaggggcttcaaggaccacttcacattctgccagcaattaaacatatcaatatgtccgctcagccagactgccgcacgttttcaagtgatcgtatacaaccctttgggtcgcaaggtgaattggatggtccgcctgcccgtcagtgagggtgtctttgtggtgaaggatccaaatggcaggactgtgccaagcgacgtggtgatctttccgtcctccgattcccaggcccacccgcctgagttactgttttccgcttcactacccgcactggggttttccacctacagcgtggcgcaggtgcccaggtggaagccccaggctagagcccctcaacctatccccagacgatcttggagcccagccctgaccattgaaaatgaacacatccgcgcaactttcgaccccgacacaggcctactgatggaaataatgaatatgaaccagcaactccttctcccagtgcggcagacttttttttggtacaatgcgagcattggagacaatgaaagcgaccaagcctccggagcttacatttttagaccaaatcagcaaaagcccctaccagttagtcgttgggctcagattcatcttgtcaaaaccccattagtccaggaggtacatcaaaatttctccgcttggtgctcccaggttgttagactatatcctggacagcggcatcttgaactggagtggagcgtggggccaatccctgttggggatacgtgggggaaggaagttattagtcgctttgatacacctctggaaacaaagggacggttttacaccgattctaacgggagggaaatactcgaacgtaggcgcgactatcgacctacgtggaagcttaaccagaccgagccagtcgccggaaattactatcctgtcaacacccgcatttacatcacagatgggaacatgcaactcacagtgctgactgatagaagccaaggtggcagctcgctgcgggacgggagcctcgagttaatggtacaccgcagacttcttaaggatgacggaagaggagtgtccgagccactgatggagaatggatccggagcttgggtacgtggtcgacatctggttctgctggatacggcacaggccgcagcagcaggccacaggttgctcgccgaacaggaggtcttagcccctcaggtcgtgttagctcctggcggaggagctgcctataatctgggcgctcctccaagaactcaattcagcgggctgcgacgcgacctgccaccctctgtgcacctgctgacattggcctcgtggggcccagaaatggttctgctgagactagagcatcaatttgccgtgggggaggatagcggcaggaacctgtctgccccagtaactctgaatctcagggacctgttctcaactttcactatcactcgcctccaagaaacaacattggtggcgaatcaattgcgggaggccgcttctcgactgaaatggacaacgaatactggcccaactccccatcagaccccctatcagctggaccccgcaaatattacgctggagcccatggaaatccgaacttttctggctagcgttcagtggaaggaagtcgatgggtag

SEQ ID NO: 11666 - DNA, 3184 bp, Artificial Sequence
  derived and/or modified sequence
ctttccagggccggggaaccccaggaggaagctgctgagccatgggcgcctacgcgcgggcttcgggggtctgcgctcgcggctgcctggactcagcaggcccctggaccatgtcccgcgccctgcggccaccgctcccgcctctctgctttttccttttgttgctggcggctgccggtgctcgggccgggggatacgagacatgccccacagtgcagccgaacatgctgaacgtgcacctgctgcctcacacacatgatgacgtgggctggctcaaaaccgtggaccagtacttttatggaatcaagaatgacatccagcacgccggtgtgcagtacatcctggactcggtcatctctgccttgctggcagatcccacccgtcgcttcatttacgtggagattgccttcttctcccgttggtggcaccagcagacaaatgccacacaggaagtcgtgcgagaccttgtgcgccaggggcgcctggagttcgccaatggtggctgggtgatgaacgatgaggcagccacccactacggtgccatcgtggaccagatgacacttgggctgcgctttctggaggacacatttggcaatgatgggcgaccccgtgtggcctggcacattgaccccttcggccactctcgggagcaggcctcgctgtttgcgcagatgggcttcgacggcttcttctttgggcgccttgattatcaagataagtgggtacggatgcagaagctggagatggagcaggtgtggcgggccagcaccagcctgaagcccccgaccgcggacctcttcactggtgtgcttcccaatggttacaacccgccaaggaatctgtgctgggatgtgctgtgtgtcgatcagccgctggtggaggaccctcgcagccccgagtacaacgccaaggagctggtcgattacttcctaaatgtggccactgcccagggccggtattaccgcaccaaccacactgtgatgaccatgggctcggacttccaatatgagaatgccaacatgtggttcaagaaccttgacaagctcatccggctggtaaatgcgcagcaggcaaaaggaagcagtgtccatgttctctactccacccccgcttgttacctctgggagctgaacaaggccaacctcacctggtcagtgaaacatgacgacttcttcccttacgcggatggcccccaccagttctggaccggttacttttccagtcggccggccctcaaacgctacgagcgcctcagctacaacttcctgcaggtgtgcaaccagctggaggcgctggtgggcctggcggccaacgtgggaccctatggctccggagacagtgcacccctcaatgaggcgatggctgtgctccagcatcacgacgccgtcagcggcacctcccgccagcacgtggccaacgactacgcgcgccagcttgcggcaggctgggggccttgcgaggttcttctgagcaacgcgctggcgcggctcagaggcttcaaagatcacttcaccttttgccaacagctaaacatcagcatctgcccgctcagccagacggcggcgcgcttccaggtcatcgtttataatcccctggggcggaaggtgaattggatggtacggctgccggtcagcgaaggcgttttcgttgtgaaggaccccaatggcaggacagtgcccagcgatgtggtaatatttcccagctcagacagccaggcgcaccctccggagctgctgttctcagcctcactgcccgccctgggcttcagcacctattcagtagcccaggtgcctcgctggaagccccaggcccgcgcaccacagcccatccccagaagatcctggtcccctgctttaaccatcgaaaatgagcacatccgggcaacgtttgatcctgacacagggctgttgatggagattatgaacatgaatcagcaactcctgctgcctgttcgccagaccttcttctggtacaacgccagtataggtgacaacgaaagtgaccaggcctcaggtgcctacatcttcagacccaaccaacagaaaccgctgcctgtgagccgctgggctcagatccacctggtgaagacacccttggtgcaggaggtgcaccagaacttctcagcttggtgttcccaggtggttcgcctgtacccaggacagcggcacctggagctagagtggtcggtggggccgatacctgtgggcgacacctgggggaaggaggtcatcagccgttttgacacaccgctggagacaaagggacgcttctacacagacagcaatggccgggagatcctggagaggaggcgggattatcgacccacctggaaactgaaccagacggagcccgtggcaggaaactactatccagtcaacacccggatttacatcacggatggaaacatgcagctgactgtgctgactgaccgctcccaggggggcagcagcctgagagatggctcgctggagctcatggtgcaccgaaggctgctgaaggacgatggacgcggagtatcggagccactaatggagaacgggtcgggggcgtgggtgcgagggcgccacctggtgctgctggacacagcccaggctgcagccgccggacaccggctcctggcggagcaggaggtcctggcccctcaggtggtgctggccccgggtggcggcgccgcctacaatctcggggctcctccgcgcacgcagttctcagggctgcgcagggacctgccgccctcggtgcacctgctcacgctggccagctggggccccgaaatggtgctgctgcgcttggagcaccagtttgccgtaggagaggattccggacgtaacctgagcgcccccgttaccttgaacttgagggacctgttctccaccttcaccatcacccgcctgcaggagaccacgctggtggccaaccagctccgcgaggcagcctccaggctcaagtggacaacaaacacaggccccacaccccaccaaactccgtaccagctggacccggccaacatcacgctggaacccatggaaatccgcactttcctggcctcagttcaatggaaggaggtggatggttaggtctgctgggatgggccctccaagcccaagcctcctgctccgggggcagaccagactctgactctcctcttggggctgctgccattaaaacgctactactaagactc

SEQ ID NO: 11667 - DNA, 3147 bp, Artificial Sequence
  derived and/or modified sequence
ctttccagggccggggaaccccaggaggaagctgctgagccatgggcgcctacgcgcgggcttcgggggtctgcgctcgcggctgcctggactcagcaggcccctggaccatgtcccgcgccctgcggccaccgctcccgcctctctggccgggggatacgagacatgccccacagtgcagccgaacatgctgaacgtgcacctgctgcctcacacacatgatgacgtgggctggctcaaaaccgtggaccagtacttttatggaatcaagaatgacatccagcacgccggtgtgcagtacatcctggactcggtcatctctgccttgctggcagatcccacccgtcgcttcatttacgtggagattgccttcttctcccgttggtggcaccagcagacaaatgccacacaggaagtcgtgcgagaccttgtgcgccaggggcgcctggagttcgccaatggtggctgggtgatgaacgatgaggcagccacccactacggtgccatcgtggaccagatgacacttgggctgcgctttctggaggacacatttggcaatgatgggcgaccccgtgtggcctggcacattgaccccttcggccactctcgggagcaggcctcgctgtttgcgcagatgggcttcgacggcttcttctttgggcgccttgattatcaagataagtgggtacggatgcagaagctggagatggagcaggtgtggcgggccagcaccagcctgaagcccccgaccgcggacctcttcactggtgtgcttcccaatggttacaacccgccaaggaatctgtgctgggatgtgctgtgtgtcgatcagccgctggtggaggaccctcgcagccccgagtacaacgccaaggagctggtcgattacttcctaaatgtggccactgcccagggccggtattaccgcaccaaccacactgtgatgaccatgggctcggacttccaatatgagaatgccaacatgtggttcaagaaccttgacaagctcatccggctggtaaatgcgcagcaggcaaaaggaagcagtgtccatgttctctactccacccccgcttgttacctctgggagctgaacaaggccaacctcacctggtcagtgaaacatgacgacttcttcccttacgcggatggcccccaccagttctggaccggttacttttccagtcggccggccctcaaacgctacgagcgcctcagctacaacttcctgcaggtgtgcaaccagctggaggcgctggtgggcctggcggccaacgtgggaccctatggctccggagacagtgcacccctcaatgaggcgatggctgtgctccagcatcacgacgccgtcagcggcacctcccgccagcacgtggccaacgactacgcgcgccagcttgcggcaggctgggggccttgcgaggttcttctgagcaacgcgctggcgcggctcagaggcttcaaagatcacttcaccttttgccaacagctaaacatcagcatctgcccgctcagccagacggcggcgcgcttccaggtcatcgtttataatcccctggggcggaaggtgaattggatggtacggctgccggtcagcgaaggcgttttcgttgtgaaggaccccaatggcaggacagtgcccagcgatgtggtaatatttcccagctcagacagccaggcgcaccctccggagctgctgttctcagcctcactgcccgccctgggcttcagcacctattcagtagcccaggtgcctcgctggaagccccaggcccgcgcaccacagcccatccccagaagatcctggtcccctgctttaaccatcgaaaatgagcacatccgggcaacgtttgatcctgacacagggctgttgatggagattatgaacatgaatcagcaactcctgctgcctgttcgccagaccttcttctggtacaacgccagtataggtgacaacgaaagtgaccaggcctcaggtgcctacatcttcagacccaaccaacagaaaccgctgcctgtgagccgctgggctcagatccacctggtgaagacacccttggtgcaggaggtgcaccagaacttctcagcttggtgttcccaggtggttcgcctgtacccaggacagcggcacctggagctagagtggtcggtggggccgatacctgtgggcgacacctgggggaaggaggtcatcagccgttttgacacaccgctggagacaaagggacgcttctacacagacagcaatggccgggagatcctggagaggaggcgggattatcgacccacctggaaactgaaccagacggagcccgtggcaggaaactactatccagtcaacacccggatttacatcacggatggaaacatgcagctgactgtgctgactgaccgctcccaggggggcagcagcctgagagatggctcgctggagctcatggtgcaccgaaggctgctgaaggacgatggacgcggagtatcggagccactaatggagaacgggtcgggggcgtgggtgcgagggcgccacctggtgctgctggacacagcccaggctgcagccgccggacaccggctcctggcggagcaggaggtcctggcccctcaggtggtgctggccccgggtggcggcgccgcctacaatctcggggctcctccgcgcacgcagttctcagggctgcgcagggacctgccgccctcggtgcacctgctcacgctggccagctggggccccgaaatggtgctgctgcgcttggagcaccagtttgccgtaggagaggattccggacgtaacctgagcgcccccgttaccttgaacttgagggacctgttctccaccttcaccatcacccgcctgcaggagaccacgctggtggccaaccagctccgcgaggcagcctccaggctcaagtggacaacaaacacaggccccacaccccaccaaactccgtaccagctggacccggccaacatcacgctggaacccatggaaatccgcactttcctggcctcagttcaatggaaggaggtggatggttaggtctgctgggatgggccctccaagcccaagcctcctgctccgggggcagaccagactctgactctcctcttggggctgctgccattaaaacgctactactaagactc

SEQ ID NO: 11668 - DNA, 3182 bp, Artificial Sequence
  derived and/or modified sequence
gggaaataagagagaaaagaagagtaagaagaaatataagagccaccatgggagcatacgcccgagcgagcggggtctgcgcacgagggtgcctcgattccgctggtccctggacaatgagccgggctctgcgcccacccctgccgccgttgtgtttctttctcctgctgcttgctgcagccggagcgagggcgggtggttacgaaacgtgccctacagtacagcccaacatgcttaacgtacatctgctgccgcacacccacgatgacgtgggttggcttaaaacagtcgaccagtatttctacggaatcaaaaatgacattcaacatgcgggggtacagtacattttggattccgtcatttccgcgcttttggcggacccaactcggcgcttcatctacgtggagatcgcgttcttcagccggtggtggcaccaacagacgaacgcgacacaagaggtagtgcgcgatcttgtaagacaggggcggttggaattcgcgaatggaggttgggtgatgaacgacgaggccgcgacacattatggggcaattgtggaccaaatgacgcttggccttcggttccttgaggacactttcggaaacgatggtcggcccagggtagcgtggcacatcgatccgtttggacactcaagagagcaggcctcattgtttgcgcagatgggtttcgacgggtttttctttggccggcttgattatcaagacaagtgggtcaggatgcagaaactggaaatggagcaggtgtggcgggcttcgacgtcgttgaaacccccgactgcagatctgtttacgggggtgctgccgaacgggtacaatccaccccgaaatctttgttgggatgtgctgtgcgtcgaccagcctttggtagaagatccgagatcgcctgaatataacgcgaaggaactcgtggactacttcctcaacgtggcgacggcgcagggacgatactatagaacgaatcacactgtcatgacaatgggaagcgactttcaatacgagaacgccaacatgtggtttaagaaccttgacaagcttatccgactcgtgaatgcacaacaggcgaagggaagctccgtgcacgtgttgtactcgacacccgcgtgctacctttgggaactgaacaaggcgaatttgacctggtcggtgaaacatgacgacttcttcccttacgcagatggacctcaccagttttggacaggctacttttcgtcccgcccagcgctcaagcgatatgaacgcctgtcatacaactttcttcaagtatgcaatcaacttgaggcgttggtcgggctggctgcgaacgtaggaccgtacggaagcggcgattcggcccctctcaacgaagcgatggctgtcttgcagcatcacgacgccgtgtcgggaacgtcccggcagcatgtggccaacgactatgcgaggcagttggcagcgggatggggaccatgtgaggtgctcttgtcaaacgctctcgcgagattgcgcggctttaaagatcactttacattttgccaacagctgaacatctcaatctgtcctttgagccaaacggcggcacggttccaagtgattgtctataacccccttggtagaaaagtcaactggatggtacgccttccggtgtcagaaggggtattcgtggtgaaagaccccaacgggcggaccgtgccatcggacgtggtgatctttccgtcatcggattcacaagcgcatccacccgaacttctgttctcagcgtcgttgccagccttgggtttcagcacgtattcagtggcgcaggtgccccgctggaaaccccaggccagagcccctcagcccatcccgaggcggtcctggtcgcccgcactcacaattgagaacgagcacatccgcgcgacgttcgaccctgatacagggttgcttatggagatcatgaatatgaaccaacaactgctgcttccggtgagacagactttcttttggtataacgcttcgattggagataatgagtccgaccaagcttcaggggcgtacattttccggccaaatcagcagaagccgttgcccgtgtcaaggtgggcccagattcacctggtaaagacaccgttggtacaagaggtgcaccagaatttctcggcgtggtgtagccaagtggtgcggctctaccctggacagagacatttggaattggaatggagcgtaggccccattcccgtgggagacacttggggtaaagaagtgatctcaagattcgacacacccctcgagacaaagggacggttctatactgactcaaatggtcgagagatcctcgagaggcggcgagattaccggcccacgtggaagcttaaccagacggaaccagtcgcggggaactattatccggtgaataccagaatctacattaccgacgggaacatgcagttgacagtgcttacggaccggagccagggtggatcgtcgcttagggacgggtcattggagctcatggtccataggcggcttctcaaggacgacggacgcggagtctcggaaccgcttatggaaaatggaagcggagcatgggtacgcggacgacatcttgtgctcttggacacggctcaagccgctgcagcaggacatagactcctcgccgaacaagaagtgctggcaccacaagtggtcttggcgccaggcgggggagcggcctataaccttggagcgccaccgagaactcagtttagcggattgcgcagagatctcccgccttcggtacacttgctgacattggcgtcgtggggaccggagatggtcttgttgagactggagcaccagtttgcagtgggcgaggacagcggaaggaatctgtccgcgcctgtaacattgaatcttcgcgatcttttctcgacctttacaatcacacgcttgcaagaaacaacacttgtcgcaaaccagttgagagaggcagcgtccagattgaagtggacgaccaacacgggacctacaccccatcagacgccgtatcaactcgatccagcgaacatcacacttgagccgatggaaatccgcacatttttggcctcggtacaatggaaagaagtagatggctgataataggctgccttctgcggggcttgccttctggccatgcccttcttctctcccttgcacctgtacctcttggtctttgaataaagcctgagtaggaag

SEQ ID NO: 11669 - RNA, 3182 nt, Artificial Sequence
  derived and/or modified sequence
gggaaauaagagagaaaagaagaguaagaagaaauauaagagccaccaugggagcauacgcccgagcgagcggggucugcgcacgagggugccucgauuccgcuggucccuggacaaugagccgggcucugcgcccaccccugccgccguuguguuucuuucuccugcugcuugcugcagccggagcgagggcgggugguuacgaaacgugcccuacaguacagcccaacaugcuuaacguacaucugcugccgcacacccacgaugacguggguuggcuuaaaacagucgaccaguauuucuacggaaucaaaaaugacauucaacaugcggggguacaguacauuuuggauuccgucauuuccgcgcuuuuggcggacccaacucggcgcuucaucuacguggagaucgcguucuucagccggugguggcaccaacagacgaacgcgacacaagagguagugcgcgaucuuguaagacaggggcgguuggaauucgcgaauggagguugggugaugaacgacgaggccgcgacacauuauggggcaauuguggaccaaaugacgcuuggccuucgguuccuugaggacacuuucggaaacgauggucggcccaggguagcguggcacaucgauccguuuggacacucaagagagcaggccucauuguuugcgcagauggguuucgacggguuuuucuuuggccggcuugauuaucaagacaagugggucaggaugcagaaacuggaaauggagcagguguggcgggcuucgacgucguugaaacccccgacugcagaucuguuuacgggggugcugccgaacggguacaauccaccccgaaaucuuuguugggaugugcugugcgucgaccagccuuugguagaagauccgagaucgccugaauauaacgcgaaggaacucguggacuacuuccucaacguggcgacggcgcagggacgauacuauagaacgaaucacacugucaugacaaugggaagcgacuuucaauacgagaacgccaacaugugguuuaagaaccuugacaagcuuauccgacucgugaaugcacaacaggcgaagggaagcuccgugcacguguuguacucgacacccgcgugcuaccuuugggaacugaacaaggcgaauuugaccuggucggugaaacaugacgacuucuucccuuacgcagauggaccucaccaguuuuggacaggcuacuuuucgucccgcccagcgcucaagcgauaugaacgccugucauacaacuuucuucaaguaugcaaucaacuugaggcguuggucgggcuggcugcgaacguaggaccguacggaagcggcgauucggccccucucaacgaagcgauggcugucuugcagcaucacgacgccgugucgggaacgucccggcagcauguggccaacgacuaugcgaggcaguuggcagcgggauggggaccaugugaggugcucuugucaaacgcucucgcgagauugcgcggcuuuaaagaucacuuuacauuuugccaacagcugaacaucucaaucuguccuuugagccaaacggcggcacgguuccaagugauugucuauaacccccuugguagaaaagucaacuggaugguacgccuuccggugucagaagggguauucguggugaaagaccccaacgggcggaccgugccaucggacguggugaucuuuccgucaucggauucacaagcgcauccacccgaacuucuguucucagcgucguugccagccuuggguuucagcacguauucaguggcgcaggugccccgcuggaaaccccaggccagagccccucagcccaucccgaggcgguccuggucgcccgcacucacaauugagaacgagcacauccgcgcgacguucgacccugauacaggguugcuuauggagaucaugaauaugaaccaacaacugcugcuuccggugagacagacuuucuuuugguauaacgcuucgauuggagauaaugaguccgaccaagcuucaggggcguacauuuuccggccaaaucagcagaagccguugcccgugucaaggugggcccagauucaccugguaaagacaccguugguacaagaggugcaccagaauuucucggcgugguguagccaaguggugcggcucuacccuggacagagacauuuggaauuggaauggagcguaggccccauucccgugggagacacuugggguaaagaagugaucucaagauucgacacaccccucgagacaaagggacgguucuauacugacucaaauggucgagagauccucgagaggcggcgagauuaccggcccacguggaagcuuaaccagacggaaccagucgcggggaacuauuauccggugaauaccagaaucuacauuaccgacgggaacaugcaguugacagugcuuacggaccggagccaggguggaucgucgcuuagggacgggucauuggagcucaugguccauaggcggcuucucaaggacgacggacgcggagucucggaaccgcuuauggaaaauggaagcggagcauggguacgcggacgacaucuugugcucuuggacacggcucaagccgcugcagcaggacauagacuccucgccgaacaagaagugcuggcaccacaaguggucuuggcgccaggcgggggagcggccuauaaccuuggagcgccaccgagaacucaguuuagcggauugcgcagagaucucccgccuucgguacacuugcugacauuggcgucguggggaccggagauggucuuguugagacuggagcaccaguuugcagugggcgaggacagcggaaggaaucuguccgcgccuguaacauugaaucuucgcgaucuuuucucgaccuuuacaaucacacgcuugcaagaaacaacacuugucgcaaaccaguugagagaggcagcguccagauugaaguggacgaccaacacgggaccuacaccccaucagacgccguaucaacucgauccagcgaacaucacacuugagccgauggaaauccgcacauuuuuggccucgguacaauggaaagaaguagauggcugauaauaggcugccuucugcggggcuugccuucuggccaugcccuucuucucucccuugcaccuguaccucuuggucuuugaauaaagccugaguaggaag

SEQ ID NO: 11670 - DNA, 753 bp, Artificial Sequence
  derived and/or modified sequence
atggctcccggcgcaccctcatcctcacccagcccgatactggccgtgctactgttctcctccttggtcctgagccccgcccaggccatagtggtgtacactgaccgggaagtccacggcgcagttgggagcagagtcactctgcattgtagcttctggtcttctgaatgggtttcagacgacatttcatttacttggagataccagcctgagggagggcgcgacgctatcagcattttccattacgccaagggacaaccctatattgatgaagtgggcacatttaaagagcgcatacaatgggtgggagatccacggtggaaggatgggtctatagttattcacaatcttgattactccgacaatggcacctttacttgtgacgtgaagaacccacctgatatagttggaaagacaagccaggtgacattatatgttttcgaaaaggtcccgactagatacggagtcgtcctgggggcagtgattggtggcgtgttgggtgtcgtgttgctgcttctgctgctcttttacgttgtgcggtattgctggctgagaagacaagcagcccttcaacgaagacttagcgcaatggagaagggtaaactccataaaccaggtaaagatgcgagcaagcgaggccgccaaacaccagtcctgtaccaatgctggactacagccgaggcccccaagttgagtgtgagacggcgccctcggggctggggttctctggctcgcatccgcaattccggttag

SEQ ID NO: 11671 - DNA, 777 bp, Artificial Sequence
  derived and/or modified sequence
atgcttagggctcccgccccagcccctgctatggcacccggggcaccttccagcagcccgtccccgattctcgccgtgctcctgttcagctctctggttctgtctcccgcccaagcgattgtcgtgtataccgacagggaggtacacggggctgtgggttccagagttacactacactgttcattttggtcatctgagtgggtgagtgacgatatctctttcacatggcgataccagcccgagggagggagggatgcaatatccatcttccactatgcgaaggggcagccctacattgatgaggtgggcacattcaaagaaaggattcagtgggtaggggatccccggtggaaagacggatcaattgtcatccacaacctcgactattccgacaatgggactttcacctgcgacgtcaaaaatccccccgacatcgtcggaaaaacttcgcaagtgacattatatgttttcgagaaagtcccgactaggtacggagtggtgctgggagcagtgataggaggtgtacttggagtggtgctgcttctcctgctgctgttttatgtggtcagatattgctggctgcggcggcaggccgccctacagcgccggctgagcgctatggaaaagggtaaactccacaagcccggcaaagacgcctcaaaaaggggccgtcaaacaccagtgctgtatgccatgcttgatcactctagatctacaaaagctgtatcagagaagaaagcgaaggggttgggggagtcccgcaaggataaaaagtag

SEQ ID NO: 11672 - DNA, 747 bp, Artificial Sequence
  derived and/or modified sequence
atggcccctggcgcaccctcttctagccctagtcccattctagcggtcctgctgtttagctcactcgtgctcagccccgctcaagcaattgtggtctatacagatcgcgaagtccatggcgcggtgggttccagggtgactctccattgctcgttctggagtagcgagtgggtgagcgacgacatctccttcacgtggcggtaccaacccgagggaggtcgtgacgctattagcatatttcactatgccaagggacagccttacattgatgaagtgggtacctttaaggagcggattcagtgggttggagacccaagatggaaagatggaagcatagtgattcacaacttggattatagtgataatggtacctttacatgcgatgtcaagaatccccctgacatcgtgggcaaaacctcacaggtgacactttacgtgtttgagaaggtccctacccggtacggagttgtgctgggtgccgtcattggtggcgtattgggagtggtgcttcttcttctcctgctgttttacgttgtacgttactgttggctgagacggcaggcagcactccaaaggaggctgtccgctatggagaagggcaagctacataagcccgggaaagacgcaagcaagcggggaaggcaaactccggtgctgtacgccatgctggatcactcaagaagtactaaagcagttagcgagaaaaaggcgaaggggcttggcgagtccagaaaagataaaaagtag

SEQ ID NO: 11673 - DNA, 747 bp, Artificial Sequence
  derived and/or modified sequence
atggcaccgggggccccttcttcttccccctctcccatacttgctgtcctgctcttctcaagcctggtcctgagcccagcacaggcgatcgtcgtttataccgaccgcgaggtacacggtgccgtcggctccagagtcactctgcactgttcgttctggtcctcagaatgggttagcgatgacatcagtttcacctggcgctaccagcccgagggtggcagagacgccatcagcatattccactacgccaaaggtcagccttatattgacgaggtcggtacttttaaggagagaatccagtgggtcggcgatcccagatggaaggacggttccatagttattcataatctggattactcagacaacggcacattcacttgcgatgttaaaaatccgcccgatatcgtcggaaagaccagccaggtgaccctgtatgtcttcgagaaagtgccaacgagatacggggtggtcctgggggctgttattggcggcgtgctcggcgtcgttctccttttgctgctgctgttctatgttgtgaggtactgctggctgcggcgccaggcagccctgcagcgccgcctttccgcaatggagaaaggtaagttacacaaaccgggcaaagatgctagtaagaggggacggcagacaccggtcctctatgctatgctcgaccattcgcggagcacaaaggctgtgagcgagaagaaggcgaagggccttggtgagtcccggaaagacaagaagtag

SEQ ID NO: 11674 - DNA, 753 bp, Artificial Sequence
  derived and/or modified sequence
atggcccctggggcccccagcagcagccccagccccatcctggccgtgctgctcttcagcagcctggtgctgagccctgcccaggccatcgtggtgtacacagaccgggaggtgcatggagctgtgggcagccgggtgaccctgcactgcagcttctggagcagcgagtgggtgtctgatgacatctccttcacctggagataccagcctgagggcggcagagatgccatcagcatcttccactacgccaagggccagccctacattgatgaggtgggcaccttcaaggagcgcatccagtgggtgggggacccccgctggaaggatggcagcatcgtcatccacaacctggactacagcgacaatggcaccttcacctgtgatgtgaagaaccccccagacatcgtgggcaagaccagccaggtgaccctgtatgtgtttgagaaggtgcccaccaggtatggagtggtgctgggcgccgtcatcggcggcgtgctgggcgtggtgctgctgctgctgctgctcttctacgtggtgcgctactgctggctgcggcggcaggccgccctgcagaggcggctgagcgccatggagaagggcaagctgcacaagccaggcaaggatgccagcaagaggggccggcagacccctgtgctgtaccagtgctggaccacagctgaggcccccaagctgtctgtgagaagaagaccccggggctggggcagcctggcccgcatcagaaattctggatag

SEQ ID NO: 11675 - DNA, 777 bp, Artificial Sequence
  derived and/or modified sequence
atgctgcgggccccagccccagccccagccatggcccctggggcccccagcagcagccccagccccatcctggccgtgctgctcttcagcagcctggtgctgagccctgcccaggccatcgtggtgtacacagaccgggaggtgcatggagctgtgggcagccgggtgaccctgcactgcagcttctggagcagcgagtgggtgtctgatgacatctccttcacctggagataccagcctgagggcggcagagatgccatcagcatcttccactacgccaagggccagccctacattgatgaggtgggcaccttcaaggagcgcatccagtgggtgggggacccccgctggaaggatggcagcatcgtcatccacaacctggactacagcgacaatggcaccttcacctgtgatgtgaagaaccccccagacatcgtgggcaagaccagccaggtgaccctgtatgtgtttgagaaggtgcccaccaggtatggagtggtgctgggcgccgtcatcggcggcgtgctgggcgtggtgctgctgctgctgctgctcttctacgtggtgcgctactgctggctgcggcggcaggccgccctgcagaggcggctgagcgccatggagaagggcaagctgcacaagccaggcaaggatgccagcaagaggggccggcagacccctgtgctgtatgccatgctggaccacagccgcagcaccaaggctgtgtctgagaagaaggccaagggcctgggggagagcaggaaggacaagaagtag

SEQ ID NO: 11676 - DNA, 747 bp, Artificial Sequence
  derived and/or modified sequence
atggcccctggggcccccagcagcagccccagccccatcctggccgtgctgctcttcagcagcctggtgctgagccctgcccaggccatcgtggtgtacacagaccgggaggtgcatggagctgtgggcagccgggtgaccctgcactgcagcttctggagcagcgagtgggtgtctgatgacatctccttcacctggagataccagcctgagggcggcagagatgccatcagcatcttccactacgccaagggccagccctacattgatgaggtgggcaccttcaaggagcgcatccagtgggtgggggacccccgctggaaggatggcagcatcgtcatccacaacctggactacagcgacaatggcaccttcacctgtgatgtgaagaaccccccagacatcgtgggcaagaccagccaggtgaccctgtatgtgtttgagaaggtgcccaccaggtatggagtggtgctgggcgccgtcatcggcggcgtgctgggcgtggtgctgctgctgctgctgctcttctacgtggtgcgctactgctggctgcggcggcaggccgccctgcagaggcggctgagcgccatggagaagggcaagctgcacaagccaggcaaggatgccagcaagaggggccggcagacccctgtgctgtatgccatgctggaccacagccgcagcaccaaggctgtgtctgagaagaaggccaagggcctgggggagagcaggaaggacaagaagtag

SEQ ID NO: 11677 - DNA, 820 bp, Artificial Sequence
  derived and/or modified sequence
gttcagttcctggtcccccactttctcaaccccacagatgctccgggcccctgcccctgccccagctatggctcctggggctccctcatccagccccagccctatcctggctgtgctgctcttctcttctttggtgctgtccccggcccaggccatcgtggtttacaccgacagggaggtccatggtgctgtgggctcccgggtgaccctgcactgctccttctggtccagtgagtgggtctcagatgacatctccttcacctggcgctaccagcccgaagggggcagagatgccatttcgatcttccactatgccaagggacaaccctacattgacgaggtggggaccttcaaagagcgcatccagtgggtaggggaccctcgctggaaggatggctccattgtcatacacaacctagactacagtgacaatggcacgttcacttgtgacgtcaaaaaccctccagacatagtgggcaagacctctcaggtcacgctgtatgtctttgaaaaagtgccaactaggtacggggtcgttctgggagctgtgatcgggggtgtcctcggggtggtgctgttgctgctgctgcttttctacgtggttcggtactgctggctacgcaggcaggcggccctgcagaggaggctcagtgctatggagaaggggaaattgcacaagccaggaaaggacgcgtcgaagcgcgggcggcagacgccagtgctgtatcaatgctggaccacagcagaagcaccaaagctgtcagtgagaagaaggccaaggggctgggggagtctcgcaaggataagaaatagcggttag

SEQ ID NO: 11678 - DNA, 753 bp, Artificial Sequence
  derived and/or modified sequence
atggcccccggcgcccccagcagcagccccagccccatcctggccgtgttgctgtttagttcacttgtgctgtctccagcccaggccatagtagtatacacagatcgcgaggttcatggcgctgtgggctctagggtaacactgcactgctctttctggtctagtgaatgggtgtctgacgacatttcttttacatggaggtatcagccagaaggcggccgggatgccatttcaatttttcattatgcaaaggggcagccatacattgacgaagtcggcacattcaaggagaggattcaatgggtaggtgaccctagatggaaggacgggtccatcgttatccataatctggactatagtgacaatggaaccttcacctgcgacgtgaaaaatcctcctgatatcgtgggtaagacaagccaagtcacactgtacgtgtttgaaaaagttccaacccgatatggcgtcgtactgggcgctgttattggaggagtgctcggcgtcgtgctgctcctccttttgcttttctatgtggtgagatattgctggctcaggaggcaggcggcccttcaacgaagactgtccgcaatggagaaaggtaagctgcacaagcctggcaaggatgccagcaagcgcggacgccagacccctgtgttataccagtgctggactaccgccgaggcccccaaactgagcgtccggaggcgacctcgagggtggggaagcctggctcgcatacggaacagcggatag

SEQ ID NO: 11679 - DNA, 777 bp, Artificial Sequence
  derived and/or modified sequence
atgctgcgggcccccgcccccgcccccgccatggcccccggcgccccttcttcctccccatctcccattctggctgtactcttgttctcatccctggtcttgtcgcccgcccaggccattgtagtatataccgaccgagaagtgcatggcgccgtagggtcccgagtcacgctgcactgcagcttttggagctccgagtgggttagtgacgacatcagtttcacttggaggtaccaacccgagggcggcagagacgctatcagtatctttcactatgctaaggggcaaccctacatcgatgaagtgggtactttcaaggaacgaatccaatgggttggggaccccaggtggaaggacggctcgatcgttattcataatctggactattcagacaacggcacttttacgtgtgacgtcaagaacccacctgacatcgtcggcaagacctctcaggtcaccctatacgtgtttgaaaaagtacctacacggtacggggtcgtcctgggcgcggtgattgggggggtgctcggggtggtgctcctgctcctgttactgttctacgtggtgcgatactgttggctacgcaggcaagccgctctccagaggagactttcagccatggagaaaggtaaactccataaacccggcaaagatgcctccaagagaggacgtcagacccccgttttgtatgccatgcttgaccatagtagatctaccaaggcagtgtctgagaaaaaggcaaagggactgggtgaatcccggaaagataaaaaatag

SEQ ID NO: 11680 - DNA, 747 bp, Artificial Sequence
  derived and/or modified sequence
atggcccccggcgcccccagcagcagccccagccccatcctggccgttctactgttctcctctttggtgttgagccccgcccaagctatcgtggtatacaccgacagggaagtacatggcgcagtagggtcaagggttacactgcactgctccttctggtcatccgaatgggtatcggacgacatttccttcacctggaggtaccagcccgagggggggagagacgcgatctctatcttccattatgctaaaggccaaccttatatcgacgaagtgggcaccttcaaggaacggatccaatgggtgggggaccctcgctggaaggacggctctattgtgatacacaatctcgactacagcgacaacggtactttcacctgcgatgtgaagaaccctccggatatcgtggggaagacctctcaggtgactctatatgtgttcgaaaaggtgcccactcgctatggagtggttctgggggcagttatagggggggttctcggagtcgttcttctgctgctactgctgttttatgtggtacgctattgttggctgagacggcaggctgctttgcagaggcgcctatctgcaatggagaaaggaaagctgcacaaacctggcaaagacgcttctaagagaggtcggcaaactcctgtactgtacgcaatgctcgaccacagtcggagcacaaaagctgtcagtgaaaagaaggccaaaggattgggagagtcccgcaaggataagaagtag

SEQ ID NO: 11681 - DNA, 747 bp, Artificial Sequence
  derived and/or modified sequence
atggcccccggcgcccccagcagcagccccagccccatcctggccgtcctgttgttcagttccctagtactctctcccgcacaggccatcgtggtttacacagacagagaagtgcacggcgcggtcggctctagagtgacactacattgctccttctggagttccgagtgggttagcgacgatatctccttcacctggcggtaccaaccagagggcgggcgtgacgcaatctctattttccactatgccaagggtcagccatacatagacgaggtgggaacttttaaggagcggatccagtgggtgggggaccccaggtggaaggatggttctatcgtgatccacaacctcgactattccgataacggcactttcacatgcgacgttaagaacccccccgacattgttggaaaaacatcacaggtgacactgtacgtattcgagaaggtgcccacccgttacggcgtagtgttgggagccgtaatcggaggcgttctgggagtcgtgctgctcctcctgctgcttttctacgtagtgcggtattgttggttgcgacgccaggccgcgctacaacgtcgcctgtccgcgatggaaaaggggaaactccataagcctggcaaggatgccagtaagagaggacggcagactcccgtgctgtacgcaatgctggatcactcccgctccactaaagctgtgtccgaaaaaaaagctaaaggtttaggagaaagcagaaaggataagaaatag

SEQ ID NO: 11682 - DNA, 753 bp, Artificial Sequence
  derived and/or modified sequence
atggcgccaggtgctccaagcagctcacccagcccgatcctcgcagtgctgctgttttcttcactggtgttgagccctgctcaggctatcgtcgtctatacagatcgagaagtgcatggcgctgttggatcaagggtaacactccactgcagtttctggtcttcagagtgggtgagtgacgacatttcttttacttggcgttaccagcctgaagggggtcgggacgcaatctccatctttcattatgcaaaggggcagccctacatagacgaggtgggcacgtttaaggagcgaatccagtgggtgggagatcccagatggaaggatggcagcattgtgattcacaatctggattattcagacaacggcacttttacatgcgacgtgaaaaacccacctgacattgtgggcaaaacgagtcaggttacactgtatgtgtttgaaaaggttcccacgaggtatggggtcgtgctgggagcagtgataggcggagtactgggagtcgtacttctattactgttactcttctacgtggtgagatactgctggctgaggagacaagcggctctccagagacgcctgtcagccatggagaaggggaagctgcataaacccggtaaggacgcgagcaagcgcggaagacagacacccgttctgtatcagtgctggaccaccgcagaggcaccaaaactctctgtgaggcgtaggccaagaggatggggctcgctggcccgtatccggaacagcggatag

SEQ ID NO: 11683 - DNA, 777 bp, Artificial Sequence
  derived and/or modified sequence
atgttacgcgcacccgcaccggctcccgctatggccccaggagccccttcttctagtcccagccccatcctggcagtcctactgttcagctctctggtgctgtctcccgctcaagcgatcgtggtttatacggatagagaggtgcacggggctgtcgggtctagggtaactcttcactgctctttttggagtagcgagtgggtatctgatgacatttcttttacatggcggtatcaacccgagggaggacgcgatgctatttctatttttcactatgccaaggggcagccttatatcgacgaggtcggcactttcaaggaacggattcagtgggtgggagatcctagatggaaggacggatctattgtgatacacaacctcgattactcggataatggcacatttacctgcgatgttaaaaatccaccagacatagtaggaaaaacttcccaggtcacactttatgtgtttgagaaggtgccaacacggtacggagttgtgctcggtgccgtaatcgggggagtattgggtgtggtgctactgttgctattactgttctacgtcgttcgctactgctggctgcgtagacaggccgctctacaaaggcgattgtctgccatggagaaggggaaattacataagccaggtaaagatgcctctaagagaggcagacagacacccgtactgtatgcgatgcttgatcattctcgatcaacaaaagcagtcagcgagaagaaggccaagggactcggcgagtcgcggaaagataaaaagtag

SEQ ID NO: 11684 - DNA, 747 bp, Artificial Sequence
  derived and/or modified sequence
atggcccctggcgctccctctagcagtcccagtccgatcctggccgttttactattttcatctctggtgctttcacccgcacaggcaattgtggtctatacagatcgcgaggttcacggagccgtcggaagtcgggtcacgctgcattgttccttctggtctagcgagtgggtgtcagacgacatcagcttcacttggaggtatcagcccgaaggcggtcgggacgcaatctcaatatttcactatgccaagggacagccttatatcgacgaggtcggaacatttaaagaaagaatccagtgggtgggcgatccccgttggaaggatggctctatagtgattcacaacctcgactactccgataacgggacttttacctgtgatgtgaaaaatcctcctgacatcgtggggaaaacttcccaggtaactctctatgtattcgaaaaggttcccacccgatacggtgtggttctgggtgccgttatcggcggagtgctcggtgtggtgctactacttctcctgctgttctacgtcgtaagatattgctggctgcggaggcaggctgccctgcagagaaggttgtcagcaatggaaaaggggaaactacacaagccaggaaaggacgcgagcaagagaggtcgccagacccctgtactgtatgccatgctcgaccactctcgatcaaccaaggcagtgagtgaaaagaaggctaagggactaggggagtctcggaaggacaaaaaatag

SEQ ID NO: 11685 - DNA, 747 bp, Artificial Sequence
  derived and/or modified sequence
atggccccaggtgctcccagttctagtccatctcccatactggccgtgttgctcttctcatcactggtgctgtctcctgcccaagccatcgtggtgtacactgaccgggaagtgcatggggcagttggcagccgcgttactctccactgttccttctggagttcggaatgggtgtcggatgatattagttttacatggaggtatcagcccgaagggggaagggacgcgatctcaatattccattatgccaaaggacagccatacatagatgaggtgggcacattcaaagagcgtattcagtgggtcggcgacccacggtggaaagacggcagcattgtgattcacaacctggactactccgacaatggcacgtttacatgtgacgtgaaaaatccacccgacattgtcggaaaaacatcacaggtgactctgtatgtgtttgaaaaagtcccaactagatatggggtggtcctgggagcagtcatcgggggagtgctgggtgtggtgctcctgctcttattattgttttacgtggttaggtattgttggttacggaggcaggctgcactgcagcgccgtctgtccgctatggagaaaggtaaacttcacaagccaggcaaagacgcctctaaaagaggaaggcagactcccgtgctgtacgcgatgcttgaccactcccgcagtacaaaggctgtcagcgaaaagaaggcaaagggcctgggtgagtctagaaaagacaagaagtag

SEQ ID NO: 11686 - DNA, 753 bp, Artificial Sequence
  derived and/or modified sequence
atggcccccggcgcccccagcagcagccccagccccatcctggccgtgctgctgttcagcagcctggtgctgagccccgcccaggccatcgtggtgtacaccgacagagaggtgcacggcgccgtgggcagcagagtgaccctgcactgcagcttctggagcagcgagtgggtgagcgacgacatcagcttcacctggagataccagcccgagggcggcagagacgccatcagcatcttccactacgccaagggccagccctacatcgacgaggtgggcaccttcaaggagagaatccagtgggtgggcgaccccagatggaaggacggcagcatcgtgatccacaacctggactacagcgacaacggcaccttcacctgcgacgtgaagaacccccccgacatcgtgggcaagaccagccaggtgaccctgtacgtgttcgagaaggtgcccaccagatacggcgtggtgctgggcgccgtgatcggcggcgtgctgggcgtggtgctgctgctgctgctgctgttctacgtggtgagatactgctggctgagaagacaggccgccctgcagagaagactgagcgccatggagaagggcaagctgcacaagcccggcaaggacgccagcaagagaggcagacagacccccgtgctgtaccagtgctggaccaccgccgaggcccccaagctgagcgtgagaagaagacccagaggctggggcagcctggccagaatcagaaacagcggctag

SEQ ID NO: 11687 - DNA, 777 bp, Artificial Sequence
  derived and/or modified sequence
atgctgagagcccccgcccccgcccccgccatggcccccggcgcccccagcagcagccccagccccatcctggccgtgctgctgttcagcagcctggtgctgagccccgcccaggccatcgtggtgtacaccgacagagaggtgcacggcgccgtgggcagcagagtgaccctgcactgcagcttctggagcagcgagtgggtgagcgacgacatcagcttcacctggagataccagcccgagggcggcagagacgccatcagcatcttccactacgccaagggccagccctacatcgacgaggtgggcaccttcaaggagagaatccagtgggtgggcgaccccagatggaaggacggcagcatcgtgatccacaacctggactacagcgacaacggcaccttcacctgcgacgtgaagaacccccccgacatcgtgggcaagaccagccaggtgaccctgtacgtgttcgagaaggtgcccaccagatacggcgtggtgctgggcgccgtgatcggcggcgtgctgggcgtggtgctgctgctgctgctgctgttctacgtggtgagatactgctggctgagaagacaggccgccctgcagagaagactgagcgccatggagaagggcaagctgcacaagcccggcaaggacgccagcaagagaggcagacagacccccgtgctgtacgccatgctggaccacagcagaagcaccaaggccgtgagcgagaagaaggccaagggcctgggcgagagcagaaaggacaagaagtag

SEQ ID NO: 11688 - DNA, 747 bp, Artificial Sequence
  derived and/or modified sequence
atggcccccggcgcccccagcagcagccccagccccatcctggccgtgctgctgttcagcagcctggtgctgagccccgcccaggccatcgtggtgtacaccgacagagaggtgcacggcgccgtgggcagcagagtgaccctgcactgcagcttctggagcagcgagtgggtgagcgacgacatcagcttcacctggagataccagcccgagggcggcagagacgccatcagcatcttccactacgccaagggccagccctacatcgacgaggtgggcaccttcaaggagagaatccagtgggtgggcgaccccagatggaaggacggcagcatcgtgatccacaacctggactacagcgacaacggcaccttcacctgcgacgtgaagaacccccccgacatcgtgggcaagaccagccaggtgaccctgtacgtgttcgagaaggtgcccaccagatacggcgtggtgctgggcgccgtgatcggcggcgtgctgggcgtggtgctgctgctgctgctgctgttctacgtggtgagatactgctggctgagaagacaggccgccctgcagagaagactgagcgccatggagaagggcaagctgcacaagcccggcaaggacgccagcaagagaggcagacagacccccgtgctgtacgccatgctggaccacagcagaagcaccaaggccgtgagcgagaagaaggccaagggcctgggcgagagcagaaaggacaagaagtag

SEQ ID NO: 11689 - protein, 32 aa, Artificial Sequence
  derived and/or modified sequence
MLFNLRILLNNAAFRNGHNFMVRNFRCGQPLQ

SEQ ID NO: 11690 - protein, 354 aa, Artificial Sequence
  derived and/or modified sequence
MLFNLRILLNNAAFRNGHNFMVRNFRCGQPLQNKVQLKGRDLLTLKNFTGEEIKYMLWLSADLKFRIKQKGEYLPLLQGKSLGMIFEKRSTRTRLSTETGFALLGGHPCFLTTQDIHLGVNESLTDTARVLSSMADAVLARVYKQSDLDTLAKEASIPIINGLSDLYHPIQILADYLTLQEHYSSLKGLTLSWIGDGNNILHSIMMSAAKFGMHLQAATPKGYEPDASVTKLAEQYAKENGTKLLLTNDPLEAAHGGNVLITDTWISMGQEEEKKKRLQAFQGYQVTMKTAKVAASDWTFLHCLPRKPEEVDDEVFYSPRSLVFPEAENRKWTIMAVMVSLLTDYSPQLQKPKF

SEQ ID NO: 11691 - protein, 14 aa, Artificial Sequence
  derived and/or modified sequence
KPEEVDDEVFYSPR

SEQ ID NO: 11692 - protein, 14 aa, Artificial Sequence
  derived and/or modified sequence
VAASDWTFLHCLPR

SEQ ID NO: 11693 - protein, 23 aa, Artificial Sequence
  derived and/or modified sequence
GLTLSWIGDGNNILHSIMMSAAK

SEQ ID NO: 11694 - protein, 31 aa, Artificial Sequence
  derived and/or modified sequence
LLLTNDPLEAAHGGNVLITDTWISMGQEEEK

SEQ ID NO: 11695 - protein, 31 aa, Artificial Sequence
  derived and/or modified sequence
LSTETGFALLGGHPCGLTTQDIHLGVNESLT

SEQ ID NO: 11696 - DNA, 95 bp, Artificial Sequence
  derived and/or modified sequence
tgctctttaacctccgcatcctgttgaataacgctgcgttccgaaatgggcataacttcatggtacgcaacttcagatgcggccagccactccag

SEQ ID NO: 11697 - DNA, 1062 bp, Artificial Sequence
  derived and/or modified sequence
atgctgttcaacctgcgcatcctgctgaacaacgccgccttccgcaacggccacaacttcatggtgcgcaacttccgctgcggccagcccctgcagaacaaggtgcagctgaagggccgcgacctgctgaccctgaagaacttcaccggcgaggagatcaagtacatgctgtggctgagcgccgacctgaagttccgcatcaagcagaagggcgagtacctgcccctgctgcagggcaagagcctgggcatgatcttcgagaagcgcagcacccgcacccgcctgagcaccgagaccggcttcgccctgctgggcggccacccctgcttcctgaccacccaggacatccacctgggcgtgaacgagagcctgaccgacaccgcccgcgtgctgagcagcatggccgacgccgtgctggcccgcgtgtacaagcagagcgacctggacaccctggccaaggaggccagcatccccatcatcaacggcctgagcgacctgtaccaccccatccagatcctggccgactacctgaccctgcaggagcactacagcagcctgaagggcctgaccctgagctggatcggcgacggcaacaacatcctgcacagcatcatgatgagcgccgccaagttcggcatgcacctgcaggccgccacccccaagggctacgagcccgacgccagcgtgaccaagctggccgagcagtacgccaaggagaacggcaccaagctgctgctgaccaacgaccccctggaggccgcccacggcggcaacgtgctgatcaccgacacctggatcagcatgggccaggaggaggagaagaagaagcgcctgcaggccttccagggctaccaggtgaccatgaagaccgccaaggtggccgccagcgactggaccttcctgcactgcctgccccgcaagcccgaggaggtggacgacgaggtgttctacagcccccgcagcctggtgttccccgaggccgagaaccgcaagtggaccatcatggccgtgatggtgagcctgctgaccgactacagcccccagctgcagaagcccaagttc

SEQ ID NO: 11698 - DNA, 1208 bp, Artificial Sequence
  derived and/or modified sequence
gggaaataagagagaaaagaagagtaagaagaaatataagagccaccatgctctttaacctccgcatcctgttgaataacgctgcgttccgaaatgggcataacttcatggtacgcaacttcagatgcggccagccactccagaacaaggtgcagcttaaaggtcgggacctccttactctgaagaactttaccggagaagagatcaagtacatgctgtggctttcagcggatttgaagtttcgcattaaacagaagggagagtatcttcccctcttgcaagggaagtcgctcgggatgatcttcgagaagcgctcgacaaggacccggctcagcaccgaaaccggatttgcgctgttgggagggcacccgtgttttctcacgacgcaagacattcacttgggagtgaatgagtcgttgacagacactgccagagtcctttcatcgatggccgatgcggtgcttgcgagggtctacaaacagtcggatcttgacacactggccaaggaagcctcgatcccgatcattaacgggctctcggatttgtaccacccaatccagatcttggcggattatcttacattgcaagagcattattcctccctcaaggggctgactctcagctggattggtgacggaaataacatcctccattcaatcatgatgagcgcagcgaaattcggaatgcacctccaagcggccacgcccaaaggttatgaacctgatgcgagcgtaactaaactcgcggagcagtatgcaaaggaaaatggcacgaaactcttgctcacaaatgaccccttggaggcagcacacggtggtaatgtcctgattacagacacatggatctccatggggcaggaggaggagaaaaagaaaagacttcaggcatttcagggataccaggtaacgatgaaaacggcgaaggtcgccgcctcagactggactttcctccattgcctgccgaggaagccggaagaagtcgatgatgaggtgttttacagcccccgatccctggtgttccctgaagccgaaaatcggaagtggacaattatggcagtgatggtgtcccttcttacggactactcgccccagctgcaaaaaccgaaattctaatgagctgccttctgcggggcttgccttctggccatgcccttcttctctcccttgcacctgtacctcttggtctttgaataaagcctgagtaggaag

SEQ ID NO: 11699 - DNA, 1062 bp, Artificial Sequence
  derived and/or modified sequence
atgctgttcaatctccgcatcctacttaacaacgcagcgtttaggaatgggcataacttcatggtgaggaactttcggtgcggacagcctctccagaacaaggtccagctcaagggccgcgatctgttaactctgaagaattttacaggggaagagattaagtacatgctctggctcagcgctgacctcaagtttcggattaaacagaagggcgagtatttacccctgctgcaaggaaagagtctgggtatgatttttgagaagagatctacacggacaaggctgtcgacagaaactggcttcgctctgctgggtggccacccttgcttcctgaccactcaagacatccatctcggagttaacgagtcgcttacggacactgctagagttctcagctctatggctgacgcagtcctggcacgagtctataaacagtcagatcttgatacgctcgctaaggaagcttctatacccataatcaacggtctgtctgatctgtatcaccctattcaaatcctggctgattatcttaccttgcaggaacactactctagccttaaaggacttacgctttcctggattggtgatggcaataacatactccactcaataatgatgagcgcagcaaaattcggcatgcaccttcaggcggcgacgccaaaggggtacgagccggacgcttctgttaccaaactcgccgaacagtatgccaaagaaaacgggactaagctactacttacaaacgaccccctggaggccgcacatggtggcaacgtactgatcaccgatacatggatcagtatggggcaggaagaggagaaaaagaagcgcttgcaagctttccaggggtatcaggtgaccatgaaaaccgccaaggtggcagctagtgattggacgttccttcactgccttccgaggaagccagaggaagtcgacgatgaagtcttttactctcctcgctccttggtcttcccggaagccgaaaatagaaagtggactatcatggccgtgatggtgagtttgctcaccgactactccccacaattgcaaaaacctaagttc

SEQ ID NO: 11700 - DNA, 1062 bp, Artificial Sequence
  derived and/or modified sequence
atgcttttcaacttacggatactcctgaacaacgctgcatttcggaacgggcacaattttatggttcggaacttccgctgtggccaacctctgcagaataaggttcaacttaagggccgtgatctattgaccctgaagaatttcaccggggaagagatcaaatacatgctgtggttgtctgccgacctgaaattccgtatcaaacagaaaggtgagtacctgcccctgctgcagggtaaatcactcgggatgattttcgagaagaggtccactaggacaaggctgagtacagaaactgggttcgcactgctaggcggtcatccttgtttcctcacaacacaggacattcatctgggcgttaacgagtcactgactgacaccgccagagttttgtcaagcatggcggatgcagtgctggcccgggtgtacaaacagagtgacctcgatactcttgccaaggaggcatcaatccctattatcaacggcctatccgatctttatcatcccatccaaatcctggctgattatctcacgctgcaggagcactacagttcactcaaaggccttacactgagctggattggcgacggtaacaatattctgcactccatcatgatgtcagcagctaaatttgggatgcacttacaagcagccacacctaagggctacgaaccagacgccagtgtgactaaactggccgagcagtacgccaaggagaacggcaccaagctgctcctcaccaatgatcctttagaagccgcacatgggggaaacgttctgattactgacacatggatttccatgggacaggaagaagagaagaaaaagaggctacaggcattccagggctatcaagtgacaatgaagactgcaaaagtggccgcctccgactggacatttttgcactgcctgcctaggaaacccgaggaagtcgatgatgaggtattctatagtcccaggagtctggttttccccgaagccgaaaaccgtaagtggacaatcatggcagtgatggtgagtctgttgacagactactcccctcagcttcaaaaaccaaaattc

SEQ ID NO: 11701 - DNA, 1062 bp, Artificial Sequence
  derived and/or modified sequence
atgctattcaacctgcgcattctacttaacaatgctgcgtttcgaaacggccacaatttcatggtcagaaattttcggtgcggacagccattgcagaacaaggtccaattgaaaggacgcgacttgctgacgcttaaaaacttcacaggagaggaaatcaaatacatgctctggctgagcgcagacttgaaatttcgcatcaagcaaaaaggggaatacctccctctgctgcagggaaaatcactcggtatgattttcgaaaagcgaagtacacggacaaggctgtccacagagacggggtttgctctcctgggcggacacccctgcttcctcaccacacaggatatccatctgggcgtgaacgaatccttgaccgacaccgcccgcgtgttgtcctcaatggcagacgctgttctggctcgcgtgtacaaacagagcgacctggacacactggcaaaggaagcgtccatccccatcattaatggtctgtccgatttgtaccacccaattcagatccttgcagactatctgactctgcaagaacattactcatccctgaaggggcttaccttgtcctggatcggggacggcaacaacattctgcatagtatcatgatgtcagctgcaaagtttggcatgcatttgcaggccgccactccgaagggctacgagccggatgccagtgtgacaaaactcgccgagcagtacgcaaaagagaacgggacaaagctgttgttaacaaacgatcctctcgaggctgctcacgggggtaatgtactcatcacagatacctggatcagcatgggtcaggaagaggaaaaaaaaaagcggctccaggcttttcagggctaccaggttaccatgaagactgccaaggtggccgcttccgactggacatttttgcactgtctaccccgcaaacctgaggaggtggacgacgaggtcttttacagtcccagatctcttgtgttccccgaggccgagaacagaaaatggaccatcatggcggtcatggtctccctgcttaccgattattcaccccagctccagaaacctaagttt

SEQ ID NO: 11702 - DNA, 1062 bp, Artificial Sequence
  derived and/or modified sequence
atgctctttaacctgagaattcttttgaataatgcagcctttcggaatgggcacaacttcatggtcaggaatttccgctgcggacagccgctgcagaacaaggtgcaactgaagggccgggatttgctgactctgaagaacttcactggtgaagaaatcaagtacatgctgtggctgtccgctgatctgaagttccggatcaagcagaagggagaatacctgcccctgctgcaaggaaagagcttgggaatgatcttcgaaaagcggtccacccggacccggctctccactgaaactggtttcgcgctgttggggggtcacccgtgttttctcaccactcaggatatccacctcggagtcaacgagagcctgaccgataccgcccgcgtgctgtcgtcaatggccgacgctgtgctggcaagagtgtacaaacaaagcgacctcgacaccctcgcgaaggaggcttcgatcccgatcatcaacggactctccgatctgtaccatccgattcaaatcctggctgattacttgactctgcaggaacactacagctcgcttaaggggcttactctgtcgtggatcggcgacgggaacaatatactgcactctatcatgatgtccgcggctaagtttggaatgcacctgcaggcggcaaccccgaaggggtacgaacctgacgcttctgtgaccaagctcgccgagcagtacgccaaggaaaatggaaccaaactgctgctgacgaatgacccactcgaggccgcccacggaggcaacgtcctgatcaccgatacttggatctccatgggccaagaggaagaaaagaagaagaggctccaggcattccagggctaccaggtcactatgaaaactgccaaggtcgctgcctcagactggaccttcctgcactgcctcccccggaagcccgaggaagtggacgatgaggtgttctactcccctcgctcgctcgtgtttccggaagcggagaatcgcaagtggactatcatggcggtcatggtgtcacttctgaccgactactccccgcaactgcaaaagccgaagttc

SEQ ID NO: 11703 - DNA, 1062 bp, Artificial Sequence
  derived and/or modified sequence
atgctctttaatcttcgtatactgttgaacaatgctgcgttcagaaacggtcacaactttatggtgcggaacttcagatgcggtcagccgctccaaaacaaagtgcaacttaagggcagggatctgctcactctcaagaatttcaccggagaagagatcaagtacatgttgtggctttcagcagacctcaagttcagaatcaaacaaaagggagaataccttcctcttctgcagggaaagtcccttggcatgatttttgaaaaacgctcgaccaggacgagactgtcaaccgaaaccggattcgctttgctcgggggacatccgtgttttcttactactcaagacatccacttgggtgtcaatgaaagcctgactgatactgccagagtgctctcatccatggctgatgccgtgctggcacgcgtgtataagcagtcggatttggacacccttgcaaaggaagcaagcattccaatcattaacggactttcagacctttatcaccctattcagattctggcggattaccttacccttcaagagcattacagcagccttaaaggccttactctcagctggattggagatgggaacaatatacttcatagcattatgatgagcgcagcaaagtttggaatgcatttgcaagctgcaaccccaaaaggatacgagcccgatgcgtcggttaccaaacttgcagagcaatacgctaaagaaaacgggactaaacttcttctgaccaacgatcccctggaagccgctcatggcggaaacgtcttgattaccgacacctggattagcatgggtcaagaggaagaaaagaagaagcgtttgcaggcctttcagggctaccaagtcaccatgaaaaccgcaaaagtggccgcctcggattggacgtttctgcattgtctgccgcgcaagccagaggaagttgatgacgaagtgttttactctcctcgctcacttgtgtttcctgaggcagagaatcggaagtggaccataatggcagttatggtgtcgctgctgactgactacagtcctcagcttcaaaagcccaagttt

SEQ ID NO: 11704 - DNA, 1062 bp, Artificial Sequence
  derived and/or modified sequence
atgctgttcaacctccggattctgctgaataatgccgctttcaggaatgggcacaacttcatggttagaaactttagatgcgggcagcctctacagaataaggtgcagctcaaaggcagggatctcctgactctcaagaacttcactggtgaggagatcaagtatatgctgtggctgtccgcagatttgaaatttcgcatcaagcagaagggagagtatctacccttgttgcagggcaagagcctcggcatgattttcgagaagaggtcaacccgcactcggctatcgaccgaaactggcttcgcattgttgggcggacatccatgttttcttacgacgcaagacatccatctcggagtaaacgaatctctgactgacaccgcgcgagtactgtctagcatggccgatgcagtcctggcccgggtttataagcagagtgatcttgacaccctggctaaagaagcatctattcccatcattaatggcctgtctgatctgtaccaccctattcagattttggcagattatctgaccctccaggaacactattcttctctgaaaggactgaccctgtcctggatcggagacgggaacaatatactgcattctatcatgatgagcgccgccaagttcggaatgcacctccaggccgctacccctaaggggtacgagccggatgccagcgtgaccaaactcgccgagcaatacgccaaggagaatgggaccaaactgctgttgacaaatgaccctttggaggccgctcatgggggcaacgtactgattaccgacacctggataagcatgggacaggaggaggaaaaaaagaaacggctgcaagcgtttcaggggtaccaggtgactatgaagactgcgaaagtggccgcttccgattggacctttctgcactgtctcccacgaaaacccgaggaggtggatgacgaagtgttctactctcctcgtagcctagttttcccggaagctgagaaccgaaaatggaccatcatggctgttatggtgtcgctgctgaccgattattcaccccagctacaaaagccaaagttc

SEQ ID NO: 11705 - DNA, 1062 bp, Artificial Sequence
  derived and/or modified sequence
atgcttttcaacctcaggatactgttgaacaatgccgcctttaggaacggacacaactttatggtccggaacttcagatgtggtcagccactgcagaacaaggtccagcttaaaggtcgcgatctgctcacccttaagaatttcactggggaagagattaagtacatgctgtggctcagcgccgatcttaagtttaggatcaagcaaaaaggagagtatcttcctctgctccagggaaagtcacttgggatgatttttgaaaaacggtccaccaggacccgactgtctaccgaaacgggctttgcccttttgggaggacacccctgctttttgactacccaggatattcatctgggagtgaatgagtcgcttacggatacggcacgtgtgctttcaagcatggccgacgcggtgttggcacgtgtgtacaagcaatccgatcttgacaccttggcgaaagaagcgtctattcctattatcaacggcctgtccgatttgtaccatcctatccaaatactcgcagactacctcactctgcaagagcactacagctctctgaagggtctgaccctgtcgtggattggagatggaaacaacatactgcattcgattatgatgagcgcagcaaagtttggaatgcatctgcaagcggctacccctaaggggtacgagccagatgccagcgtcacgaaacttgccgagcaatacgcgaaggagaacggaactaagctccttctcaccaatgatccactcgaagcggcacatgggggaaatgtgcttattaccgatacgtggatctcaatgggccaagaggaagaaaagaagaaacggcttcaggcatttcaaggctaccaagtgaccatgaaaacggctaaggtcgcagcatccgactggacctttctgcattgtctgcctcgaaaaccagaagaagttgacgacgaggttttctacagcccgagatccttggtgttcccagaagcagaaaaccgcaaatggactattatggcagtgatggtgtcgcttctgactgactattcaccacagctccaaaagcccaaattc

SEQ ID NO: 11706 - DNA, 1062 bp, Artificial Sequence
  derived and/or modified sequence
atgttgtttaacctccggattttactgaacaatgccgcatttcggaatggacataattttatggttcggaactttagatgtggccaacccctacagaataaagtgcagctgaaaggacgcgatctgctgaccttaaagaactttacaggtgaggaaataaaatatatgttatggctgtccgcagatcttaagtttagaattaagcaaaaaggtgaatacctgcctctgctccaggggaaaagcttaggaatgattttcgagaagaggagtaccaggacaagactgagcacagagactgggttcgcacttctgggaggtcacccatgttttctcacaacccaagatatacacctgggcgtcaacgagtccctcaccgacacagcccgagtgctcagtagtatggcagatgctgtgctggctagggtctataagcagtccgacttagatactctggcaaaagaggcctccatacctatcatcaacgggctgtcagacctgtaccatcctatccagattctagcagattacctgacactgcaggagcactactcttcactcaagggactcactctgagctggattggagatggaaacaacattttacactcaattatgatgagcgcagccaagtttggaatgcacctgcaggctgctaccccaaagggctatgagccagacgccagtgtaaccaaattagccgagcaatacgcaaaagaaaatggcacaaagcttctgctgaccaatgatccactggaggccgcccacggggggaacgttctgatcaccgacacttggatttctatgggccaggaagaggagaagaagaagcgattgcaggcatttcagggttaccaggttactatgaagacagctaaagtggcagctagtgactggacctttctgcattgcttgccacgtaagcctgaggaggtggatgatgaggtgttctatagccctaggagcctagttttcccagaggctgaaaatagaaaatggactataatggcagttatggtttccctgctgaccgattatagcccccagctgcagaagccaaaattc

SEQ ID NO: 11707 - DNA, 1062 bp, Artificial Sequence
  derived and/or modified sequence
atgctctttaacctgcgtatcctcctcaataatgccgctttccgaaatggacacaactttatggtgcgaaatttccgttgtggccaacccctgcagaataaggtgcagctgaagggccgcgacctactcaccctgaagaacttcacgggcgaagagattaagtatatgctttggctttcggctgatctaaagttcagaattaaacagaagggtgagtatctccccttgctccagggcaaatccctcggaatgatctttgagaagcggagcacgcggacaagactgtcaacggagaccggattcgctctccttgggggccatccttgcttcttgacaactcaggatatccaccttggggtgaacgagtccctgactgatactgcacgcgtcttatcttcaatggccgacgcagtattggcccgggtctacaagcagtctgacctcgatactttggcaaaagaagcgagcatccctattataaatggcttgtcggacctatatcatcccatccagatcctcgccgattaccttactctccaagaacactattcttccctgaagggcttgactctgtcctggatcggcgatggtaataacattctccatagtataatgatgtctgctgctaagtttggtatgcatcttcaagctgccactccaaaaggatacgagcctgacgccagcgtcactaagctggcagaacagtatgcaaaagaaaacgggaccaaactccttttgactaacgacccgttggaggctgcccatggaggaaatgttcttatcaccgacacctggatctcgatgggacaagaagaagagaagaagaagcggctgcaggcgttccagggttaccaggttactatgaaaacagcaaaggtggctgcgtcagactggacattcctccattgcctcccacgaaaacccgaagaagtggacgacgaagtcttctactccccacgttctcttgtctttccagaggctgaaaatcggaagtggacgatcatggccgtgatggtcagcctgcttactgattactccccacagcttcagaagccaaagttc

SEQ ID NO: 11708 - DNA, 1062 bp, Artificial Sequence
  derived and/or modified sequence
atgcttttcaatttaagaatacttcttaataatgcagcattccgtaatggtcataattttatggttagaaatttcagatgtggacaaccattacaaaataaagttcaattaaaaggtagagatttattaacattaaaaaatttcacaggagaagaaattaagtatatgttatggttatcagctgatttaaaatttagaatcaaacaaaaaggagaatatcttccacttcttcagggtaaatcattaggaatgattttcgaaaaacgttcaacaagaactcgactttctactgaaactggatttgcattattaggtggacatccatgctttttaacaacacaagatatacatttaggagttaatgaatcattaactgatacagctagagttttatcttcaatggctgatgctgttcttgcaagagtatataaacaatcagatttagatacgttagctaaagaggcatcaataccaattattaacggtttatctgatttatatcatccaattcaaattcttgcagactaccttacacttcaagaacattatagttctttgaaaggacttacactttcatggataggagatggaaataatattcttcattcaattatgatgtcagctgcaaagttcggaatgcatcttcaagcagctactccaaagggatacgaaccagatgcatcagttactaaattagcagaacaatatgctaaagaaaatggaactaagcttcttcttacgaatgaccctctagaagctgctcatggaggtaatgtacttattacagatacatggatttcaatgggacaagaagaagaaaaaaagaaaagattacaagcatttcaagggtatcaagttacaatgaagacagctaaagttgcagcatctgattggacattcttacattgtttacctagaaaaccagaagaagttgatgatgaagttttttattcaccacgatcattagttttcccagaagcagaaaatagaaaatggacaattatggcagttatggtatcattactaacagattattcaccacaattacaaaaaccaaaattt

SEQ ID NO: 11709 - DNA, 1062 bp, Artificial Sequence
  derived and/or modified sequence
atgctgttcaacctgcgcattcttctgaataacgcagccttcaggaacggccataacttcatggtgcgaaactttaggtgcggacagcccttgcaaaacaaggtgcagctcaaaggccgggatcttcttacgctgaagaacttcaccggagaagaaatcaaatacatgctctggctgagcgcagacctgaaattccgcatcaagcagaagggagaatacctgccgctgctgcagggaaagagtctcggaatgatcttcgagaaacggagcacccgcacccggctgtcaaccgaaactggcttcgccttgctgggaggtcatccgtgctttcttacgacccaagacattcacttgggcgtcaacgagtcgctgaccgacactgccagagtgctgtcctccatggccgacgctgtcctcgcgagagtgtacaaacagtcagatctggatactctggcaaaggaagcctccattcccatcatcaatggactgtcggacctgtaccaccccattcaaatcctggcagattacctgaccctgcaggagcactactcctccctgaaaggactgacgctttcatggatcggagacggcaataacatccttcactcgatcatgatgtctgctgcgaaattcgggatgcacttgcaagctgccactccaaaggggtacgaacctgacgcctccgtcactaagctcgccgaacaatacgccaaagagaacggtaccaagctgcttctgaccaacgatccgctggaggcagcccatggaggaaacgtcctcatcaccgacacctggatcagcatgggtcaagaagaagagaagaagaagaggctgcaggccttccagggatatcaagtgaccatgaaaaccgcgaaggtggccgctagcgactggaccttcctccattgcctgccaagaaagcccgaagaagtggatgacgaggtcttttactcgcctcgatcgctggtattccctgaagctgagaatcgcaagtggaccatcatggccgtgatggtgtcgcttctgaccgactactcgcctcagctgcagaaacctaagttt

SEQ ID NO: 11710 - DNA, 1062 bp, Artificial Sequence
  derived and/or modified sequence
atgctgtttaacctgcgcattctacttaataacgccgccttcaggaatggccataacttcatggtgcgaaactttcggtgtggccagcctcttcaaaacaaagtgcaactgaaggggcgagacctgctgaccctgaagaattttaccggtgaagagattaagtatatgctgtggttgtcagcagatttgaagttcaggattaagcagaagggagaatacctccccctgctgcaggggaagagcctcggtatgatttttgaaaagcgctcaaccaggacgagattgtcgaccgagacagggttcgcactgctgggcgggcatccctgtttcctgaccactcaggatattcacctgggcgtgaacgaaagcttaacagatacggcacgcgttctgagctccatggccgacgcggtcttggctagagtatataagcagagtgatttggacaccctggcaaaggaagctagcatccccatcattaatgggctgtctgatctgtatcaccctatccagattctggccgattacctaacactgcaagagcactactcatctctgaaaggtctgaccctgtcctggataggcgacggcaacaacattctccattccatcatgatgtctgcggccaagttcggtatgcatctccaggccgccacccctaaaggatacgagcctgatgcaagcgtaactaagctggctgagcagtacgcaaaggagaacgggacgaagctgctccttacaaatgacccgcttgaggctgcacacggcggcaacgtgctgattacagatacatggatctctatgggccaagaggaggagaagaaaaagcggctgcaggcctttcaaggctatcaggtgacaatgaagactgctaaggtagccgcctccgattggacttttctccattgtttgccaagaaagcctgaagaggtggatgatgaggtgttttactcccctcgatccctagtgtttccagaagcggaaaataggaaatggaccatcatggccgtgatggtgtccttgctgaccgactactcaccacagctccaaaaaccaaagttt

SEQ ID NO: 11711 - DNA, 1062 bp, Artificial Sequence
  derived and/or modified sequence
atgctgtttaacttgcgcatcctgctgaataacgccgccttcagaaacgggcacaattttatggtaagaaacttccggtgcggtcagcctctccaaaacaaggtgcaactgaagggacgtgacctcctgacgctcaagaactttactggagaggagattaagtacatgctctggctgtccgcagatctcaagttccgcatcaaacagaagggagagtatttgccgctgctgcaggggaagtcgctcggcatgatcttcgagaagagatcaacccgcactcgactcagcacggaaacgggattcgctctgctgggcggccatccctgcttcctgactactcaagatatccatctgggcgtgaatgaatcgctgaccgacaccgctcgggtcttgagctctatggccgacgctgtgctggcccgcgtgtacaaacaatcagaccttgacactctggccaaggaagcgtccatcccgattatcaatggactctccgatctttaccatccaatccagattcttgctgattacctgactctccaggagcactacagctcattgaagggactgaccctctcctggatcggagatggcaacaacatcctccactcaatcatgatgtcggccgcaaaattcggtatgcacctccaggcagcgacccccaaaggatacgagccggacgcttcggtgactaagctcgcggaacagtacgcgaaagaaaacggaaccaagctgctgctgaccaacgaccctctggaagcagcgcacggtggaaatgtcctgatcaccgacacttggatcagcatggggcaggaggaagaaaagaagaaaaggcttcaggccttccaaggctaccaggtgactatgaaaaccgcaaaggtggcggcctccgattggaccttccttcattgtttgcctcggaaaccagaggaagttgacgatgaggtcttttactccccgcggagcctggtgttcccggaagccgaaaatcgcaagtggactatcatggccgtcatggtgtcgctgctcaccgactactcgccacaactgcagaagccgaagttc

SEQ ID NO: 11712 - DNA, 1062 bp, Artificial Sequence
  derived and/or modified sequence
atgctgttcaacctcaggatacttctgaacaacgcagccttcagaaacgggcataacttcatggtcagaaacttcagatgcggacagccactgcagaacaaggtgcagctcaaggggagagatcttctaacacttaagaacttcacaggggaagaaattaaatatatgctgtggttatcggctgatcttaaattccgaatcaaacagaaaggagaatatcttcctttgcttcaggggaaatcccttgggatgatcttcgaaaaaaggtctacacgcacaagactgagtacagagactggatttgctctcctaggagggcatccctgttttctcacaactcaggatatccatttgggagtgaatgaatccttaactgatacagcaagggttctgtcctctatggccgatgcagtccttgctagggtgtacaaacagtccgatctggacactcttgccaaagaagctagtataccaatcattaacggactctctgatctttatcatcctatacagatattagccgattatctaacactgcaggaacactattcatcactaaaagggcttactttgtcttggattggggatgggaacaatatattgcactcaatcatgatgtctgccgcgaaattcgggatgcatttgcaagcggccactcccaaaggatacgaacccgatgcttctgtgacaaaactcgctgagcagtatgctaaagagaacggaacaaaactcctactgactaacgatccactggaagccgctcacggaggaaatgtgctgattactgatacgtggatctctatgggacaggaagaagaaaaaaaaaaaaggctccaggcattccagggataccaagtaacaatgaaaacagcaaaagtagccgcaagtgattggacttttttacattgcttaccacggaaaccagaagaagtggacgacgaagtattttatagtccaaggtccctggtcttccccgaagccgagaaccggaaatggactatcatggctgtgatggtgtccctcctgacagattactctccccaacttcagaaacccaaattt

SEQ ID NO: 11713 - DNA, 1062 bp, Artificial Sequence
  derived and/or modified sequence
atgctgttcaatcttcgtatcttgcttaacaacgccgctttccgcaacggtcataatttcatggttcgcaatttccggtgcggacagcccctgcagaataaggtgcagctgaagggccgcgacctgctgaccctaaagaacttcacaggcgaggaaattaagtatatgttgtggctgtcagctgacctgaaattccgaatcaagcagaaaggtgagtatctacctcttctccagggaaaatctctgggtatgatcttcgaaaagcggtccacacgtacgcgcttgtccactgagacgggctttgcccttctcgggggtcacccatgcttcctgaccacacaggatatacacctgggggtcaacgagagtctgactgatacagctcgggtcctgagtagcatggctgatgctgttttagcccgagtgtacaagcaatctgacctggatactttggcgaaggaggccagtataccaataatcaatgggttgtcggatttgtaccacccgatccagatactcgccgactatttaactttgcaagagcactacagttcactcaagggactcaccctgtcctggattggtgatggtaataatatcctgcactcaattatgatgtctgccgccaaattcggcatgcacctccaggctgccacacccaaggggtatgaaccagatgccagcgtaaccaagttggccgaacagtacgcgaaagaaaatggcaccaagttgttgctgacaaacgacccattagaggccgcccatggggggaacgtattaattacagatacttggatctccatgggccaagaggaggagaagaagaagcgactgcaagccttccaagggtaccaggtgacaatgaaaactgcgaaagtggctgcttccgactggacctttttgcactgcctgccgcgcaagcccgaagaggtggatgatgaggtgttttactcacctcgctccctggtgttccccgaagccgagaaccggaagtggaccatcatggctgtcatggtctccttgttgaccgactatagccctcagctgcagaagcctaagttc

SEQ ID NO: 11714 - DNA, 1062 bp, Artificial Sequence
  derived and/or modified sequence
atgctgttcaatctgcgaatcctccttaacaatgctgcctttagaaacgggcacaatttcatggtcaggaattttcgttgcgggcaaccactgcagaacaaggttcagctgaaaggacgggacctcctcacattaaaaaactttacgggcgaagagatcaagtatatgctgtggttgtccgccgatctaaagtttcgaattaagcaaaaaggcgagtatctgcccttgcttcaggggaagtctctggggatgatctttgaaaaacgttcaacccgaacgaggctctcaaccgaaaccgggtttgcccttttgggaggccatccctgcttcctcactacccaggacatccatctgggggttaatgagtcactgactgacacggccagggtcctgtccagcatggcagatgcagtgctggcacgcgtctacaagcagtcagatttggacactctcgcaaaagaggcatcaattcccatcatcaatggcctcagtgatctgtaccaccctatacagatcctcgctgactatttaactttgcaagagcactactcaagcctaaaaggtctgactttgtcctggattggcgatgggaacaacattctccacagcattatgatgtcagcggcgaagtttggcatgcacttgcaagccgcaacacctaagggctacgaacccgatgcaagtgtcaccaaactggccgaacagtatgccaaagaaaacggaacaaaattgttgctcaccaacgatcctctggaagcagcgcatggaggcaatgtgctcatcacagacacctggattagcatgggtcaggaggaagagaagaagaaacgactccaggcctttcaaggctatcaagttacaatgaaaactgccaaggtagccgcaagtgactggacttttctccactgcctaccacggaaaccggaagaggtagatgatgaggtgttttattcgccaagatccctggtttttcccgaggcggagaacaggaagtggacaattatggctgtaatggtgtcactgttgaccgactactcccctcagctgcagaaacccaaattc

SEQ ID NO: 11715 - DNA, 1062 bp, Artificial Sequence
  derived and/or modified sequence
atgttgttcaacctccgcattctgctgaataatgccgccttccgaaatggacacaatttcatggttagaaatttcaggtgcggccagccactacagaacaaagtgcagctcaagggacgggacctgttaacactgaagaattttaccggggaagagattaaatacatgctgtggctgtctgcagacttaaagtttaggatcaagcaaaagggagaatacctcccgctcttgcagggaaagtcattgggaatgatctttgaaaagcgtagcacacgcactcgcctcagtacggaaacagggttcgcacttctgggtggacatccatgttttctgacgacccaggacatccacttaggggtcaacgagagccttacagataccgccagggttctcagttctatggccgacgccgtgctggcaagagtgtataagcagtcggacttagatactcttgccaaggaggcctcaattcctattatcaacgggctaagtgatctctatcatcccattcaaattttggccgattatcttaccttacaagaacattattcgtctctgaagggactgactctctcctggattggcgacggaaacaacattctccattctatcatgatgtcagccgcaaagttcggcatgcatctgcaggccgccacccctaaaggctacgaacccgatgcctcagtgacaaaattggccgaacagtacgcaaaagagaatggaacgaaactgctgctgacgaacgaccccctggaggcagcccatggaggcaacgttttgatcaccgacacatggatatccatggggcaagaagaggaaaagaagaagcgccttcaagccttccagggataccaagtcacgatgaagacggctaaagtcgccgcgagtgattggacattcctgcactgcctgcctcgcaaacccgaggaggtggatgatgaggtcttctacagccctaggtccctggtttttcctgaagcggaaaataggaaatggactattatggcagttatggtcagccttcttacagactattccccacagttacagaaaccgaaattt

SEQ ID NO: 11716 - DNA, 1062 bp, Artificial Sequence
  derived and/or modified sequence
atgctgtttaatttaagaatactgctgaataatgccgcctttaggaatggccataactttatggtgagaaattttagatgtggtcagcccctgcaaaacaaggtgcagctcaagggaagggatctgctaactctcaagaacttcacaggcgaagagattaaatacatgctttggctgagtgcagacctgaaatttagaatcaagcagaaaggggaatacttgcccctgctgcaaggcaaaagtctgggcatgatttttgaaaagcgatccactaggactcggctgtccactgaaactggtttcgccctgctaggcggccacccatgcttcctgacaactcaagatatccatctcggagtgaacgagtctctgaccgataccgcacgtgtcctttccagcatggctgacgccgtcctcgccagggtctacaagcagagtgatctggacacgttagctaaagaagcttccatacccataatcaacgggctcagtgacttgtaccaccccatacaaatactggcagattacttgactttgcaggaacactactcgtccctgaaggggctcactctctcttggattggggatggaaataatatcttacattctattatgatgtctgctgcaaagttcgggatgcacctacaggccgcaacccccaaggggtacgaacccgacgcctccgtgactaagctggccgagcagtatgccaaggaaaacggtaccaagctccttctgactaatgaccctctggaggcggcccacggaggcaacgttcttataacagacacatggatcagtatgggccaggaggaagaaaaaaaaaagagactgcaggctttccagggctaccaggtcacaatgaaaacggcgaaggtcgctgcctccgactggacctttctgcactgtctgcctagaaaaccggaggaagtggatgacgaggtgttttattcccccagatccctcgtgttccccgaagccgaaaatcgaaaatggacaattatggccgttatggtcagtctcctgaccgactatagccctcagcttcagaagcctaaattc

SEQ ID NO: 11717 - DNA, 1062 bp, Artificial Sequence
  derived and/or modified sequence
atgctgtttaacctgcgcattctgctaaacaatgccgcgttccgcaacgggcacaattttatggtgcgcaattttcgatgtggccagccattgcagaacaaggtgcagcttaaaggccgggatctgttgactcttaagaacttcacaggagaggagatcaagtacatgctgtggctgtctgccgatcttaaatttagaatcaagcagaaaggcgaatacctccctctgctgcagggcaagtcattgggtatgattttcgagaagcggagtacaagaaccagattaagcactgagactgggttcgcccttcttggcggccatccctgtttcttgacaacgcaggatatacatctcggcgtaaacgaaagcttgaccgatacagcgagggtgctgtcttccatggcagatgcggttctagcccgggtgtataagcagagtgatcttgataccctggcaaaagaagcctcaattcccattattaatggtttgtcggacctctatcaccccattcagatattagccgactacttgactcttcaggagcattattctagccttaaaggtctgaccctgtcttggatcggcgatggaaataacattctccattctattatgatgtctgccgccaagtttggcatgcacttgcaagccgcaaccccgaagggatacgagccagatgcttcagtcacaaagctagcagagcagtacgcgaaggagaatggaaccaaacttttgttaacaaatgacccactggaagctgctcatggaggtaacgtgctcatcactgatacctggatctccatgggacaggaggaggagaagaagaaaaggctccaggcctttcaggggtatcaggtcaccatgaaaacggcgaaggtggcggcttcagattggacgttccttcactgcctgcctcgtaagcccgaagaggttgacgacgaggtcttctactcccctcgcagcctggtgtttcctgaggccgaaaatcgcaaatggaccatcatggccgtgatggtctcattgctcacagactactccccgcagctacaaaagccaaagttc

SEQ ID NO: 11718 - DNA, 1062 bp, Artificial Sequence
  derived and/or modified sequence
atgttattcaatctgagaatactcctgaacaacgccgcattccgaaatggccataacttcatggttcgcaacttccgatgcgggcagccactgcagaacaaggtgcagctcaaaggaagagatttgttgacactgaagaactttacaggggaggagataaagtacatgttatggctgtccgcagacctgaaattcagaataaaacaaaagggtgagtacctacctctgctgcaaggaaagtccctcggtatgattttcgagaagaggtcgacccgaacacgcctgtcgaccgagaccgggttcgccttattgggggggcacccctgctttctcacaactcaggatatccatctgggagtgaatgagtctctaaccgacaccgctagagtgctcagcagcatggccgatgctgtcctggcgagggtctataagcaatctgacctggataccctcgccaaggaagcttctatccctatcataaacggcctgagtgatctataccatccgattcagatcctggcggattacctaaccctccaggaacactacagttccctaaaaggtttgactttgtcttggattggcgatggtaataatattctccactcgataatgatgtcagcggcaaagttcggcatgcaccttcaggctgcaacccccaaaggctatgaacctgatgcctctgttacaaaactggctgaacagtacgctaaagaaaatgggacaaaactgcttctgacaaacgatccacttgaggcggcccatggaggaaatgtcttaataaccgatacttggatatcgatggggcaggaagaagagaaaaagaagaggctacaggccttccaaggatatcaggttacaatgaaaaccgctaaggttgcggcatctgactggacgttcctccactgcctgcctcgcaaacccgaagaggtggacgatgaggtgttttactcgccacgaagcttagtgttccctgaagccgaaaaccgtaagtggactattatggctgtgatggtttctctgctgaccgattacagcccccagctgcagaaaccgaagttt

SEQ ID NO: 11719 - DNA, 1062 bp, Artificial Sequence
  derived and/or modified sequence
atgctcttcaacctccgaattctgttaaacaatgcggctttcagaaacgggcacaactttatggtgcgaaatttcagatgcggtcagcccctccaaaataaggtgcaactcaaaggcagagaccttttgaccctgaagaacttcacaggcgaggaaatcaagtatatgctgtggctctcagccgacctcaagttccggattaagcagaagggagaatatctgcctctgctccaagggaagagcctggggatgatctttgagaaacggtcaactcgcaccaggctgtcaaccgagactgggtttgcgctactcggaggccatccttgtttccttacaacacaggacattcatcttggggtgaacgagtccttgaccgacacagcccgggtgctgagctcaatggccgatgcagttctcgcccgggtctataagcagtctgatctggacaccctggcaaaagaggcttcaataccaattattaacggcctgagcgatctctaccatcctatccagattctcgcggattacctgactctccaggaacactattcatctctcaagggtcttacactctcttggatcggcgacggcaataacattctgcatagcatcatgatgagcgcagccaagttcggcatgcatctccaggccgcaacaccgaagggctacgagccagatgcatccgtgactaagttggccgagcaatatgcaaaggagaatgggacaaagctacttcttaccaatgatccccttgaggccgcccatggcggaaacgtcttaataacagacacatggataagcatgggtcaggaggaggagaagaaaaaaaggctccaagctttccagggctaccaggttaccatgaagactgccaaagtagctgctagcgactggactttcctgcattgtctgccacgtaagccagaagaggtcgatgacgaggtcttctactcgccccgatctctcgtgttccccgaagcggagaacagaaaatggaccataatggcagtgatggtgagtctgctgacagattattcaccacagttgcagaagcccaagttc

SEQ ID NO: 11720 - DNA, 1062 bp, Artificial Sequence
  derived and/or modified sequence
atgttgttcaaccttagaatactgctgaacaacgcagccttcaggaatggccataatttcatggtgcggaattttaggtgcgggcaaccacttcagaacaaggtgcagctgaaaggtcgggatctgcttaccctgaaaaacttcacgggagaagaaatcaagtacatgctgtggctgtctgcagatttgaagtttcgaatcaaacagaagggtgagtatctgccactcctacagggcaaatccttgggaatgatatttgagaaacggagcactcgtacacggctgagcaccgagacagggtttgccctgctgggagggcatccatgtttcctcaccacacaggatatccacctgggggtgaacgaatctctgactgataccgctcgggtcctttcatccatggcggacgccgtgctggcccgcgtgtataaacaatcagatctagatacactcgccaaggaggcgtctatccccatcattaacggtctgtctgatctatatcaccccattcagatcttggctgactacctgacattgcaggagcactacagtagcctgaagggattgaccctgagctggataggggatggaaacaatatcctgcactccatcatgatgtccgctgctaagtttggaatgcacttacaggcagctacgccgaagggatatgagcctgatgctagtgtgacaaaactggcagaacagtatgctaaagagaacggaaccaaactgctgctgacgaacgatccattggaagctgcacatggcggtaacgtgctcatcacggacacttggatctcaatgggccaggaagaagaaaaaaaaaaaagactgcaggccttccagggctatcaggtcactatgaagactgccaaagtggcggccagcgactggactttcctgcactgcctgccacgaaagcctgaagaagttgacgacgaggttttttattcgcctcgttccttggtgttccctgaggccgaaaaccgcaagtggacaatcatggcagtaatggtgtcccttcttaccgactactctccacaacttcagaaaccaaagttc

SEQ ID NO: 11721 - DNA, 1062 bp, Artificial Sequence
  derived and/or modified sequence
atgttgttcaaccttcggatcctgctcaacaacgcagctttccggaatggacataactttatggtgcggaatttccgctgcggacagcctcttcaaaacaaggttcaactcaagggaagagatctgctcacccttaagaatttcactggggaagaaatcaaatacatgctgtggcttagcgccgacctgaagtttcggattaaacaaaagggggaatacctgccactgctccagggaaagtctttgggaatgatcttcgagaaacgatcaacgcggactcgccttagcaccgaaaccggatttgcgctgctcggtggacacccatgtttcctcactactcaggacatccacctgggcgtgaatgagtccctcaccgacaccgcccgcgtcttgagctcgatggcggatgccgtgctcgctcgcgtgtacaaacagtcggatctggacaccctggccaaggaggcgtcgattccgattatcaatggtctttccgacctgtaccacccgatccaaatcctggccgattacttgactctgcaggagcactacagcagcctgaaggggttgactctctcgtggatcggagacggtaacaatattcttcactcaattatgatgtcggccgctaagttcggaatgcatctgcaggctgctaccccgaagggctacgaaccagatgcatcagtgaccaagctcgcggagcagtacgccaaggagaatgggaccaagctcctgcttactaacgatccactcgaggccgcccacggaggaaacgtcctcattactgacacgtggatctcgatgggccaggaagaggagaaaaagaagcggctgcaagcgttccagggataccaggtgacgatgaaaactgccaaggtggctgccagcgattggactttcctccactgcctgcctcggaagccagaagaagttgacgacgaagtcttttactcgccgagatcactggtgttcccggaagcggaaaaccgcaaatggactatcatggcggtgatggtcagcctgctgactgactactcccctcaactgcaaaagccaaagttc

SEQ ID NO: 11722 - DNA, 1062 bp, Artificial Sequence
  derived and/or modified sequence
atgctgtttaatctcagaattcttttgaacaatgccgcatttagaaacggccataactttatggttcgcaacttcaggtgcggtcagccactgcagaacaaggtgcaacttaagggcagggaccttcttacgctgaagaactttaccggtgaagaaatcaaatacatgctgtggctgtccgctgacctgaaatttcgcataaaacagaagggggaatatctgcctctgctgcaaggtaaatccctcggtatgatctttgaaaagcgatcaacccgtactcgactctcgactgagactggctttgcgcttttggggggacacccgtgtttcttgaccactcaagatattcatctgggcgtgaatgagtcactgacggacactgcacgggtccttagcagcatggcagatgcagtgctggcacgggtctacaagcaatcagatctcgacactctggcgaaggaagcctccattcccatcatcaacggtttgtcagacctgtaccatcctattcagattctcgctgattacctgacgcttcaggagcactactcatcgcttaaaggactgacgctgtcatggatcggagacggtaataacattcttcactcgataatgatgtccgcagcaaaattcggaatgcatcttcaagccgccaccccaaagggatacgaaccggacgcctcggtcaccaagctcgccgaacagtacgcaaaggaaaacgggactaagctcctcctgactaacgatccactggaggctgcacatggcggtaacgttcttataaccgatacctggatttcgatgggccaagaagaggagaaaaagaagcggctccaagcatttcagggctatcaggtgaccatgaaaacggcgaaggtggccgctagcgattggaccttccttcactgtctgcctcgcaagccagaagaggtcgatgatgaagtcttttactcccctcgctcactggtgttcccggaagcagaaaataggaaatggaccatcatggcagtgatggtgtcattgctgaccgattattctcctcaactgcaaaagccaaagttt

SEQ ID NO: 11723 - DNA, 1062 bp, Artificial Sequence
  derived and/or modified sequence
atgttgttcaatctccggattctactgaacaatgccgcttttagaaatggccataactttatggtgaggaactttcggtgcgggcagcctcttcagaataaggtacagttgaaagggcgcgatctattaacactgaagaatttcactggggaggaaatcaagtacatgctgtggctgtccgccgacctcaagtttcgcattaaacagaagggcgagtatttgcctctccttcaagggaagtccttggggatgatcttcgagaagcgttcaacgagaacacgactgagcacagagacaggtttcgcccttttagggggccacccctgtttcctgaccacacaggatattcatctgggggttaatgagagcctgaccgacacagcgcgggtgctgagtagcatggctgacgccgtcttggcacgcgtgtataaacagtcagatcttgatacactcgccaaagaggcgagtatccccattatcaatggactgtcagacttgtatcaccccattcagattctggccgattacctgaccctgcaggaacattacagttccctcaaaggactgacattaagctggattggcgatgggaacaacatactacacagcatcatgatgagtgctgccaagtttgggatgcacctgcaggccgctactcccaagggatatgagccagacgcatccgtgacaaagctggccgaacagtacgctaaggagaatgggactaagctgctcctgacaaacgatcctttggaggccgctcatgggggaaatgttctgattactgatacgtggattagtatgggccaggaggaagagaagaagaagagattgcaagcctttcagggttaccaggtgactatgaagaccgctaaggtcgcagcgagcgattggacctttctgcattgcctgcctaggaaacccgaagaggtcgacgatgaagttttctattcaccccgatcactggttttcccggaggcagagaatcgcaagtggaccatcatggctgtgatggtctctttgctgaccgattactctccacagttgcagaagcctaagttc

SEQ ID NO: 11724 - DNA, 1062 bp, Artificial Sequence
  derived and/or modified sequence
atgctgttcaatctgcgtattctgctgaacaacgctgcatttcgcaacggacataacttcatggtgaggaattttcgctgtggccagccgttgcagaataaggtacaactgaaaggccgagatctgctgacgctgaagaatttcaccggtgaggagattaagtatatgctctggcttagcgcggacctgaagtttcgtatcaaacaaaaaggcgaatacctgcctttgctgcagggtaagagcctcggtatgatcttcgagaaacgtagcaccagaacccgcctgagcacggagaccggtttcgcgctcctgggtgggcacccttgcttccttaccacccaggatatacacctgggcgttaacgaatccctgactgatacggcccgcgtactgtcgtcaatggcagacgcagtactggctcgcgtgtacaaacagagcgacctggacacactggcaaaagaagcttctattcctataattaatggcctgtctgacctttaccaccctattcagattctggctgactacttgacgctgcaggaacactactcgagcctgaaggggctgacgcttagctggattggagacggtaacaatattctccactcaatcatgatgagcgcagccaagtttggcatgcacctgcaggcggccacgccgaaaggttatgagccggatgcttctgtcacgaaactggcagagcaatatgcaaaggaaaacggaacaaaactgttgctgacaaacgatccactcgaggcggcccacggcggtaatgtgttgataacggatacctggattagcatgggccaagaagaagaaaaaaagaagagattgcaggcctttcagggataccaggtgacgatgaaaactgctaaggttgcagcatcggactggacattccttcactgcctgcctcgcaagcctgaggaagtggatgatgaggtgttttattccccgaggtctctggtttttccggaggcagagaatcgtaaatggacgattatggccgttatggtaagtcttctgaccgactattcccctcagctgcagaaacctaagttt

SEQ ID NO: 11725 - DNA, 1062 bp, Artificial Sequence
  derived and/or modified sequence
atgctattcaacttgagaatacttctcaataacgctgcgtttaggaatggacataatttcatggttaggaacttcaggtgtgggcagccacttcagaataaagtgcaactaaaaggaagagatctcctcacactaaaaaactttacaggggaggaaataaaatacatgctgtggctaagtgccgatctcaaattcagaatcaaacagaaaggggagtacttgcccctgctgcagggaaaatccctggggatgatatttgaaaagcgctccacacgaactcggctgtcaactgagactggattcgctttactcggggggcacccatgcttcttgacaacgcaggatattcaccttggagtgaacgaatctctgactgatactgcaagggtgttgagttcgatggctgacgccgttttagctcgagtgtacaaacagagtgatctcgacacattagctaaagaagcgtcaataccaatcatcaacggactttctgacctgtatcatcctattcagatcttggccgactaccttacactgcaggaacattactcctctttaaaagggctaactctgtcctggatcggagacggaaataatattctccatagtattatgatgtctgcagccaaattcggaatgcatctacaggcagcaacacccaaaggatatgaacccgatgcgtcagtcactaaacttgccgaacagtacgctaaggaaaacggaactaaacttctcttaacaaatgaccctctggaagctgctcacggggggaatgtcctgatcactgatacttggatcagtatggggcaagaggaagaaaagaaaaaaaggcttcaggcgtttcagggatatcaggttacaatgaaaactgccaaagtcgcagcctctgattggacatttctgcattgcctccctagaaaacctgaagaagttgacgatgaagtgttctattctccccgctccctcgtgttcccagaagccgaaaatcggaaatggacaattatggccgtgatggtctctctcctcactgattatagtccccagctgcagaaacccaaattt

SEQ ID NO: 11726 - DNA, 1062 bp, Artificial Sequence
  derived and/or modified sequence
atgctcttcaacctgcggatcctgttgaataacgccgcattccgaaacggtcacaatttcatggtccgcaactttcggtgcggacagcccctgcagaacaaggtgcagctcaagggtcgggatctgcttacgctgaaaaacttcaccggcgaggagatcaagtacatgctgtggctgtcggccgaccttaagtttagaattaagcagaaaggcgagtacctgccgctcctgcaagggaaatcgttgggcatgatttttgaaaagaggtccaccagaacgcggctttctactgaaacgggatttgctcttctgggaggacacccttgtttcctgaccactcaggacattcaccttggtgtgaatgagtcgttgaccgacactgctcgggttctgtcgagcatggccgacgcagtcttggctcgggtgtacaaacaaagcgacctggataccctggcaaaggaggctagcatcccaattatcaacggtttgtcagacttgtaccatcctatccaaatcctggccgactacctgaccctgcaagagcactactccagccttaagggactcacgctctcctggattggagacggaaacaacattctgcattccatcatgatgtccgcggcaaagttcggaatgcaccttcaggccgctacccctaagggctacgaacctgacgcatcggtcaccaaactggccgagcagtatgcgaaagaaaacggaactaagctgctcctgacgaacgatccgctggaagcggcacatggaggcaacgtgctgatcactgatacctggatctccatgggacaggaagaagaaaagaagaagcggctccaggctttccagggatatcaggtgaccatgaaaactgcgaaggtcgctgcgtcagattggactttcctgcactgccttccacggaaacccgaggaagtggatgatgaagtgttttactccccacggagcctggttttcccagaagccgagaatcggaaatggaccatcatggcagtgatggtgtcgctcttgaccgactacagcccgcaactgcaaaagccgaagttc

SEQ ID NO: 11727 - DNA, 1062 bp, Artificial Sequence
  derived and/or modified sequence
atgttgttcaacttgcggatcctcctgaacaacgcagcatttcggaatggacataactttatggtcagaaactttcggtgcgggcaaccattgcagaataaggttcaactgaagggaagggacttgctgacgttgaagaactttaccggagaggaaatcaaatacatgctttggctttcggcggacctgaagtttaggatcaagcaaaagggtgaatacctgccgcttcttcagggaaagagcctcggcatgatctttgaaaagcgctccactagaacgagacttagcactgagactggattcgcgctgcttggcggacatccgtgcttccttactactcaagacatccatcttggggtgaacgaatccctcactgataccgcgagagtcctgtcgtccatggcggatgcggtccttgcccgtgtgtacaagcagtctgatctggacaccctggcaaaagaagcatcaatacccataatcaatggactttccgacctgtaccatcctatccagattctggcagactaccttaccctgcaagaacattacagcagcctgaaagggctcactctttcgtggattggtgatggtaataacattcttcatagcatcatgatgagcgcagcaaagtttggaatgcacctgcaagcagcaactccaaaaggatacgaacctgacgccagcgtcaccaagttggcagaacagtacgcaaaggaaaacggcaccaagctcctgctgaccaatgatccactggaagcggcacacggtggaaacgtgctcatcaccgatacctggatatccatgggtcaggaggaagagaagaagaaaaggctccaggcatttcagggctaccaggtcaccatgaaaactgccaaagtcgccgcatcagattggacttttttgcattgtctccccaggaagcctgaggaagtggatgatgaggtgttttactccccaagatcgctcgtgttccctgaagcagagaaccggaagtggactatcatggccgtcatggtcagtctgcttacggattacagccctcaacttcaaaagcctaagttt

SEQ ID NO: 11728 - DNA, 1062 bp, Artificial Sequence
  derived and/or modified sequence
atgcttttcaacttgagaatattgctcaataacgctgcctttaggaatggacataactttatggtaagaaactttcggtgtggtcagcctctccagaacaaggttcagttaaagggcagggatctcctcactcttaaaaacttcacgggcgaggaaatcaagtacatgttatggttgtcagcagatctcaagtttagaatcaagcaaaaaggtgagtatctgcctctgctgcagggaaagtctttgggaatgatcttcgagaaaaggtccacgcgcacccggttgtcaactgagactggatttgcgctgctcggcggacatccgtgcttcctgaccacacaagatatacatcttggggtcaacgagtcgctgacagatacagcccgggtcttgtccagcatggcagacgccgttttggcaagagtttataaacaatcagatctcgatactctggccaaggaagcatctatacctattatcaacggtctcagtgacctttatcacccgatccagatactcgctgattatttgaccttgcaggagcactactcttctctcaaaggcctgacactgagctggataggagatggtaataatattctccactcaattatgatgtccgcagccaagttcggcatgcatcttcaggccgccacacccaaaggttacgagccggacgccagtgtgaccaaactggctgaacagtatgctaaagaaaacgggacaaagcttctactgactaatgatccgctggaagctgcccacggagggaacgtgctcattaccgatacatggatctccatggggcaagaggaagagaaaaagaaaaggctccaggcctttcagggttatcaagttactatgaaaaccgcaaaggtagccgcaagcgattggacctttctgcactgcttaccccggaagcccgaggaagttgatgacgaagtgttctactccccccggtctctcgtgtttcccgaggccgagaaccggaagtggaccatcatggccgtgatggtgtccctgctaactgattattccccccagttacagaaacccaagttt

SEQ ID NO: 11729 - DNA, 1062 bp, Artificial Sequence
  derived and/or modified sequence
atgcttttcaatcttagaatcctgttgaacaacgctgcatttcgaaacggacataactttatggtccggaacttccgctgtggccagccactgcagaacaaagtgcagctcaaggggcgcgaccttctgaccctgaagaatttcactggggaagaaatcaagtatatgctgtggctgtctgctgatctgaagttccgcatcaagcagaagggagaatacctgccgctcctccaaggtaagagccttggaatgatcttcgagaagcggtcgaccagaacgcgcctgagcaccgaaaccggattcgcactgttgggcggacacccttgtttcctcactacccaagatatccacctcggagtgaacgagtcgctgacggacaccgcccgcgtcctgtcctcaatggcggacgcagtcttggcccgcgtgtacaagcagagcgatctggacacgctggccaaggaggcttccatcccgatcatcaacggcctgtcagatttgtaccacccgatccaaatcctcgctgattacctcaccctgcaagaacactactcgtctctcaagggcctgactctctcgtggatcggcgacggcaataacatactccacagcatcatgatgtcagcagcgaagtttggcatgcacctgcaggctgcgactccgaaaggatacgaacccgacgcgtcagtcaccaaacttgccgagcagtacgccaaggaaaatggaactaaactccttctgaccaacgacccgttggaggcagcgcacggcgggaacgtgctgattaccgacacttggatctccatgggtcaagaggaggaaaagaagaaaaggctgcaagcctttcaaggataccaggtgactatgaaaaccgccaaagtggcggcctctgattggaccttcctgcactgccttccaagaaagcccgaagaggtggacgatgaggtgttctactcgccccggtcgctggtctttccggaggcggagaaccggaaatggacgatcatggccgtgatggtgtcgctcttgactgattactcgcctcagctccagaagccgaagttc

SEQ ID NO: 11730 - DNA, 1062 bp, Artificial Sequence
  derived and/or modified sequence
atgctgtttaatctgcgcatacttcttaacaacgccgcgtttaggaacggtcacaacttcatggtgcgcaatttcagatgtggacagcccctccagaacaaggtccagcttaaaggtcgtgatcttcttacccttaagaatttcacgggtgaagaaatcaagtacatgctttggctttcggcggatctcaagtttaggattaagcagaagggagagtatctgcccctgctgcaaggaaaaagccttggcatgatttttgagaagcgctcgactcggacccgtctttccactgaaactgggtttgcactcctggggggacatccttgttttcttactacccaagatatccacctcggggtcaacgaatcgttgactgataccgcacgcgtgctgtcctcgatggccgatgccgttttggctagagtatacaagcaatccgatctcgacactctggcaaaggaagcaagcattcccattatcaatggactgtcagatctgtaccatcctatacaaatcctggctgattaccttactcttcaagaacattacagctccttgaaggggcttacgttgtcctggataggcgatggaaataacattcttcatagcattatgatgtccgccgcaaagtttggcatgcatcttcaagctgcgaccccaaagggttacgaaccagatgcatcagtgaccaaactggcagaacagtacgctaaggagaacggcacgaaactccttttgactaatgacccgttggaagcggcacatggagggaacgtgctgatcactgacacttggatttcgatggggcaggaagaggagaaaaagaagagactgcaagcatttcaaggttaccaagtgacgatgaaaaccgccaaagtcgcagcatcggattggaccttcctgcactgccttcctcggaaacctgaggaggtggacgacgaagtgttctattcgccacggagtctggtgtttccggaagcagaaaacagaaagtggaccatcatggcggtcatggtgtcgctgctcaccgactacagccctcaactccagaagcccaagttt

SEQ ID NO: 11731 - DNA, 1062 bp, Artificial Sequence
  derived and/or modified sequence
atgctgttcaatctgaggatcctgctcaacaatgccgccttcagaaatggacataacttcatggtccgcaattttcggtgcgggcagccattgcagaacaaggtccaactcaaggggcgggacctgctgacccttaagaatttcaccggcgaggaaatcaaatacatgctctggctgtcagcagatctgaagttcaggattaagcagaagggagaatacctgccgctgctgcagggaaagtcgctggggatgatctttgagaagcggtcaacccgcacccgactcagcaccgaaactggctttgctctgctcggaggccacccgtgcttcctgaccacccaggatatccacctgggagtgaacgagtcacttacggacactgcccgcgttctcagctccatggcagatgccgtgctggcgcgagtgtacaagcaaagcgacctggacactctcgctaaggaggcttcaatccctatcattaacggactgagtgacctgtaccatcctatccagatcctggcggattacttgactctgcaggaacattactcgtcactcaagggattgaccttgtcctggatcggagacggaaataacattctccactcgatcatgatgtcggccgcgaagttcggaatgcacctgcaggccgctactccaaagggatacgaaccggacgcgtcggtgactaaactggccgagcagtacgccaaagaaaatgggaccaagctgctcctgactaatgacccgctggaggccgcccatggaggaaatgtgctgatcactgatacctggatctccatgggtcaggaggaggagaagaaaaagcggctccaggccttccaagggtaccaggtgacgatgaaaaccgcaaaggtggcggcatcagactggacgtttctccattgtctcccgcgtaagccggaggaagtggatgacgaggtcttttactcgccgaggtcgctggtgttcccggaagccgagaatcgcaagtggaccatcatggccgtcatggtgtctctgctcactgactactcgccacaactgcagaagccaaaattc

SEQ ID NO: 11732 - DNA, 1062 bp, Artificial Sequence
  derived and/or modified sequence
atgttgttcaacctgcggatcctgttgaataacgccgcattccgcaacggacacaacttcatggtgagaaactttaggtgcggacagccgttgcaaaacaaggtgcagctcaagggaagggacctgttgaccctgaaaaacttcacgggcgaagaaatcaagtatatgttgtggctctctgctgatctcaagttccgcatcaagcaaaagggtgaatacctgccgttgctgcagggcaaatcgctgggcatgatcttcgaaaagcgctccactagaactcgcctttccactgaaaccggctttgcgctcctcggtggacacccgtgcttcctgaccacgcaggacattcatctgggagtgaacgaatcactgactgacaccgcccgggtgctgtcgtccatggcggacgctgtgctcgccagagtctacaagcagtcggacttggatactctggccaaagaggcatcaatccctatcattaacgggctctcggacctctaccatccaatccaaatcttggcggattacctgaccctgcaagaacactactccagccttaagggactgactctgagctggatcggagacggcaacaatatcctccactccattatgatgagcgcagctaaattcgggatgcacctgcaggccgctaccccgaaagggtacgagccagatgcctcggtgactaagctggcggagcaatacgccaaggagaacggaaccaagctcctgctcaccaacgacccgctggaagcagcacacggcggaaacgtcttgatcaccgatacgtggatcagcatgggacaggaagaagagaaaaagaagcgcctgcaagcgtttcaagggtaccaggtgacgatgaaaactgctaaagtcgcagcctcagattggactttcctgcattgcctcccgagaaagccggaggaagtggacgacgaggtgttctactcgccccggtccctcgttttccctgaggcggagaatagaaagtggaccatcatggcagtgatggtgagcctgttgactgactacagcccgcagttgcagaagccaaaattc

SEQ ID NO: 11733 - DNA, 1062 bp, Artificial Sequence
  derived and/or modified sequence
atgctgtttaatctgcggatcctgctcaacaatgccgccttcagaaatggacataacttcatggtgcgaaatttccgttgcggccagccgctgcagaacaaggtccagctcaagggccgtgatctgctaacattgaaaaattttaccggcgaggaaatcaagtatatgctctggctctcggccgaccttaagttccgtataaagcagaagggagagtacctaccattgttgcagggtaaaagtctcggaatgatctttgaaaagcgtagcaccaggacacgcctgtccacagaaaccggctttgctctcttgggcgggcacccctgttttcttacgacccaggatattcacctgggagtcaatgagtccttgactgacactgcccgggtcctgtcatctatggcagacgccgtgctggccagggtctacaaacagtcagacctggatactctcgccaaagaggccagtattccgattattaacgggctgtccgatctctaccacccgatccagatcctggccgactatctgacccttcaggagcactactcttcattaaagggacttacgttgagttggatcggggatggcaataatatcctccattctattatgatgtctgcagccaagttcggtatgcacctgcaagccgcgacgccaaagggctacgagcccgacgcctcagtgaccaagctggctgagcagtatgccaaggagaacgggaccaagctgttgctcaccaacgatccactggaagcggcgcatgggggaaacgtgctgattactgacacatggatatccatggggcaggaggaagaaaaaaagaaaaggctacaggctttccagggctatcaagtcaccatgaagaccgctaaggtcgcagcttccgactggactttcttgcactgtctcccccgtaagccagaggaagtggatgatgaagtgttttacagtcctcgttcactggtcttccctgaagcggagaaccgaaagtggacgatcatggcagtcatggtctcgctcctgactgattatagtcctcaactgcagaagcctaaattc

SEQ ID NO: 11734 - DNA, 1062 bp, Artificial Sequence
  derived and/or modified sequence
atgcttttcaacctgcggatacttctgaataacgccgcttttcgtaacgggcacaacttcatggtacgaaacttcaggtgtggacaaccactgcaaaataaggtgcagctcaaggggcgtgacctgttgacgctgaaaaactttaccggcgaggagattaaatacatgctttggctcagcgccgacctgaagttcaggatcaagcagaagggggagtacctgcccttgttacaagggaagtccctaggtatgatattcgagaagagatccactagaacacgtcttagtacagagacgggatttgcactattgggcggccacccctgttttctcaccacacaggacattcatcttggcgtgaacgaaagcctgaccgatacagcaagggttcttagtagtatggccgatgccgttttagctcgtgtatacaaacagtctgatctagacactctggccaaggaggcttccatcccaatcattaacgggttgagtgacctgtaccaccccatccagatccttgctgattacctgacccttcaggagcattattccagcctgaaagggttaacgctgtcctggattggcgatggtaacaacatcttgcactccattatgatgtctgctgccaaatttgggatgcatctgcaggccgccacacctaagggctacgaacctgatgccagcgttaccaagttggccgaacagtacgcaaaggaaaatggcacgaaactcctgctgaccaatgaccctctggaggctgcgcatgggggaaacgtcttgatcaccgatacttggatcagcatgggacaggaggaggagaaaaaaaagcgactccaggcgtttcagggataccaggttaccatgaagacagctaaggtggccgcctcggactggacatttctgcactgcctgccgagaaaaccagaggaagtcgatgacgaggtgttctattccccaagatcactcgtcttccccgaggctgagaataggaagtggacaattatggctgtgatggtgtcactgctgaccgattattccccccagctgcagaagcctaagttc

SEQ ID NO: 11735 - DNA, 1062 bp, Artificial Sequence
  derived and/or modified sequence
atgctcttcaacctgcgaattctgctaaacaatgccgcttttaggaatggccacaatttcatggttcgcaactttagatgtggccaaccgctgcagaacaaagtgcagctgaaaggccgcgatttgttgacactgaaaaatttcacgggcgaggaaatcaaatatatgctgtggttgagtgcagatttgaagtttagaatcaaacagaaaggagaataccttcctctccttcagggtaagagtttggggatgatctttgagaaacgaagtaccagaacaaggctgagcacagaaaccggattcgctttactcggcggacacccctgcttcctgacaacccaagacatacatctgggcgtcaatgaaagcctaaccgacactgctcgtgtgctatctagcatggcagatgcagtgctagccagagtttataaacagtccgacctcgacaccctggcaaaggaggcatctatccccatcatcaatggactgtctgatctctaccatcccatccagatcctcgccgactatctcactttgcaggaacattacagtagtcttaaggggttaactctttcctggatcggggacggcaataacatcctccacagtatcatgatgagcgctgcaaaattcggcatgcacctgcaagcagcgacacctaagggctacgagccagatgcatccgtgacgaaacttgccgagcagtacgccaaagagaatggaaccaagctgctcctgacaaatgatcctttagaagccgctcatggagggaacgtcctgattacagacacatggatttcaatgggacaagaagaagagaagaagaagaggttacaagcattccaaggatatcaggtcacaatgaaaaccgctaaggtcgctgcctctgactggacttttttgcactgtctgcctcgaaaaccggaagaagttgacgatgaggtgttttacagcccacgttccctggtttttcctgaagcagagaatagaaagtggaccattatggccgtgatggtaagcctcctgaccgattactccccgcaactgcagaagcctaagttt

SEQ ID NO: 11736 - DNA, 1062 bp, Artificial Sequence
  derived and/or modified sequence
atgctgttcaacttaaggatcctgttaaataatgcggccttcaggaacggccataacttcatggttaggaatttcagatgtggccagcctctgcagaacaaagtccagcttaagggacgcgacttgcttacattaaagaattttacaggcgaggaaattaagtacatgctttggctgagcgccgacttgaagtttcgcatcaagcagaagggcgagtacttgccattgcttcagggaaagtctctgggcatgatctttgagaaaaggtccacgagaaccagactctctactgaaaccggatttgccctgctgggcggccacccgtgcttcctgactacacaggatatacacttgggtgtgaacgagtccctgactgacaccgcgcgtgtgctgagttcaatggccgacgcagttctggctcgggtgtacaagcaatctgacttagataccctggcaaaggaggcatcaattcccattatcaacggcttgtccgatctgtatcaccctatccagatattagccgattaccttacgctgcaagaacattattcttcgctgaagggtctgacgctctcctggattggcgatggcaataatattttgcattcaattatgatgagtgctgccaagttcggaatgcacctgcaagctgcgaccccaaaggggtatgagcccgacgcttctgttactaagctagctgaacagtatgctaaggaaaacgggacaaagctccttcttacaaacgaccccctcgaggctgcccacggcgggaatgtgctcattacagatacatggatttccatgggccaggaagaggaaaagaagaaaagacttcaggcctttcagggataccaggtcacaatgaagaccgccaaggtggctgcatccgattggacattccttcactgtctacctagaaaacctgaggaggtggatgatgaggtattttatagccccaggtccctggtttttcccgaggctgagaatagaaagtggacaataatggccgttatggtgagtctcttgaccgactattccccccaactgcaaaagcctaagttt

SEQ ID NO: 11737 - DNA, 1062 bp, Artificial Sequence
  derived and/or modified sequence
atgctgttcaacttgcgtattctattgaataatgcagctttccgcaatggacataatttcatggtaagaaatttccgttgcggtcaacccctacagaataaggtgcaactaaaaggacgggacttacttacccttaagaatttcacaggagaagagataaaatacatgttgtggctatccgcggacttgaagtttaggattaaacaaaagggtgaatacctaccattgcttcaaggaaaatccctagggatgatctttgaaaaacgttcaactcggacacgcctgtccactgagactgggtttgcacttctaggaggacacccgtgttttcttacaacacaagatattcacctcggagtgaatgagtcgttgactgacacagcgagagttctctctagtatggcggatgcagtactcgcacgagtttataaacaatctgatttggatactttggctaaggaagcttccattccaatcattaatggtctctcggatttgtaccatccaatacaaattcttgctgattatctcactttgcaagagcactatagctctctaaagggcctgactctttcatggatcggagacggaaataacattctgcactcaataatgatgtcagcggctaagtttggaatgcatctacaagcagctacaccaaagggttacgaaccagacgcatcagttacgaaactcgctgagcagtacgcgaaggaaaatggaactaaacttctcctgacgaatgatccgttggaagcagcacacggtggaaatgttctgattacagatacttggatatcaatgggacaggaggaagagaagaaaaaacggcttcaagcttttcaaggatatcaggtaacaatgaagactgctaaagttgcggctagcgactggacatttctccattgccttccgcgtaaacctgaagaggttgatgatgaagttttttactcgccacggagtctcgtgtttccagaagcagaaaatagaaaatggacaatcatggccgttatggtttcattgctgacagactactcgccacagttgcagaagcctaaattt

SEQ ID NO: 11738 - DNA, 1062 bp, Artificial Sequence
  derived and/or modified sequence
atgctgttcaacctgcggatcctgttgaataacgcggcattcaggaacgggcacaactttatggtgcgcaatttcagatgtggtcaaccgttgcagaacaaggtgcagctgaaggggcgcgatctcctcaccctgaagaatttcactggggaagagatcaagtacatgctgtggctgagcgcagaccttaagtttcgaattaagcagaagggtgagtacctccctctgctgcagggaaaatctctcggaatgatctttgagaaacgctccaccagaacccggctgtcgactgaaactggattcgcactgctcggcggtcacccgtgttttctgacgacccaggatatccatctgggcgtcaacgagtcgctgactgatactgcccgcgtgctgtcaagcatggcagatgccgtccttgctcgcgtgtacaagcaatcagatctcgacactctggcgaaggaagcctccattccgatcatcaacggattgtccgacctgtaccaccccattcagatcctggccgattacctcacgctgcaagaacactactcctcgctgaagggactgaccctgagctggattggcgacggaaacaatatcctgcactcaatcatgatgtcggccgcaaagttcggaatgcaccttcaggccgccactcctaaaggatatgagccagacgcctccgtgactaaacttgcggagcaatacgccaaggaaaatggtaccaagttgcttctgactaacgatccactcgaggccgcccatggcggaaacgtgttgatcaccgatacttggatctccatgggacaggaagaagaaaagaaaaagcggctgcaggcattccaggggtaccaggtcacgatgaaaactgcgaaggtggcggcctccgactggacgttcctccattgcctccctcggaaaccggaagaagtggatgacgaggtgttttacagccctcgctcactcgtgttcccagaagcggagaaccggaaatggaccatcatggcagtcatggtttcgctgcttactgactattccccgcagctccaaaagcctaagttc

SEQ ID NO: 11739 - DNA, 1062 bp, Artificial Sequence
  derived and/or modified sequence
atgctctttaatctgcggattctgctcaacaacgcagcatttcgtaacggacacaacttcatggtcagaaactttagatgtgggcaacctcttcaaaacaaagtgcaattgaaaggtcgtgatctccttactcttaagaactttaccggtgaagagattaagtacatgctttggctgtccgcagacttgaagtttaggattaagcaaaaaggggaataccttccacttcttcaaggaaagtcgcttggaatgatctttgaaaagcgatctactagaaccaggctgtctaccgaaaccggctttgcactgctgggcgggcatccgtgctttcttactacccaagatatccatcttggtgtgaacgagtccttgaccgacaccgcacgggtgcttagctcaatggcagacgccgttttggcgagagtctacaaacagagcgatctcgataccttggcaaaagaagcatcaataccaataatcaacggacttagcgacctttaccaccccatccagatcttggccgattacctgacgctgcaagaacactactcctcgctgaagggccttaccctgtcctggatcggagatgggaataacatcctgcattcaatcatgatgtcagctgctaagtttggcatgcatctgcaggcagcaacccctaagggttacgaaccagatgcctcagtgaccaagctcgcagaacaatacgcaaaagaaaatggcaccaaactcctgctgactaacgaccctctcgaggcagcccacggtggaaacgtgctgatcactgacacgtggattagcatggggcaagaagaagagaagaagaaaagactccaagcatttcagggctatcaagtgaccatgaaaacggctaaggtggccgcgagcgattggacttttcttcattgtttgccaagaaagccagaggaagtggacgacgaagtcttttactccccacgctcccttgtctttcctgaggcagaaaatagaaagtggaccatcatggcagtcatggtttcgctgctgaccgattattcaccgcagctgcaaaagccgaagttc

SEQ ID NO: 11740 - DNA, 1062 bp, Artificial Sequence
  derived and/or modified sequence
atgctgttcaatctccgaattcttcttaacaatgctgcctttaggaacggtcacaactttatggtgagaaactttagatgtggacaaccactccaaaacaaagtgcaactcaaggggcgcgacctgctgactctcaaaaactttactggggaggaaatcaaatacatgctgtggctctcggcagatctgaagtttcggattaaacaaaaaggagaataccttcctctgctgcaaggtaaatcgcttggtatgattttcgaaaagcgtagcaccagaacgcgcctttccaccgaaactgggtttgcgcttttgggagggcatccatgttttctgactacccaggatattcatctcggagttaacgaaagccttaccgatactgcaagagtgctgtccagcatggccgacgctgtgctggctagagtgtacaagcaatcggaccttgatactctggcaaaagaggcatccatccctattatcaacggtctttccgacttgtaccatccgattcaaatcttggcagactacctgactctgcaggaacattacagctctcttaagggcctgaccttgtcctggattggtgacgggaacaatattctccattccatcatgatgtcagctgcaaaattcggcatgcatcttcaagccgcaactccaaagggctacgaacctgatgcgtcggttaccaagctggccgagcagtacgcgaaggagaacggaactaaacttctgctcactaatgacccacttgaagcagctcatggcggaaacgtcctcataaccgatacctggatttccatgggacaggaggaggagaagaagaagagacttcaggcattccaggggtatcaggtgactatgaaaactgcaaaggtggcagctagcgactggacttttctgcattgccttccacggaagcctgaagaagtggatgacgaagtgttctacagtccacgtagcctggtctttccagaagcagagaacagaaaatggacgattatggcggtgatggtgagcctgctgaccgattactcaccccaactgcaaaagccaaaattc

SEQ ID NO: 11741 - DNA, 1062 bp, Artificial Sequence
  derived and/or modified sequence
atgttgttcaacttaaggatactgctgaacaatgccgcatttcgaaacggacacaattttatggtcagaaacttccgatgcgggcaaccgcttcagaataaggtacagctgaaggggagggatctgctgacattgaaaaatttcaccggggaagaaatcaaatacatgctctggctcagcgccgatctgaagttcaggataaagcaaaagggtgagtacctccctctgctacaggggaaaagtttaggcatgatctttgaaaaaagaagtacgagaactagacttagcacagaaaccggatttgcactcctgggtggccacccttgtttcctgacgactcaggatatacatctgggagtaaatgagtctctcaccgatacagcccgggtcctgtctagtatggccgatgctgtcctggcacgcgtgtacaagcagtcggacttagataccctggctaaggaagcctctatccccattataaacggactctccgacttgtatcaccctattcagattcttgccgattacctgaccctgcaggagcactattcttccttaaaagggttaaccctgagttggatcggagatggcaataatattctgcactccatcatgatgtctgcagctaagttcgggatgcaccttcaggctgctacaccgaaggggtatgagcccgatgcgtctgtgacgaaactggcggagcagtacgcaaaggagaacggcaccaaattgctgctcaccaacgatccattggaagcggcacatggcggtaatgtgctgatcaccgatacgtggatatctatgggacaggaagaggagaagaagaaacgcctgcaggcgttccagggctaccaagtgaccatgaaaaccgccaaggtggcagcgagcgactggactttcctgcattgcctgcctagaaaaccagaggaggtggacgatgaagtgttttacagtccgcgttctctggtctttccagaggcagagaaccggaaatggacaatcatggctgtgatggtgtcgctgctgaccgactactcccctcagcttcagaagccgaagttc

SEQ ID NO: 11742 - DNA, 1062 bp, Artificial Sequence
  derived and/or modified sequence
atgctatttaatctacgtatattactaaataatgcggcgtttcgtaatggtcataattttatggtacgaaattttcgatgtggtcaaccgttacaaaataaagtacaactaaaaggtcgagatttactaacgctaaaaaattttacgggtgaagaaataaaatatatgttatggctatcggcggatttaaaatttcgaataaaacaaaaaggtgaatatttaccgctactacaaggtaaatcgttaggtatgatatttgaaaaacgttcgacgcgaacgcgtctatcgacggaaacgggttttgcgttattaggtggtcatccgtgttttctaacgacgcaagatatacatttaggtgttaatgaatcgctaacggatacggcgcgtgtactatcgtcgatggcggatgcggttctagcgcgtgtatataaacaatcggatctagatacgctagcgaaagaagcgtcgataccgataataaatggtctatcggatctatatcatccgatacaaatattagcggattatctaacgttacaagaacattattcgtcgttaaaaggtttaacgctatcgtggataggtgatggtaataatatattacattcgataatgatgtcggcggcgaaatttggtatgcatctacaagcggcgacgccgaaaggttatgaaccggatgcgtcggttacgaaattagcggaacaatatgcgaaagaaaatggtacgaaactattactaacgaatgatccgttagaagcggcgcatggtggtaatgtactaataacggatacgtggatatcgatgggtcaagaagaagaaaaaaaaaaacgtttacaagcgtttcaaggttatcaagtaacgatgaaaacggcgaaagtagcggcgtcggattggacgtttttacattgtttaccgcgtaaaccggaagaagttgatgatgaagtattttattcgccgcgatcgttagtatttccggaagcggaaaatcgaaaatggacgataatggcggtaatggtttcgttattaacggattattcgccgcaattacaaaaaccgaaattt

SEQ ID NO: 11743 - DNA, 1062 bp, Artificial Sequence
  derived and/or modified sequence
atgttgtttaatctgcgcattctcctgaacaacgcggccttccgcaacggccataacttcatggttcggaacttccgctgcggccagccgctgcagaacaaggtgcagctcaaagggcgggacctccttactctcaagaacttcaccggtgaggagatcaaatacatgctttggttgagcgcagacctgaagttccgaattaagcaaaagggcgagtacctgcctctgctgcagggaaagtcactgggaatgattttcgagaagagatcgaccaggacccgtctctccaccgagactggtttcgcgctgctcgggggtcatccatgcttcttgacgactcaggacatccacctgggagtcaacgagagcttgaccgacaccgcgcgtgtcttgtcatccatggccgacgctgtattggcgcgggtttacaagcagagcgaccttgataccttggccaaggaagcctcaatccccataattaatggtctctctgacttgtaccatcctatccagatcctggctgattatttgacactgcaggagcactactcctcgctgaaggggttgaccctctcgtggattggcgatgggaataacatacttcacagcatcatgatgagcgctgctaagtttggcatgcacctccaggctgctacccccaagggctatgagcccgacgcgtctgtaactaagttggctgagcagtacgccaaggagaacggcaccaagctgttgcttacgaacgaccccctggaggctgcccatgggggtaacgtacttatcacagatacctggatctctatggggcaggaggaggagaagaagaagcggctccaagctttccaaggttatcaggtcacaatgaagaccgcaaaggtggccgcgagcgactggaccttccttcactgcctccctcgtaagccggaggaggtcgacgacgaggtgttttactccccccgttctctagtcttccccgaagccgagaatcgcaagtggaccattatggccgtgatggtttcgctcctgacggattatagcccccagctgcagaagccaaagttc

SEQ ID NO: 11744 - DNA, 1062 bp, Artificial Sequence
  derived and/or modified sequence
atgttgttcaatctgagaatcctgctcaacaatgcggcattccggaacggacacaatttcatggtgagaaacttcaggtgcggccagccgttgcaaaacaaagtgcagctgaagggccgggatctgcttactctgaagaactttactggagaggaaatcaaatacatgctgtggctgtcagcggatctcaagttccggatcaagcagaagggagagtacctccccctcctgcaaggcaaatccctggggatgatcttcgaaaagcggagcactaggacccgcctgagtactgagactggatttgcactcctggggggacacccgtgctttctgaccactcaggacattcatttgggcgtcaatgaaagcctgactgataccgcccgggtcttgtccagcatggccgatgccgtgctggcacgggtgtacaaacagtcagatttggataccctggcgaaggaggcctccattccaatcattaatggcctgtccgatctgtatcatccgatccagattctggcggactacctcactctgcaagagcattactcctccctgaagggactgacccttagctggatcggagacggcaacaacatcctgcatagcatcatgatgtcagctgcgaagttcgggatgcacctgcaggcggcgacccctaagggatatgaaccagacgcatccgtcaccaaactggcggagcaatacgccaaagaaaacgggacgaaactgttgcttaccaatgaccctttggaggccgcgcacggaggaaacgttctcatcacggacacctggatctcgatgggccaggaagaggaaaagaagaagcggctgcaagccttccagggataccaggtcactatgaaaacggcaaaggtggccgcctcggattggactttcctgcactgcctgcccaggaagccagaggaggtggacgacgaagtgttctactcgcccaggagccttgtgttcccggaagccgaaaatagaaagtggactataatggccgtgatggtgtccctgctcaccgattacagccctcagctgcagaagccaaagttc

SEQ ID NO: 11745 - DNA, 1062 bp, Artificial Sequence
  derived and/or modified sequence
atgctttttaacctgcgaatcctgctgaacaatgctgcattccgaaacgggcacaattttatggtacgaaattttaggtgcggccagcccctgcagaataaggtccagctcaagggaagggacctgctcacgctcaagaattttactggtgaggaaatcaagtacatgctctggctgtcagcagacctcaagttcagaatcaagcagaagggcgaatacctgccactgctgcaagggaaaagtctcggcatgatattcgagaaacgatcaacacgcacacgactgtccacagaaactggattcgctctgctgggaggtcatccatgcttcctgaccacacaggatattcaccttggggtcaacgaatctctcacagacaccgctagagttctgagtagcatggcggatgccgtgctcgccagagtgtacaagcaaagcgatctggacacactcgcaaaggaggccagcatccctattatcaacgggctgagcgatctttatcacccaattcaaatcctcgctgattacctgaccctgcaagagcattatagctctctgaaaggcctgaccctttcttggatcggggacggtaataatatattgcactctatcatgatgagcgctgccaaattcggcatgcacctgcaggctgcaactcccaagggctatgagccagatgcatcagtaactaagttggcagaacaatatgccaaagagaacggcaccaaactgctgttgacaaatgatccccttgaagccgcacacggtggaaacgtgttgatcacagatacctggatttctatgggccaggaggaagagaagaagaagcgactccaggcctttcaagggtaccaggtgacaatgaaaaccgccaaagttgccgcttccgactggacttttcttcactgtctgccacggaagccggaagaggtggacgacgaggtgttttactctccccggtccctcgtgtttccagaggctgagaacagaaagtggaccattatggccgtaatggtaagcctgctgaccgactacagcccccagttgcagaaaccaaagttc

SEQ ID NO: 11746 - DNA, 1062 bp, Artificial Sequence
  derived and/or modified sequence
atgttattcaatctaaggatcttgctgaataacgccgctttccggaacgggcataatttcatggttcggaatttcaggtgcgggcaaccactgcagaataaagttcagctgaagggccgcgatcttctaactctaaaaaacttcactggagaagaaataaagtatatgctctggctgagtgcagacctgaagtttagaatcaaacagaagggcgagtatctgcctctgctgcagggcaaatctctggggatgattttcgagaagaggagcaccaggacgaggctttccaccgagacaggtttcgcactacttggaggccacccctgcttcctcacaacccaggacatccatctgggcgtgaatgagtccctgacagatacagcgcgcgtgttgagctctatggccgacgccgtgctggctcgagtgtataagcagtccgacctggacactttggcgaaggaagcctccatccccataatcaacggcctgagcgacctgtaccatcccatccagatcttggccgattatctcaccctgcaggagcactattcttctttaaaagggcttacactctcctggatcggagacggtaataatatccttcactcgataatgatgagcgctgctaaattcggcatgcacctgcaagctgccacccctaaaggatacgagcccgacgcctccgtgacaaaactggcagaacagtacgccaaagagaatggcaccaaactgctgctgaccaacgatcctctggaagccgcacatggggggaacgtgctgataaccgacacttggatctcgatgggccaggaggaagaaaagaagaagcgactgcaggccttccagggctatcaggtgacgatgaaaactgcaaaggtagccgcatccgattggacattcctgcactgcctaccacgcaagcccgaagaggtggatgacgaggtgttttacagtccccgcagcctcgtgttccccgaagcagagaatagaaaatggacaatcatggctgtcatggtttcactgttgaccgactatagccctcagctgcagaagcccaaattt

SEQ ID NO: 11747 - DNA, 1062 bp, Artificial Sequence
  derived and/or modified sequence
atgctgttcaatctgcggattctcctcaacaacgccgcttttcgcaatggacacaactttatggtgagaaatttccggtgtggacagcccctccaaaacaaggttcagctcaagggaagggacctgctcaccttgaagaacttcacgggggaggaaatcaagtacatgctgtggctctcggccgatttgaagttccgaatcaagcaaaagggcgaatacctgccgctgcttcagggtaagagccttggaatgatattcgagaaaagatcgactagaacgaggctgagcactgaaactggtttcgccctgcttggaggacatccatgcttcctgactactcaagatatccatctgggcgtgaatgagtccctgaccgatactgcccgggtcctctcatcgatggcggacgccgtgctggcccgggtctacaaacaatcggacctggacactctcgcgaaggaagcatcgatcccaatcatcaatggcctttcggacctgtaccacccgatccagatcctggcagactaccttacgctgcaggagcactactcctctttgaagggtttgacgttgtcatggatcggtgacggaaacaacatcttgcactctatcatgatgtccgccgccaaattcggaatgcatctgcaagccgccaccccgaagggctacgaaccagacgcgtcagtgaccaaattggcagaacagtacgctaaggaaaatggtaccaagctgctgctgactaatgatcctctggaggctgcgcatgggggaaacgtcttgatcactgatacttggattagcatgggacaggaggaagagaagaagaaacgcctccaagcgttccagggataccaggtgactatgaaaaccgctaaggtcgctgcgtccgattggaccttcctccactgtctcccgcgcaaaccggaggaggtcgatgatgaagtgttctattcgcccaggagcttggtgtttcctgaagccgagaaccgaaagtggaccatcatggcggtcatggtgagcctcctcactgactacagcccgcagttgcaaaagccgaagttt

SEQ ID NO: 11748 - DNA, 1062 bp, Artificial Sequence
  derived and/or modified sequence
atgctcttcaatctccgcatcctcctgaataacgcggccttcaggaacgggcataactttatggtgaggaactttaggtgcggccagccgcttcagaacaaagtgcagttgaagggccgtgaccttctcaccctgaagaatttcaccggggaggagattaagtacatgctttggctgtccgccgacctcaagttccggatcaagcaaaagggagagtacctgccgctgctgcaaggcaagtccctcggaatgatctttgagaagcgcagcaccaggactcggctgtcgactgagactgggttcgccctcttgggcgggcacccatgcttcttgactacccaggacatccacctgggcgtcaacgagtccctgaccgatactgcccgggtcctgtcatccatggcggatgccgttctcgctcgggtgtacaaacaatcggacctcgataccctggccaaagaagcgagcatcccgatcatcaacggactctcagacctgtaccaccccatccaaatcttggccgactaccttacgctccaggaacattactcgagcctcaagggcctgacgttgtcatggatcggggacggtaacaacatcctgcactcgattatgatgtcggccgctaagttcggaatgcatctgcaagccgccaccccaaaaggctatgagcctgatgcgtcggtgaccaagctggccgaacagtacgcgaaggagaatgggaccaagctcctgctgactaacgacccactggaagcagctcacgggggcaacgtgctcatcacggacacctggatttccatgggacaggaagaagaaaagaaaaagcgcctccaggccttccaaggataccaagtgactatgaaaaccgcgaaggtcgctgcatcggactggactttcctccattgtttgcctcgcaagccggaagaggtcgacgatgaagtcttttactcgccaaggtccctggtgttcccggaggcagaaaaccggaagtggacgatcatggccgtgatggtgtcactcctgacggactactccccgcagctgcagaagccgaagttc

SEQ ID NO: 11749 - DNA, 1062 bp, Artificial Sequence
  derived and/or modified sequence
atgctcttcaacctgagaatcctgctcaataacgccgccttccggaacggacataattttatggtccggaacttcagatgtgggcagccactgcaaaacaaagtgcagttaaaaggtagggatttgcttacactgaaaaatttcacaggggaggaaattaagtatatgctatggttatccgcagacctgaagtttaggattaagcagaaaggagagtatttacctctgctgcagggcaagtccttggggatgatctttgagaaacgatccactaggacccgactgtctactgagacaggctttgccctgcttggcgggcacccttgctttctgaccacccaagacattcacttgggggtcaacgaatcacttacagataccgcccgagtattgagcagtatggccgatgctgttctggcccgagtttacaaacagagcgacctggacacgctggcgaaggaagcaagtattcccatcatcaacgggttatccgatctgtatcatcctatccagattcttgccgactatctgacgttgcaggagcactattcctccctgaaaggattgaccctgtcctggattggcgacgggaataatatccttcactccataatgatgtctgccgctaagttcggcatgcatcttcaggcagcaacgcctaagggctatgagcccgatgcgtcggttacaaagcttgcagaacagtatgctaaagagaacggaactaagctgctgctgacaaatgaccccctggaggccgcacacggggggaacgtgctcattactgacacctggatatcgatgggacaagaggaggagaagaaaaagaggcttcaggcatttcaggggtatcaggtgacaatgaagactgcgaaggtggcagccagcgattggacatttctgcactgtctgccccgtaagccagaggaagttgatgatgaagtcttctactcaccacgctccctcgtctttccagaggcggagaaccggaagtggacaatcatggctgtgatggtttccctcctgacagactactcacctcagttgcagaagcctaagttc

SEQ ID NO: 11750 - DNA, 1062 bp, Artificial Sequence
  derived and/or modified sequence
atgttgttcaaccttagaattttattaaacaatgcagctttcagaaacggacataatttcatggtccgtaatttcaggtgtggtcaaccgttacaaaacaaggtgcaattgaaagggcgtgacttacttacattaaagaactttacaggtgaggagatcaaatatatgctttggcttagtgcggatttaaagtttaggatcaaacaaaaaggggaatatttaccgctccttcaaggcaaaagtctaggaatgatttttgagaaaagatcaacaaggacgcgtttatcaactgaaaccggattcgctcttttaggcggacatccttgttttttaacaacacaagatattcatttgggcgttaatgaatcacttacagacacagcacgcgtgttatcttccatggccgatgcagtgcttgctcgcgtgtataagcaaagtgatttagacacattggcgaaagaagctagcattccgataattaacggcctttctgatctgtaccaccctattcaaattttggcggattatctaacactgcaagaacattatagttccctcaagggccttacgctgtcttggattggggatggcaataacattttacactcgattatgatgtcagctgctaaatttggtatgcaccttcaagctgcaacgccgaaaggctacgagccggatgcttcggtaacaaaacttgcagaacagtatgcaaaagagaatggcactaaattgttgcttacaaacgacccgcttgaggccgcgcatgggggtaatgttctcattactgatacgtggatttcgatggggcaggaagaagagaagaagaaaaggctgcaggcctttcagggatatcaggtgacaatgaagacagctaaagttgccgccagcgattggacgtttttgcattgcttaccgcgtaaaccggaggaggttgatgacgaagtgttttattcaccacgctctctcgtctttccggaggcggaaaaccgcaaatggacgatcatggctgtaatggtctctcttcttacagactattcgccgcagctgcaaaagccgaaattt

SEQ ID NO: 11751 - DNA, 1062 bp, Artificial Sequence
  derived and/or modified sequence
atgcttttcaatctcaggatcctgcttaacaacgcagcctttagaaacggtcataactttatggtccggaattttcgttgcggtcagccactccagaataaggtgcaactgaagggtcgcgatcttctgacccttaagaactttactggagaagagattaagtatatgctttggctttccgctgatcttaagttcagaataaagcaaaagggcgaatatctgcccctgctgcagggcaagtcgctgggtatgatctttgaaaaacgatcgactagaaccagactgtcaactgaaaccggttttgcgcttctgggaggacatccgtgttttctgacgactcaagatattcacttgggtgtcaatgagtccctgaccgacactgcaagggtgctgtcgagcatggcagatgcggtgctggccagggtgtacaaacaaagtgatctggatacccttgccaaggaagcctccattccaattatcaacgggttgtccgacctgtaccatccgattcaaattctggcagattacctcacccttcaggaacactactcatcacttaagggccttaccctgtcctggatcggcgatggtaataacattctccatagcataatgatgtcggcagccaaatttggaatgcatctgcaagcggcaacccctaaaggctacgaacctgatgcgtcggtgactaagttggcagaacaatacgcaaaagagaacggaaccaaactgctgctgactaatgatccgcttgaggccgctcatggtggtaacgtgctgatcacggatacttggatttcgatgggtcaagaagaggaaaagaaaaagaggcttcaggcttttcaaggttaccaggtgactatgaaaaccgccaaggttgcagcatcggactggacctttcttcattgtctgcctagaaagccagaggaagtggatgacgaggtgttctactcccccaggtcgttggtgttcccagaggcagaaaatagaaagtggaccataatggcggttatggtcagcctcctgactgactactcgccccaactgcagaagccaaagttt

SEQ ID NO: 11752 - DNA, 1062 bp, Artificial Sequence
  derived and/or modified sequence
atgctgttcaacctccgcatccttctgaacaatgccgctttccggaacggacataactttatggtgagaaatttccggtgtgggcaaccactgcagaacaaggtccagttgaaaggcagggatctgctgactcttaagaacttcactggcgaagaaatcaaatacatgctgtggttgagcgccgacctgaagttccggatcaagcagaaaggcgaatacctgccactgctgcaagggaagtccctcggaatgatctttgagaagagatccactcgcactcggctttccaccgaaactgggttcgctctcctcggtggtcacccgtgttttcttacgactcaggacattcatctgggagtgaatgaatcgcttactgatactgctcgggtcctgtcctcgatggcggacgcggtgctcgcgagagtgtacaagcaatccgaccttgacactcttgccaaagaggcatccatccccatcatcaacggactctctgacctttaccaccctatccagatcctcgccgattacttgaccttgcaggaacactactcgtctctgaaaggattgactctctcctggatcggtgatggaaacaacattctccactccattatgatgagcgcagcaaagttcggcatgcacctgcaggccgcaacccccaaagggtacgagccggatgcaagcgtgaccaagctggcagaacagtatgcgaaggagaatggaactaagctgctgcttaccaacgacccgctggaggccgcgcatggcggcaatgtgctgataactgacacctggatctcgatgggacaagaggaagagaagaagaaacgcttgcaggctttccaaggataccaggtgaccatgaaaaccgctaaggtggcggcgtccgactggacctttctgcactgcctgcctcggaagcctgaggaagttgacgacgaggtgttctactcgcctagaagtctcgtgtttccggaggccgaaaacagaaaatggactatcatggctgtcatggtatccctgctgaccgattacagcccgcagctccagaagccgaagttc

SEQ ID NO: 11753 - DNA, 1062 bp, Artificial Sequence
  derived and/or modified sequence
atgctttttaacctcagaatcttgctcaacaacgcggcttttcgcaacggccacaacttcatggtgaggaatttcagatgcggacagccactacagaacaaagtgcaactgaagggccgagacttgctgacattgaagaactttaccggggaggaaatcaaatatatgctgtggctgtcagcagatctcaagttcaggatcaagcagaagggcgaatatctgcctctgctgcaaggaaaaagcttaggaatgatcttcgaaaagagatctactaggactaggctgtcaactgagaccggctttgctctgcttggaggccatccttgttttttaacaacccaagatatccacctgggcgtgaatgaaagcctcaccgatactgctcgcgtgctttcctctatggcagacgctgtgctggccagagtatacaaacagagcgatcttgacaccctcgctaaagaggcaagtattcctattatcaacggactcagcgatctttatcatccaatccagatactagcagattacctgacattgcaagagcattactcgagtctgaaaggcctgaccctgtcctggatcggtgacgggaacaatatccttcacagcattatgatgagcgccgctaagttcggcatgcacctgcaagctgcgacaccaaagggctacgagcccgatgcgtccgtcacaaaactagccgaacagtacgccaaggaaaacggaaccaagctgctcttgacaaacgacccactggaggcagcccacggcggaaacgtactaattaccgacacttggattagtatgggacaggaggaggaaaagaagaagaggcttcaggcatttcaaggctaccaggtgactatgaagacagccaaagtggcggctagcgattggacctttctgcactgtcttccacgaaagcccgaagaggtcgatgatgaggttttctactccccacgctcactggtgttcccggaagccgagaataggaagtggactataatggcagtcatggtttctctgctgaccgattatagtccacagctgcaaaaacctaaattt

SEQ ID NO: 11754 - DNA, 1062 bp, Artificial Sequence
  derived and/or modified sequence
atgcttttcaatctgagaatcttgctgaacaatgccgcgttccgcaacggccacaatttcatggtccgcaattttcgctgtggccaaccactgcaaaacaaggtgcagctgaagggaagggacctgctcaccctcaagaatttcacgggggaggagattaagtacatgctctggctctccgccgatctcaagttccgaatcaagcagaagggggagtacctgccgctgctgcagggaaagagcctgggaatgatcttcgagaagcgctcaactaggacgcggctctcgactgaaaccggctttgctctgcttgggggtcacccgtgcttcctgaccacccaggacatccacctgggagtgaacgaatccttgaccgacaccgcccgcgtgctctcatctatggcggacgctgtcctggccagagtgtacaagcagtcggacctggacacccttgccaaggaggcctcaatcccgatcatcaacggattgtccgatctctaccatccaatccagatcctggccgactacctgactctccaggaacactacagctcgctcaaaggcctcaccctgagctggataggggacggcaacaatattcttcactcaatcatgatgtcagctgcgaagtttggaatgcatctgcaggccgccaccccgaaaggatacgaaccggacgcgtcggtcaccaaacttgccgagcagtacgcaaaggagaacggcaccaagctcctgctcaccaatgaccctctcgaggccgcacatggcggaaacgtgctgatcaccgatacttggattagcatgggccaagaggaggaaaagaaaaagcgattgcaggcgttccagggctaccaagtgacgatgaaaactgccaaggtcgcggctagcgattggactttcctgcattgcctcccacgcaagccagaagaggtcgatgatgaagtgttttactcaccgagatcgctggtgttccctgaagccgaaaatcgcaagtggactattatggcagtgatggtgagcttgttgaccgattactcgccgcaactgcagaagccgaagttc

SEQ ID NO: 11755 - DNA, 1062 bp, Artificial Sequence
  derived and/or modified sequence
atgctctttaacctcagaattctgctgaacaacgcagcattccgtaacggtcacaatttcatggtccggaactttcggtgtggacaaccacttcaaaacaaagtgcaacttaaaggacgtgatcttctcaccctcaagaatttcaccggagaagagatcaagtacatgctctggctgtcagcagatctgaagtttcgtatcaagcaaaagggagagtacctgcctcttctccagggcaaatcgttgggtatgatcttcgaaaagcgatcaaccaggacccgtcttagcactgaaactggctttgcactccttgggggtcatccttgttttctgaccacgcaggatatccacctcggagtgaatgaatcattgaccgatactgccagagttctgtcgtcgatggctgatgcagtcctcgcccgcgtgtacaagcaatcggatctcgatactcttgcgaaggaagcctctatacctatcatcaacggtcttagcgacctgtaccatccaattcaaattcttgccgattacctgactctgcaggagcattattcgagccttaagggtctgactctgtcgtggatcggagatggaaacaatatactgcacagcatcatgatgtcagcagcgaagtttggtatgcatttgcaggccgcaaccccgaaaggatacgaacctgatgcgtcagtcaccaagctggccgagcagtacgcaaaggagaatggcactaagctccttctgaccaatgaccctctcgaagcggcacatggtggcaacgtgctgataacggacacttggatttccatgggccaggaagaggaaaagaaaaagcgcctgcaagcatttcagggataccaggttaccatgaaaaccgcaaaggtggccgcgtcggactggacttttttgcactgtctgcccaggaagccggaagaagtggatgatgaagtgttctactcacccaggtcgcttgtgttccctgaagcagaaaaccggaagtggactattatggctgtgatggtttcacttctgactgattattcaccacagcttcaaaagcccaaattt

SEQ ID NO: 11756 - DNA, 1062 bp, Artificial Sequence
  derived and/or modified sequence
atgcttttcaacctccggatcctactgaataacgccgcttttcgaaacgggcacaactttatggttaggaacttcaggtgtggccagcccctgcagaataaggtgcagctgaaggggcgggatctgctgacactgaagaattttactggggaagagataaaatacatgctctggctgtccgcggatctcaagttccgcattaagcagaaaggggagtacctgccactgcttcaggggaaaagcctaggaatgatttttgaaaaaaggtccacacggacccgcctgagcaccgaaacgggcttcgccctgcttggcggccacccctgcttcctgaccacgcaggacatccatctcggcgtgaatgagtcactgaccgacacagccagggtactgagcagcatggcagatgcagtgttagcccgcgtatacaagcaatcagatctagacactctagctaaggaagccagtatcccaatcattaatggtctttccgatctttatcaccccatccagatcttagctgactacctcacgctccaggagcattactcgtccttgaaggggctcacgctgtcctggataggagatggcaacaatatcttgcattccatcatgatgtctgctgccaaattcggcatgcacttacaggcagccactccaaagggttatgaacctgatgcaagcgttacgaaactagcggagcagtatgcgaaggaaaacggtaccaagctcctgctgaccaacgatccacttgaggctgcccatgggggaaacgtcttgattaccgacacctggatatctatgggacaggaagaagaaaagaagaagagactgcaggcctttcaaggataccaagtgacaatgaagacggctaaggttgcagcatctgactggactttcctccactgcctcccccggaagcctgaagaagtcgacgatgaggtgttctactcccctagatccttggtgttcccagaggctgagaatcgtaagtggaccattatggctgtcatggtatcgttactgacagattactctccccaactccaaaagcccaaattc

SEQ ID NO: 11757 - DNA, 1062 bp, Artificial Sequence
  derived and/or modified sequence
atgctgttcaacctgcggattcttttgaataatgccgcttttagaaatggtcacaatttcatggtgcgcaacttccgctgtggccaaccactgcagaacaaagtgcagttgaaaggacgcgacctgctcactctcaagaacttcactggggaggagatcaagtacatgctgtggctctcggcagatcttaagtttcgaattaagcaaaaaggagaatacctgcctcttcttcaggggaagtcgctcgggatgatttttgaaaagagaagcacccgtactcgcctgtcaactgaaactggatttgcacttttggggggacatccgtgcttccttaccacccaggatattcatctcggcgtcaacgaaagcctcactgatactgcgagagtcctctcatcgatggcagatgcagtcctggccagagtctacaaacaaagcgatcttgataccctggcaaaagaggcttccatacctataatcaatggtctgtccgatctttaccatccaattcagattctcgcagattaccttacgctccaagaacactactcctcgctcaagggactgaccctttcctggatcggggatggcaataacattcttcactccattatgatgtctgcggcaaagtttggtatgcatctgcaggcagccacccctaagggctacgaaccagacgcatcagtgactaaacttgcggaacagtacgcgaaagaaaatggtaccaagctgcttctgacgaatgaccctcttgaggctgcacatggtgggaacgtcctgataaccgatacgtggatctccatgggacaggaagaggagaagaagaagagattgcaagcattccaagggtaccaggtgaccatgaaaacggctaaggtcgcagcatcggattggaccttcctgcattgtttgccaaggaagcctgaagaagtggacgatgaggtgttttacagccctagatcattggtgtttccagaagcagaaaacagaaaatggaccataatggccgtcatggttagccttcttacggactactccccccaacttcaaaagcccaagttt

SEQ ID NO: 11758 - DNA, 1062 bp, Artificial Sequence
  derived and/or modified sequence
atgctgtttaatctcaggattcttcttaacaatgcagcattccgcaacggacacaactttatggtgcgaaactttagatgcggacagccattgcagaacaaagtgcagttgaagggaagagatcttctgaccctgaaaaactttaccggggaggagatcaagtacatgctgtggctttccgcagatctgaagtttaggattaagcagaagggcgagtacctcccacttctccagggcaaatcgctgggtatgattttcgaaaagagaagcaccagaactcgcctgtccactgagactggctttgcactccttggaggacatccatgtttccttactactcaggatattcaccttggagtcaacgaatccctgaccgacaccgcgagagtgctttcgtcaatggcagatgccgtgctggctagagtgtacaagcagagcgatcttgacacccttgccaaggaagcctcgattcctattatcaacgggctgtccgatctctaccatcctatccaaatactggcggattaccttactttgcaggaacattacagctccctgaaggggttgaccctttcatggattggagatggcaacaatatcctgcattccatcatgatgagcgcagcgaagtttggaatgcacctgcaggccgcaacccctaagggttatgaaccggatgcgtccgtcaccaagctggctgagcagtacgcaaaggaaaacggaactaagctgctgctgaccaatgatccacttgaggccgcccacggtggcaatgtcctcattactgatacttggatttcaatgggacaagaggaagagaagaagaagcgcttgcaggcctttcagggttaccaggtgaccatgaaaactgctaaggtggccgcatctgattggacttttctgcattgccttccacgcaaacctgaagaagtggacgacgaggtgttctactcccctaggtcccttgtgtttcctgaagccgaaaatagaaaatggactataatggcagtgatggtgtcgctgttgaccgactacagcccacaactgcaaaagccgaagttc

SEQ ID NO: 11759 - DNA, 1062 bp, Artificial Sequence
  derived and/or modified sequence
atgctgtttaatctcagaattctactgaataacgccgccttcagaaacggccacaatttcatggttcgcaattttaggtgcggacagccattgcagaacaaggtgcagttgaagggacgcgatctcctgacattgaagaacttcacgggtgaggagatcaagtacatgctctggctctccgctgacctgaagttcagaataaagcagaagggagagtacctgccgctgcttcaaggaaaatccttgggtatgatattcgaaaagcgcagtactcgcacaagattgagtaccgaaaccggctttgcattgttgggcggccacccctgcttcctgaccacacaagacatccacctcggagtgaacgagagcctgacggacacggcacgtgttctgtctagcatggcggatgctgtgctcgctcgggtgtataagcagtccgacttagatactctggcgaaagaggcatctatcccgatcatcaacggccttagcgatctgtaccatcccattcagatattggccgattaccttacactgcaggagcattattcgtcgctgaagggccttaccttaagctggattggcgatggtaataacatcttgcactcaataatgatgtccgcagctaagtttggtatgcacctgcaagccgctacaccaaagggctacgagccggatgcttcggtgaccaagttggctgagcagtatgcgaaagagaatggtaccaagctcctgttgaccaatgatccgctggaggctgctcacggaggaaatgtgctgataacggacacttggatttcgatgggacaagaggaagaaaaaaagaagagactacaggccttccagggctaccaagtgacgatgaagacagccaaagtggctgcatctgattggacatttctgcactgcctacccaggaaaccggaggaggtcgacgacgaggtgttttacagtccccgcagcctggtcttcccggaggccgagaatcgcaagtggaccattatggccgtgatggtctccctactgaccgattacagtcctcagctgcagaaaccaaaattc

SEQ ID NO: 11760 - DNA, 1062 bp, Artificial Sequence
  derived and/or modified sequence
atgctcttcaatctgcgtatcctgctgaacaatgccgcctttcgaaacggccacaacttcatggtgagaaacttccggtgcggacagccgctccaaaacaaggtgcagcttaagggaagagatctgctgactcttaagaacttcaccggagaagagatcaagtatatgctgtggttgtctgctgacctgaagtttcgcatcaagcagaagggagaatacctgccgctgctgcagggcaagtccctgggcatgatcttcgagaaacgctccactcgcacccgcttgtcgaccgagactggattcgcgctgctgggaggacacccttgtttcctgaccactcaagacatccatctgggggtgaacgagtccctcacggataccgcgcgggtcctgtcctcgatggcagacgcagttttggcccgagtctataagcaatcggaccttgatacccttgcaaaggaagctagcatccccatcatcaacggattgagcgacctctaccacccgatccaaatcctggcagattacttgactctgcaagagcactactcatcactgaaggggctgactctctcctggatcggcgacggcaataacatcctgcattcaattatgatgtcggccgcgaagtttggaatgcatctgcaagccgcgactccgaaaggatacgaaccagatgcatccgttaccaaacttgcggaacagtacgccaaggaaaacggaactaagctgttgctgaccaacgatccactggaggcagcccacgggggaaatgtgttgattactgacacctggatttcaatgggtcaagaagaggaaaagaagaaacggctccaggcgtttcaggggtaccaggtgacgatgaaaaccgctaaagtcgcagcctctgactggacttttttgcattgccttccccggaagccggaagaagtggacgacgaagtgttctacagccctcggtcccttgtgttcccggaggctgaaaatcgcaaatggaccattatggccgtgatggtgagcctgctcacggactattcaccgcagctgcagaagcctaagttt

SEQ ID NO: 11761 - DNA, 1062 bp, Artificial Sequence
  derived and/or modified sequence
atgctgtttaacctccggatcttgctgaataatgccgcgtttcggaacggacacaatttcatggttcggaactttaggtgtggtcaaccactgcaaaacaaggtgcagctcaaaggaagagacttgctgaccctgaaaaactttaccggagaagagattaagtacatgctgtggctcagcgcagatctgaagtttagaatcaagcaaaagggtgagtacctgcctcttctgcaggggaaatctctcggaatgattttcgaaaaacggtcgacccgaacccgcttgtcgactgaaactggatttgcactcctggggggacatccttgcttcctgactacccaagacattcatcttggagtcaacgagtcgctgaccgatactgcccgtgtgctctcatcaatggctgatgcagtgcttgcgcgagtgtacaaacaaagcgacctggatacgttggccaaggaggcatcaatccccattatcaacggactcagcgacctctaccatccaatacaaattctggccgattacctcaccctgcaagagcactactcgtcgctcaaggggcttactctctcgtggataggcgatgggaacaacatccttcattccataatgatgtcggcggctaagtttggtatgcacctccaagcagccactcctaagggatacgagcctgatgcgtccgtcaccaaacttgcagaacagtacgcgaaggaaaacggcaccaagctgcttcttaccaacgacccactggaagcagcacatgggggaaatgttctgataacggatacctggatctcgatgggacaggaagaggaaaagaagaagcggctccaggcatttcaaggttaccaagtgactatgaaaacggcaaaggtcgcagcatccgattggacttttctgcattgtctccctcggaaaccagaagaagtcgatgacgaagtgttctactccccacgttcgcttgtgtttcctgaggcagagaaccgtaaatggactattatggcagtcatggtgtcgctgctgactgattactcgccacaacttcagaagccaaagttt

SEQ ID NO: 11762 - DNA, 1062 bp, Artificial Sequence
  derived and/or modified sequence
atgctcttcaacctgagaatccttctgaataacgcagcgtttcggaacggacacaacttcatggtccgcaatttcaggtgcggacaaccactccagaacaaggtccaactgaagggaagagatcttctgacgctcaagaactttaccggtgaagaaataaagtacatgctgtggctgtccgccgacctgaagttccggatcaagcaaaagggtgaatacctccccttgctccaaggcaaatcactcgggatgatcttcgagaagcgctcgactcgaacgaggctctcgaccgagactggatttgccttgctcggagggcatccgtgcttcctcacgacccaggatattcacctcggggtgaacgaatcactcactgacaccgcgagagtgctctctagcatggccgacgccgtcctcgccagagtgtacaaacagtcggacctcgacaccctggcaaaagaggcctccatcccgatcatcaacggtctgtccgatctgtaccacccaatccagattctggccgactacctgactctgcaagaacattactcctccttgaagggcctgaccctgagctggatcggagacggcaataacattctgcactcaattatgatgtcagcagcgaagttcggaatgcatttgcaagcggccactcctaaggggtacgagccggatgcaagcgttactaaactggccgagcaatacgcaaaggaaaacggaacgaagctgcttttgactaacgaccctctggaagccgcgcacggaggaaacgtgctcattaccgatacctggatctcaatgggacaggaggaagaaaagaagaagcggttgcaagcgtttcagggataccaggtgactatgaaaaccgcgaaggtggcggcatcagactggaccttcctgcattgcctccctcgtaaaccagaagaagtggacgacgaggtgttctattcgccgcgctccctcgtgtttccagaagcggaaaataggaagtggaccatcatggcagtgatggtgtcgctcctgactgactactccccccaactgcagaagcctaaattt

SEQ ID NO: 11763 - DNA, 1062 bp, Artificial Sequence
  derived and/or modified sequence
atgctgttcaaccttaggattcttttgaataacgccgcctttcggaacggtcataactttatggtgcggaactttagatgtggccaaccacttcaaaacaaggtccagctgaaaggcagggatcttctcactcttaagaacttcactggagaagagattaagtacatgctgtggctttccgcagaccttaagtttcgtatcaagcaaaagggggaatacctgccactgctgcaaggaaagagccttggtatgattttcgaaaagcggtcgacgcgcaccagactcagcaccgaaactggttttgcgctgcttggtggtcatccgtgttttctcaccacccaagacatccatctgggagtgaacgaatccttgactgatactgcccgggtcctttcctcgatggcagatgcagtgctggcaagggtctacaagcagtcagaccttgatactctcgcaaaggaggcatccatcccgatcattaacggtctttctgatctctaccatccaatacagattcttgcagattaccttactctgcaagaacactacagctcgcttaagggacttacgctctcctggattggtgacggaaataacattctgcattcgattatgatgtcggcggcaaaattcggtatgcatctgcaagcagcaacgccaaaaggttacgaacccgacgcatcggtcaccaagctcgcagaacagtacgctaaggagaacggaacgaagttgctgctgaccaatgatccactcgaggcagctcacggcggcaatgtgttgattaccgatacttggatatcgatgggccaagaggaagaaaagaaaaagcgcctgcaagcattccagggataccaggtgaccatgaaaaccgccaaagtggctgcaagcgattggacctttctccattgcctcccacgaaaacccgaagaagtggacgatgaagtgttctacagccccagatcgcttgtctttccagaagcagagaatcgaaagtggactataatggcagtgatggtgtcgctgctgactgactactccccccaacttcaaaaacctaagttc

SEQ ID NO: 11764 - DNA, 1062 bp, Artificial Sequence
  derived and/or modified sequence
atgctgtttaatctgcgcatattgctcaacaacgccgcctttcggaacgggcacaactttatggtcagaaacttccgctgcggccaacctttacagaataaagtgcagctgaagggcagagacctgctgacgctcaagaattttaccggggaggagatcaaatatatgctgtggctctcagcggatctaaaatttagaattaagcagaaaggggagtatttgcccttgctccaaggtaaaagccttggaatgatcttcgaaaagaggtcaacacggactcgcctctccactgaaacagggttcgctttattaggcggccacccctgtttccttaccacccaggacatccacttaggcgtaaacgagtccttaactgatacagcccgggtcctatccagcatggctgacgccgttcttgcacgagtatacaagcaatccgatttggatacactggccaaggaagcctccatcccaattatcaatggactgtcggacttgtaccaccccattcagatcctggccgactacctgacactgcaggaacattactcctctctcaaaggccttacactctcatggattggagacggtaacaacattcttcactccattatgatgtctgccgccaagttcgggatgcacctgcaggccgctactcctaaggggtacgaaccagacgctagcgtgacgaagttggctgagcaatatgcaaaggagaatggaacaaagctcctgctcacaaacgacccactggaggccgcgcatggcggtaatgtccttattactgacacttggatttccatgggccaggaggaggagaagaagaaacggctgcaggcattccaggggtatcaggtgaccatgaagactgcaaaggtggctgcctccgattggacctttctacattgcctcccaagaaaacctgaagaggtcgatgatgaagtgttttattctcccagaagcttggtgttccctgaggccgagaaccggaagtggactatcatggccgtgatggtgagcctcctaaccgattactcaccacagctccagaaacccaagttt

SEQ ID NO: 11765 - DNA, 1062 bp, Artificial Sequence
  derived and/or modified sequence
atgctctttaatctgaggatcctgctcaataatgctgccttccggaacggccacaatttcatggtgagaaatttccgatgcggccagcccctccagaacaaggtccaattgaagggacgggacctcttgactctcaagaacttcaccggagaagagatcaaatacatgctgtggttgtccgcagacctcaagttccgtatcaagcaaaagggagaatacctcccgcttctccagggcaagtccctcggaatgattttcgaaaagagaagcactcgcacgcgcctgtcgactgaaactggatttgcactgctcgggggacatccgtgtttcctgactactcaggacattcatctcggcgtcaacgaatcactcaccgacaccgcccgcgtcctgtccagcatggccgatgcggtcctggccagagtttacaagcagtcggacctcgacactctggcaaaagaggcatcgatcccgattatcaatggactctccgatctctaccatcctattcagatcctggcagactacctgaccctgcaggagcattactcatctctgaagggtcttaccctgtcgtggatcggcgatggcaacaatatcctgcatagcattatgatgtcagcagcaaagtttgggatgcacctccaggccgcaaccccgaagggctacgagccggacgctagcgtgactaaacttgcggaacagtacgcgaaagagaacggaacgaaactgctccttacgaatgatcccttggaagctgcgcacggaggtaatgttctgatcaccgatacttggatctccatgggacaggaagaagagaaaaagaagcggctccaggcctttcaagggtaccaggtgaccatgaaaaccgccaaggtggccgcgtcagattggacttttctccattgcctcccccgcaagcccgaagaggtggacgacgaggtgttctactcaccaagatcactggttttcccggaggcagagaatcggaagtggaccatcatggccgtcatggtgtccttgctgaccgattactccccgcagctgcaaaagccgaagttc

SEQ ID NO: 11766 - DNA, 1062 bp, Artificial Sequence
  derived and/or modified sequence
atgttatttaatctccggattttacttaacaacgccgccttccgaaatggccataatttcatggtccgtaattttcgatgtggccagcctttgcagaataaggttcaactgaaaggccgggacttactgaccctgaaaaactttactggtgaggaaattaagtatatgctatggttatctgccgacctgaagtttagaataaagcagaagggtgagtacttaccgctgctgcaaggtaagtcgttaggcatgatcttcgagaagcgctccactcggactcgcctgagtactgagacaggcttcgccctcctgggtggccacccttgtttcctgaccacccaggacatccacctgggagtgaatgagtctttgaccgacaccgcaagggtcctttcaagcatggctgacgcagtgctggcccgggtctacaagcagagcgacctggataccctggccaaagaggcgagcattcctataataaatggactctcggacctttatcaccctatccaaatactcgcggactacctgacactacaagagcactactcctccttaaaggggttgacattgagttggataggagacgggaataatatcttgcactccattatgatgtctgctgctaagttcggcatgcatcttcaggctgctacacccaaggggtacgaacccgatgcatcagtgacgaaattggcagagcagtacgccaaggaaaatggaaccaagttgctgttgactaacgaccctctggaggccgcacacggtggcaatgttctgatcacagacacatggatctcgatgggccaggaggaggagaagaagaaacgactgcaggccttccagggctaccaagtaactatgaagacagccaaggttgcagccagcgattggacattcttgcactgtctgccacgcaagccagaagaggtcgacgacgaggtattctactctccgcggagtctggtctttcctgaggcggagaatcgtaaatggaccattatggccgtgatggttagtctgttgactgattattctccacaactgcaaaaacccaagttc

SEQ ID NO: 11767 - DNA, 1062 bp, Artificial Sequence
  derived and/or modified sequence
atgttgtttaaccttcgcatcctgttaaataacgccgcttttaggaacggccataattttatggtacgtaactttagatgtggccagcctcttcagaacaaggttcaactgaagggcagagacctgttaacactgaagaacttcaccggagaagagatcaagtatatgctgtggctatcggccgacctgaaattccgtatcaaacagaaaggggaatatttgcctctgctgcagggtaagagcttaggaatgattttcgaaaagagaagcacaagaacaagactctcgactgaaaccggttttgcattactgggggggcatccctgctttctcactactcaagatatccacttgggcgtgaacgagtcacttaccgacaccgcaagagtgctgtccagtatggccgatgctgtgctcgcccgggtctacaagcagagcgatctggataccctcgctaaggaagcttccataccgatcataaacgggttgtctgatttgtaccatcccattcagatccttgcagattacctgactctacaggaacactactctagcctcaagggtctgaccctctcgtggatcggcgacgggaataatatattacactcaatcatgatgtccgctgctaaatttggcatgcatttgcaggccgccactcccaaggggtatgaacccgatgcaagtgtgaccaagctggcggaacagtacgccaaagagaacggaaccaaactgctgctcacgaacgaccccttggaggccgcccatggcgggaatgtcctgatcactgatacatggatctctatgggtcaggaggaggaaaaaaagaaacggctccaggcctttcaggggtaccaggtgaccatgaagacggccaaagtagccgctagtgactggacttttctgcactgcctgccccgtaagcccgaagaggttgacgacgaagttttttactctcctcgttcactcgtgttccccgaggccgaaaacaggaagtggaccatcatggctgtcatggtatctctactgacggactactccccccagttacagaagcctaaattt

SEQ ID NO: 11768 - DNA, 1062 bp, Artificial Sequence
  derived and/or modified sequence
atgctttttaatctgcgtatcctccttaataatgctgctttccgaaacggtcacaactttatggttagaaattttcgatgcggacaacctttgcaaaataaagttcaattgaaaggtcgtgaccttctgaccctaaaaaacttcactggtgaggagatcaagtatatgctgtggcttagtgctgaccttaaattcaggatcaagcaaaaaggggaataccttccattactgcaaggtaaaagcttaggtatgatttttgaaaagcggagtacccgaacgcgtctttcgacggagaccggatttgctcttctcggtggtcatccttgcttcctgactacccaggacatacatcttggagtgaacgaatccttgacggacactgcaagggtattgtcgagcatggctgacgcagtacttgctagagtttacaagcagtctgacttggacacacttgctaaggaagcatccattcctattatcaacggattgtctgatttgtatcatccaatccaaatcctggccgattaccttacattgcaagagcactattcttccctcaaggggttaactttgtcctggattggtgatggtaacaacatactccattcgataatgatgagtgccgccaagtttggcatgcatcttcaagctgcaacacctaaaggttacgagccagatgcttcagtgaccaagctggcagagcaatacgccaaggagaatggaactaaactcttgctaactaacgatccattagaggcagcgcatggcggtaatgtgctgatcacggatacgtggatttccatgggccaagaagaagaaaaaaagaagaggcttcaagcattccaagggtatcaggttactatgaaaacagctaaagttgcggcatcggattggacttttctccactgcttgccgaggaagccggaggaggtggatgacgaggtcttttactctcctcgatctttggttttcccagaggctgaaaacaggaagtggactatcatggcagtcatggtctctcttttgaccgattactcacctcagcttcagaagcccaaattc

SEQ ID NO: 11769 - DNA, 1062 bp, Artificial Sequence
  derived and/or modified sequence
atgctattcaacctgagaattttgctcaataacgcagcttttcgtaacgggcacaattttatggtccgcaacttccgatgcggacagcccttacaaaacaaggtgcagctgaagggccgtgatctgctcacattgaaaaacttcaccggcgaagagatcaaatacatgctgtggctgtctgctgacttaaaatttcggatcaagcaaaaaggcgagtaccttcccttgctgcagggcaaaagcctgggaatgatatttgagaagcggtcaacccgcacccggttgtcgacggagacagggtttgcactattaggcgggcacccctgtttcctcactacccaggacatccacctgggagtgaatgagtcactcaccgatactgctagagtgctgtcatccatggcagacgctgtgctcgcaagggtatataagcagagtgatctggacacattggcgaaggaagcgtcgatcccgatcatcaacgggctcagtgatctgtaccacccaatccagattctggcagattacttgaccctgcaggaacattattcatccttgaaaggtctgactctttcctggattggtgatgggaataacatcctgcacagcatcatgatgagtgcagccaagttcgggatgcatcttcaggccgccacgccgaagggatatgagcccgacgccagtgtgaccaagttagctgagcagtatgccaaggaaaatggtaccaaactcctgctgaccaacgaccctttggaggcggcacacggcgggaacgtcctgatcaccgatacatggatcagtatggggcaggaggaagagaagaaaaagcggctgcaggcattccaaggttaccaggtgaccatgaaaaccgctaaagtggcagctagcgactggacctttctacactgtttgcctaggaagcccgaggaggttgacgatgaggtgttctattcaccgagatctctggtgtttcctgaggcggagaatcgcaagtggacaatcatggccgtgatggtgagtctgctaacggattattcccctcagttacagaagccgaaattt

SEQ ID NO: 11770 - DNA, 1062 bp, Artificial Sequence
  derived and/or modified sequence
atgctgttcaacctgcgcatcctgcttaacaacgcagcttttcggaatggccataactttatggtcaggaactttagatgtggacaaccactgcagaacaaggtgcaactcaaaggacgcgatctcctcactctcaaaaactttaccggcgaagaaatcaagtacatgctgtggctgagtgccgatcttaagttccgcatcaagcagaagggagaatacctgccgctgctccagggaaagagcctgggaatgatttttgaaaaacggtccacccggaccagactgtcgacggaaaccgggttcgcactgcttggcggacatccttgctttctcaccactcaggatatccacctgggtgtgaacgaatccctgacggatacggcacgagtcctgtccagcatggccgatgccgtgttggcgcgcgtgtacaaacagtcagacctggacactctcgccaaggaggcttcgataccgatcatcaacggcctctccgacttgtaccaccccatccagattcttgccgactacctgactctgcaagaacactactcgtcgttgaaagggcttaccctgtcgtggatcggagatgggaacaatatcctccactccatcatgatgtctgctgctaagttcggcatgcatctccaagccgctacgccgaagggctacgagcctgacgcatcagtcaccaagctggccgagcagtacgcaaaagagaacggaactaagctcctcctcaccaacgaccccctcgaagcggcccacggcggaaacgtgttgatcacggacacttggatctcgatgggacaggaggaggagaaaaagaaacgcctgcaagcctttcaaggataccaagtgaccatgaaaacggccaaggtggctgcttccgactggaccttccttcactgcctgccccggaaacccgaagaggtggacgacgaggtgttctactcaccgcgcagcctcgtgttcccagaagcagaaaacaggaagtggacgattatggcggtcatggtgtcactcctgaccgactactccccacagctgcagaagccgaagttt

SEQ ID NO: 11771 - DNA, 1062 bp, Artificial Sequence
  derived and/or modified sequence
atgctctttaatctgaggattctgctgaacaacgcagcctttaggaacgggcataattttatggtgagaaactttagatgcggccagcctctccagaataaggtgcagcttaaggggagagatctgctgactctgaagaactttactggggaagaaatcaagtatatgctgtggctctctgcagatctcaagtttcgcataaaacagaaaggggagtaccttcccctgctgcaggggaagtccctcgggatgatttttgaaaaacgcagcacccgcacaaggttgagcaccgagacgggcttcgccctcttgggaggccacccctgcttcctgactacacaggacatccacctcggcgtcaatgagtccctcaccgacaccgccagggtgcttagcagtatggctgatgcagtgctggctcgggtctacaagcagagcgacctggacaccctcgccaaggaagcttctataccaatcattaacggtctgagcgacctgtatcaccctatccagattcttgcggattacctgacactgcaggagcattacagctctctcaaagggttgacacttagctggataggagatgggaataacattctgcactccatcatgatgagtgccgccaaattcggcatgcacctgcaggcggcgacccccaaaggctatgagcctgatgcctctgttaccaagttggcagaacagtacgccaaggagaatggaactaagttgctgctgacaaacgatcccctggaggccgcccacggtggaaacgttcttatcaccgacacatggatctctatgggacaggaagaggagaagaaaaagcggctccaggctttccagggctaccaggttaccatgaagacagccaaagtagctgcctctgattggacctttctgcattgcctgccccgcaagcccgaagaggttgacgatgaagtgttctatagcccccgctcactggtttttccagaagccgagaataggaaatggacaattatggccgtgatggtatctttgctgacagactactcaccccagctgcagaaaccgaagttc

SEQ ID NO: 11772 - DNA, 1062 bp, Artificial Sequence
  derived and/or modified sequence
atgttattcaatcttagaatccttcttaataatgccgctttccgaaatgggcacaatttcatggtgaggaattttcgttgcggacagcctctgcaaaataaagttcagctgaaaggaagggaccttttaacactgaagaacttcacaggagaggagatcaaatatatgctgtggctctctgcagacttgaagttcagaataaaacagaaaggggagtatctgcccctgcttcagggaaaatcacttggaatgatctttgagaaaaggagcactcggacccgcttgagcacagaaactggattcgccctgctgggggggcacccttgtttcttgacaacgcaggacatccaccttggtgtcaatgaatccctcaccgatactgcgagagttctgagtagtatggcagatgcagtcctggcaagggtgtacaaacagagcgatcttgacacactagcaaaagaggcgtccattcctatcatcaacggcctgtccgacctgtaccaccccatccagatcctggctgactatctaactctgcaggaacattacagttcactaaaaggtctcactctatcttggattggagatggaaacaatatcctccattctattatgatgtccgccgctaagtttggcatgcacttgcaggccgctacccctaagggatatgaaccggacgcaagtgtgacgaagttggctgagcagtacgccaaagagaatggtacgaagttgctcctgactaatgatcccctcgaggctgctcacggaggaaatgtgctaattacagatacctggattagcatgggccaggaggaagagaagaagaagcgcctccaggcttttcagggttaccaggtgaccatgaagaccgcaaaagtggccgcatctgattggacatttttacattgtcttcctcggaagcccgaagaggtcgatgatgaagtgttttactctccccgctcactggtatttccagaagctgagaataggaaatggacaatcatggcagttatggtctctctgctgacggattacagcccccagttgcagaagcccaaattc

SEQ ID NO: 11773 - DNA, 1062 bp, Artificial Sequence
  derived and/or modified sequence
atgttgtttaaccttaggatcctgctgaacaatgcagcatttcggaacgggcataactttatggtacggaactttaggtgcggtcagccgcttcagaacaaggttcagcttaagggtcgtgatcttttgaccctgaagaactttacgggggaggaaatcaaatacatgctgtggctttccgcagacctcaaattcagaataaagcagaaaggcgaatacttgccactcctgcaagggaagagccttggtatgattttcgagaagcgatcaaccaggacgcgcctttcgaccgaaaccgggtttgccctgctcggaggacatccgtgtttcttgaccacccaggatatacatctgggcgtcaacgaatcacttactgacactgcacgcgtcctctcgtcgatggcggacgctgtgctcgcccgtgtgtacaagcaatcggatcttgataccttggcaaaagaagcatcaatccccatcattaatggactttcggacctgtaccacccaattcaaatactcgcggactacttgacgcttcaggaacattacagctcgcttaagggcctgactctctcctggattggagacggcaacaatatccttcactcgattatgatgtccgcggccaagtttggtatgcaccttcaagctgcaacccctaagggctacgagccggatgcatcggtaactaaactggcagaacaatatgcaaaggaaaatggtaccaagctgctcctgaccaatgatcctcttgaagcagcacacgggggtaacgtgctgattactgatacttggatctccatgggccaggaggaagaaaagaagaaacgcctccaagcattccaggggtaccaagtcactatgaaaactgcaaaggtcgcagcaagtgattggacctttcttcattgccttccccgaaagcctgaggaagtggatgatgaggtcttttactccccacgatcgcttgtgttccctgaagctgagaatcgtaagtggaccatcatggcggtcatggtgtcactcctgactgattattcccctcagctccaaaagcccaaattt

SEQ ID NO: 11774 - DNA, 1062 bp, Artificial Sequence
  derived and/or modified sequence
atgctttttaatttgcgtattctcctgaacaacgccgcctttaggaacggacacaatttcatggtccgtaacttcaggtgtggccagccccttcaaaataaggtgcagttgaagggtagggacctgctgactcttaaaaattttactggcgaggagatcaaatacatgctgtggctgagtgccgacttgaagttccgcatcaagcagaaaggcgagtacctccctctcttgcaaggcaagtcactgggtatgatcttcgaaaagagatcaacacgtactagattgagcactgaaaccggctttgccctgctgggtggtcatccctgcttccttaccacacaagacatccatctcggcgtcaacgagagtctcacagacacagcccgtgtattgagcagtatggctgatgccgtgctggctagagtgtataagcaaagcgacctggataccctcgccaaggaagcctcaatcccaataataaatggactttctgatctttaccaccctattcaaattctggccgattacctgactctccaggagcactattccagcctgaagggtctgaccctctcatggatcggagatggaaacaatatcctgcactctataatgatgtccgctgctaaattcggtatgcacctccaggccgccacacccaagggatatgagcctgacgcaagcgtcacaaagcttgccgagcagtacgcaaaggagaacggcacaaagctgcttctgactaatgacccactggaggccgctcatggaggcaatgtgctgatcactgatacctggatctccatgggacaagaagaggagaagaagaaaagactccaggctttccagggctatcaagttacaatgaagaccgcaaaggtggcagctagcgactggacattcctgcattgtcttcccaggaaaccagaagaggtggacgatgaggttttttattctccccgctcacttgtgttccctgaagccgagaacaggaagtggactataatggctgtcatggtttctctcctgacagactactccccacaactccagaagcccaagttc

SEQ ID NO: 11775 - DNA, 1062 bp, Artificial Sequence
  derived and/or modified sequence
atgctgtttaatctgcgcattctcttgaacaacgcggcattccgcaacggacacaacttcatggtgcgcaactttagatgtggacaacctctgcagaataaagtgcagctcaaggggcgagatcttctgaccctgaagaatttcactggtgaggagattaagtacatgctgtggttgagcgccgaccttaagtttcggattaagcaaaagggagaatacctccctctgctccaaggcaagtcgcttggcatgattttcgagaagcggagcaccaggactcgcctgagcaccgaaaccggttttgcactgcttggaggtcatccttgctttctgactactcaggacatccacctgggcgtcaatgaaagccttaccgataccgcacgagttttgagctcaatggcagatgccgtgctcgcccgggtctataaacaatcggatctcgatactctggcgaaggaagccagcattccgatcattaatggcctttccgacttgtaccatcctatccagattcttgccgactacctgacgctgcaggagcattactcttctcttaagggactcactctctcatggatcggggatggtaacaacatcctgcattcaatcatgatgtcggctgccaagtttggtatgcatctccaggcggccacccctaagggatacgagcctgacgcgagtgtcacgaagttggcggagcaatacgcaaaggaaaacggaaccaagctgttgctcactaacgatccccttgaagctgcacacggcgggaacgtgctcattactgatacctggatttcgatgggacaggaagaagaaaagaaaaaacggctgcaagcgttccaaggctaccaagtgaccatgaaaaccgctaaggtggcagcatcggattggacttttttgcattgccttcctcgcaagccagaagaagttgatgacgaagtgttttactcgcccagatcactcgtgtttcccgaggctgaaaatcgtaaatggaccatcatggccgttatggtcagcctgttgactgattactccccacagcttcaaaaacccaagttc

SEQ ID NO: 11776 - DNA, 1062 bp, Artificial Sequence
  derived and/or modified sequence
atgctgttcaatctccgcattctgctgaacaacgcagcttttcgcaatggccacaactttatggtgcgaaatttcagatgcgggcagccactacagaacaaagtacagcttaagggacgggacctcctgacattaaaaaattttactggggaagaaatcaagtacatgttgtggctcagcgctgacctgaagtttaggatcaaacagaagggggagtatctaccgctcctccagggtaaaagcctggggatgattttcgagaaaaggagtacacgaacaagactctccacagaaaccggatttgccttactcggcggccatccttgctttttgacaacccaggatattcatctgggagtgaacgagagtcttactgacaccgcccgtgtcttaagttctatggctgacgcagtactggcacgcgtgtataaacagtctgaccttgacactctggcaaaggaagcatcaattcctattattaacgggctctcggatctctatcatcctattcagatcctggcagattatctgacattgcaggaacactattccagcttgaaagggctgacccttagttggataggcgatgggaacaacatactgcactcaatcatgatgtctgcagccaagttcggcatgcacctccaggctgctaccccaaagggatatgagcccgacgcatctgtcaccaagctggcggagcagtacgcaaaggaaaatgggaccaagctgcttcttactaacgatcctctggaagcagcacatggtgggaatgttctcattacagacacatggatctccatggggcaggaggaggagaagaagaagagactgcaagcgtttcagggctaccaggtgacaatgaagacagcaaaagtggctgcctcggattggactttccttcactgtctgcctcggaaacccgaggaggtagacgacgaggtattctatagtcctcggagtcttgtattccctgaagcagagaatagaaaatggactataatggctgttatggtttccttgttgacagattattcgccacagctgcagaagcctaaattc

SEQ ID NO: 11777 - DNA, 1062 bp, Artificial Sequence
  derived and/or modified sequence
atgttgttcaacttgcgtatcctgctgaataacgccgccttccgcaatggacacaactttatggttagaaacttccggtgcggacagccactgcagaataaggtgcaactcaagggtcgcgacctcctcaccctcaagaacttcactggcgaggagattaagtacatgctctggctgtcggcggatctgaagttcaggatcaaacagaagggagagtatctcccactgctgcaagggaaatcgctgggaatgatttttgaaaaacggagcaccagaactaggctgtcgaccgaaactggattcgcactcctgggaggtcacccgtgctttctcactacgcaggatatacatcttggcgtcaatgagtccctgactgacactgccagagtgctctcctctatggccgacgcagtcctggcacgcgtgtacaaacagtcagacttggatactcttgccaaggaagcctcaatcccgatcatcaacggactttcggatctgtaccaccctatccaaatcttggctgactaccttactctgcaggaacactactcctctctgaagggactgactctctcctggatcggagatggcaacaacatcctgcattcgatcatgatgtctgccgctaagttcggaatgcacttgcaggcagcgacccccaaaggatacgagccggacgcatccgtcaccaagctcgccgagcagtacgccaaggaaaacggaactaaacttctcctcactaacgacccattggaagcagcacatggaggaaacgtcctcatcaccgacacctggatttcgatggggcaagaggaggaaaagaagaagagactgcaggccttccagggataccaggtcactatgaaaacggctaaagttgccgcctcggattggactttcctgcactgtctgcctcggaagcccgaggaagtggatgatgaggtgttctactcaccgcggtcgctggtgtttccggaggcggaaaatcggaagtggaccatcatggcagtgatggtatcgctgttgacggactactcaccgcagctccagaagccgaaattt

SEQ ID NO: 11778 - DNA, 1062 bp, Artificial Sequence
  derived and/or modified sequence
atgctgtttaaccttagaattcttctgaataacgcagcatttcggaacggacataactttatggtgcgtaatttcagatgtggacaaccactgcaaaacaaagtccagcttaagggtcgggacctccttaccctcaagaatttcacgggggaagagattaagtacatgttgtggctctcagcagaccttaagttccgaataaagcagaagggagagtacctccctctgctccagggaaaatcacttggtatgatctttgaaaagcgcagcactcggactcggctttcgactgaaacgggttttgcccttcttgggggacacccttgttttctgaccactcaagacattcatctcggagtgaatgagtcactcactgataccgcaagagtgctttcgtctatggcagacgcggtgctggctagagtctataagcaatccgatttggatacgttggccaaggaagcatccattcctatcatcaacggacttagcgacctgtaccaccccattcagatcttggcagattacctgactctgcaagagcactactcgtccctcaaagggctcacccttagctggataggagatggtaacaacattctgcattcaatcatgatgagcgcagccaagtttggcatgcatcttcaagcagcaaccccaaaggggtacgaaccagacgcatcagtgaccaaactcgcggagcaatacgcgaaagaaaatgggactaaacttcttctcaccaacgacccactggaagcagcccatggagggaatgtgctgattactgatacctggatctccatgggacaggaagaagaaaagaagaagagacttcaagccttccagggttaccaggttactatgaaaacggccaaggtcgcagcaagcgactggacctttctgcattgccttccaaggaagcctgaggaagttgatgatgaagtcttttactcaccgcgctcacttgtgtttccagaagccgaaaataggaagtggactatcatggcagtgatggtgtcacttctgaccgactactcgccacagcttcaaaagccaaagttt

SEQ ID NO: 11779 - DNA, 1062 bp, Artificial Sequence
  derived and/or modified sequence
atgttgtttaacctgaggatacttctcaataatgctgctttcaggaacggtcataacttcatggttcggaactttcgctgtgggcagcctttgcagaacaaggtgcagctgaaaggtagggacctgttgacgcttaagaacttcacaggagaagagataaagtatatgctgtggctgagcgccgacctcaagttccgaatcaagcagaaaggagaatacctgcctctcttgcaaggcaaaagcctgggaatgatcttcgagaaaagaagtactagaacaagactgagcacagaaactggtttcgcactgttgggcgggcacccctgcttcctgaccacacaggacatacatcttggtgtaaacgaaagtcttactgacactgctcgcgtgctttcctcaatggcagacgccgtgcttgcccgcgtctacaagcagtctgacttggatacgctcgctaaagaggcctcaattccgatcatcaacgggctgagtgatctgtatcaccccatacagatcctggccgactatctgactcttcaggaacactatagtagtttgaaggggctgacactgtcatggatcggagatggaaacaacatcctgcacagtatcatgatgtcagctgcgaaatttggcatgcatctgcaggctgcaactcctaaaggctatgagccagacgcaagcgtaactaagttggccgagcagtacgctaaagaaaatggtactaagctgctcttgacaaatgatccactcgaagccgcccacggaggtaacgtgctgattacagatacatggatcagtatggggcaagaggaggaaaagaagaagcggctgcaggcattccagggatatcaggtaacaatgaagacagcaaaggtggccgcgtctgattggacctttctccattgcctgccacggaagccggaggaagttgacgatgaggtcttttatagccccagaagtcttgtgttccccgaggcagagaacaggaaatggaccatcatggctgtcatggttagcttgctcacagactacagccctcagttgcagaagccaaagttt

SEQ ID NO: 11780 - DNA, 1062 bp, Artificial Sequence
  derived and/or modified sequence
atgctgttcaacctgagaattctgttgaataatgccgccttcaggaatgggcataacttcatggtcagaaatttccggtgcgggcagccactacaaaataaggtgcagcttaaaggccgtgacctacttactctgaagaatttcaccggggaggaaattaaatatatgttgtggctgagtgccgaccttaaatttcggatcaaacagaagggtgagtatttgcctcttcttcaaggaaagagtctcggtatgatttttgagaagcgcagcacgcgtacacgattatcaactgagacaggtttcgccttgctgggaggccatccttgcttcctcacgacgcaggatattcacctgggcgtgaacgagtctctgaccgataccgctcgggtcctcagttctatggctgatgccgtactggcacgggtctataagcaaagcgatcttgacacattagccaaggaagcctcaattccaatcataaacgggctgtcagatttataccaccctatacagatccttgcggattatctaacgcttcaagagcattattcctccctgaagggcctcacacttagctggataggagatggtaacaacattctgcattcgattatgatgtctgctgctaagttcggtatgcatttacaggcagccactccaaaaggctacgagcctgacgcatctgtcacaaaactggcagagcagtatgccaaagagaatggcactaagctcctgctgacaaatgaccctctggaagccgcccacggaggtaacgtcctgattacggatacatggatcagcatgggacaggaggaggagaaaaaaaagaggctgcaggccttccagggataccaggtgactatgaaaacggctaaagtggctgcatctgactggaccttccttcactgtcttccgagaaagcctgaggaggttgacgacgaggtcttttactctccgaggtctctggtgtttccggaggccgagaatcggaagtggacgatcatggcggttatggtttcactgttaacagattatagcccccagctgcagaagccgaagttt

SEQ ID NO: 11781 - DNA, 1062 bp, Artificial Sequence
  derived and/or modified sequence
atgctctttaacctgagaattctactgaataacgccgcattccgaaacgggcataattttatggtgcgaaattttcgttgcggccagccactgcagaacaaggtacagctaaagggaagagatctgctgacgcttaagaatttcactggagaagaaatcaagtacatgctgtggctgagtgccgacttaaagtttaggatcaagcagaaaggcgagtatttgcctttgttgcagggaaaatcactcgggatgatcttcgagaaacgaagcacccgcacacgactttctacagagacagggtttgcgttgcttggcgggcacccttgctttctgactacacaggatatccatttgggagtcaacgagagcctgaccgacactgccagagtgctgtcctctatggcggatgccgtgctcgctagggtgtacaaacaatccgacctagataccctggccaaagaagcttccattccaattattaatggtctgagcgatctctaccatccaattcagatacttgccgactacttgaccttacaggagcattattcgtccctaaagggtctgacgctgtcttggataggggatggaaataatattcttcattccatcatgatgagcgctgctaaattcgggatgcacctgcaagccgccactccgaagggctatgagcctgacgcctctgtgactaagctggccgagcagtatgcaaaggagaacggaaccaagctactcttaaccaacgacccactcgaagccgcccacggaggaaatgtcctgataacagatacctggatctcgatgggacaggaagaggagaaaaagaaaaggctgcaggccttccaaggttatcaagtaacaatgaagacagcgaaggtggccgcttctgattggaccttccttcattgcctgccccggaagcccgaggaagtagacgacgaagtattctattctccacggtccctcgtttttcctgaggcggagaacagaaaatggacaatcatggcggtaatggtttcgcttctgacagactactcccctcagctgcaaaagccgaaattt

SEQ ID NO: 11782 - DNA, 1062 bp, Artificial Sequence
  derived and/or modified sequence
atgttgtttaatcttcggatcttgttgaataacgcagcgtttaggaatggtcacaactttatggtgcggaacttcaggtgcggccagccgcttcagaataaagtccagctgaagggaagagatcttctgaccctgaagaatttcactggagaagaaatcaaatacatgctttggctgtccgctgatcttaagttccgcattaaacagaagggggaataccttccgctccttcagggaaaatccctggggatgattttcgagaagagaagcactcgcaccagacttagcaccgaaaccggttttgcactgcttggcggacatccttgctttctcaccacccaagatatacatctcggtgtcaatgagtcgctgaccgacaccgcacgcgtcctcagcagcatggccgacgcagtgcttgcacgggtgtacaaacagagcgaccttgataccctggcaaaggaagcatcgatcccaattatcaacggactgtcggacctgtaccaccctattcagatccttgcagattatctgaccctgcaagagcattactcgtcattgaaaggacttactttgtcctggataggagatggtaacaacatccttcatagtattatgatgtcggcagcaaagttcggaatgcatcttcaggcagcaacccctaagggttacgaaccagacgcatcagtgaccaagttggcagaacagtacgcgaaggagaatgggactaagctcctccttaccaacgatccacttgaagcggcccacggagggaacgtgttgatcactgatacctggatctcgatgggacaagaagaggagaaaaagaagcgactccaagcatttcaaggttaccaagtcactatgaaaacggcgaaggttgcagcatcggactggacctttctgcactgtctgcctcgaaagcctgaggaagtcgatgacgaggtgttttactcgccgcggtcgctggtctttccagaagccgaaaatcgaaaatggactattatggccgtgatggtgagcctcctgactgattactcgcctcaactgcagaagcctaaattc

SEQ ID NO: 11783 - DNA, 1062 bp, Artificial Sequence
  derived and/or modified sequence
atgctatttaatctgcgcattctactgaacaatgccgcgttccgtaacggacacaatttcatggttaggaatttcagatgtggccagccgctgcagaataaggtgcaacttaagggcagagacctgctgacgctgaagaactttacaggggaggaaattaagtacatgctgtggttgtctgccgacctgaagtttcgcattaaacagaagggcgaatacctgcctctgttgcagggaaagagcctggggatgatcttcgagaaaaggtccacaaggaccagactgtccaccgagaccggatttgcgctgctagggggacacccgtgttttctgacaacccaggatatccatctgggcgtgaacgagtcattgacggataccgcccgtgtgctgtctagtatggccgacgcggtgctggcgagggtgtataaacagtccgatctggacactttagccaaggaagcatccataccaatcatcaatggccttagtgacttataccatccgatccagatactcgcagattacctgaccctacaagaacactattcttccctgaagggtctgactttgtcctggattggcgacggtaacaatatacttcactcaataatgatgtctgctgctaaattcgggatgcacctccaggctgcgaccccgaagggctacgaacctgatgccagtgtgacaaaactggccgagcagtatgccaaagagaacggtaccaaactgttactgacaaacgacccccttgaggctgctcatggcgggaatgtgctcataaccgatacatggattagcatgggacaggaggaggagaagaaaaaacgcctgcaggccttccaggggtaccaagtaacgatgaaaactgccaaggtggcggcaagtgattggacctttctgcactgtctgccccgaaagcccgaagaggtggatgatgaggtgttctattccccgcgcagtcttgtctttcctgaagctgaaaaccggaagtggaccataatggctgtgatggtcagtctgctcactgactactccccgcagctccagaagccaaaattc

SEQ ID NO: 11784 - DNA, 1062 bp, Artificial Sequence
  derived and/or modified sequence
atgctgttcaacctcagaatcctgctgaataatgcggccttcagaaatggccataattttatggtgagaaatttcaggtgtggacaaccactgcaaaacaaggtccaactcaaaggccgcgatttgctcacactgaaaaacttcactggtgaggagatcaaatatatgctgtggctgagcgcggatctgaaattcagaatcaagcagaagggagagtaccttcctctgttgcagggaaagagtttgggtatgatcttcgagaaaaggtctactaggaccaggctttcaaccgaaaccggcttcgccctgctcggaggacacccttgtttcctcaccacgcaggacattcatcttggcgtcaacgagtccctgactgacactgcgagagtgcttagcagcatggctgatgccgtccttgcccgcgtgtacaagcagtctgacctggacaccctggctaaggaagcttcaatacctattatcaatggactctctgatctgtaccacccgatacagatactggccgactacctgactctgcaagaacactattccagtctgaagggcttgaccctgagctggatcggtgacggtaataatatcttgcatagcatcatgatgtctgccgctaagtttggtatgcacctgcaggcggccacccccaagggctatgagcccgacgcttctgtgactaaactcgcggagcaatacgctaaggagaacggcacgaagcttctgcttactaacgatcctttggaagccgcgcacggcggcaacgtactgatcactgacacatggatctccatgggtcaagaggaagagaagaaaaagaggctccaggccttccaaggttaccaggtgacaatgaaaaccgcaaaggtagcggcctccgactggacctttctccactgcctcccccgcaagccggaagaagtggatgatgaagtgttctacagcccaagatctctggtcttccccgaagcagagaaccgcaaatggaccattatggccgtgatggtcagtctgctcaccgattattccccccagttgcagaagcccaagttc

SEQ ID NO: 11785 - DNA, 1065 bp, Artificial Sequence
  derived and/or modified sequence
atgctgttcaacctgagaatcctgctgaacaacgccgccttcagaaacggccacaacttcatggtgagaaacttcagatgcggccagcccctgcagaacaaggtgcagctgaagggcagagacctgctgaccctgaagaacttcaccggcgaggagatcaagtacatgctgtggctgagcgccgacctgaagttcagaatcaagcagaagggcgagtacctgcccctgctgcagggcaagagcctgggcatgatcttcgagaagagaagcaccagaaccagactgagcaccgagaccggcttcgccctgctgggcggccacccctgcttcctgaccacccaggacatccacctgggcgtgaacgagagcctgaccgacaccgccagagtgctgagcagcatggccgacgccgtgctggccagagtgtacaagcagagcgacctggacaccctggccaaggaggccagcatccccatcatcaacggcctgagcgacctgtaccaccccatccagatcctggccgactacctgaccctgcaggagcactacagcagcctgaagggcctgaccctgagctggatcggcgacggcaacaacatcctgcacagcatcatgatgagcgccgccaagttcggcatgcacctgcaggccgccacccccaagggctacgagcccgacgccagcgtgaccaagctggccgagcagtacgccaaggagaacggcaccaagctgctgctgaccaacgaccccctggaggccgcccacggcggcaacgtgctgatcaccgacacctggatcagcatgggccaggaggaggagaagaagaagagactgcaggccttccagggctaccaggtgaccatgaagaccgccaaggtggccgccagcgactggaccttcctgcactgcctgcccagaaagcccgaggaggtggacgacgaggtgttctacagccccagaagcctggtgttccccgaggccgagaacagaaagtggaccatcatggccgtgatggtgagcctgctgaccgactacagcccccagctgcagaagcccaagttctag

SEQ ID NO: 11786 - DNA, 1065 bp, Artificial Sequence
  derived and/or modified sequence
atgttgtttaatctgaggattttgcttaataacgccgcctttcgcaatggccacaatttcatggtacggaattttcggtgtggacaacccctgcagaacaaagtccagcttaagggccgcgacctgttaacgctgaaaaacttcacaggggaagagattaagtatatgctgtggctcagcgccgatctgaagtttcgaattaagcagaagggtgaatatttgccccttttacagggcaagtctctgggtatgatcttcgagaagaggtccacacgcacacgcctctctacggagaccggatttgctttgcttggcggtcatccttgcttcctgaccactcaggacatccacctcggagtcaatgaatcattgaccgatacagcacgggtgctgagctctatggccgacgccgtcctagcccgggtttataaacagtccgatcttgataccctggcaaaagaggcatcaatccccatcatcaatggcctgtccgatctgtaccacccaatacagattctcgcagactatctcactctccaagagcattactcgagtctaaaaggtttgaccctgagttggatcggggacgggaataacatcctgcattctattatgatgagtgctgcgaaatttgggatgcatcttcaggctgccacccccaagggctatgaacctgacgcctctgtaaccaagctcgccgaacagtacgcaaaggagaacggcaccaaactgctgttaactaacgatccacttgaagctgcccatggaggaaatgtactcattacagacacctggatttcaatgggacaagaggaggagaaaaagaaacggctccaggcctttcaagggtatcaagtaacaatgaaaaccgctaaggtagcggcgtctgactggacattcctgcactgccttcccaggaagccagaggaggtcgacgatgaggtgttctactcgccacggagtcttgtgttcccagaggccgagaataggaaatggacaatcatggcggttatggtgtccctccttacagactattctccacagttgcagaagcctaaattctag

SEQ ID NO: 11787 - DNA, 1065 bp, Artificial Sequence
  derived and/or modified sequence
atgctgttcaacctgcgcatcctgctgaacaatgctgccttcagaaatggccacaacttcatggtgaggaacttccgctgtggccagcccctgcagaacaaggtgcagctgaagggccgggacctgctgaccctgaagaacttcaccggggaggagatcaagtacatgctgtggctgtctgctgacctgaagttccgcatcaagcagaagggggagtacctgcccctgctgcagggcaagagcctgggcatgatctttgagaagaggagcaccaggacccggctgagcacagaaacaggctttgccctgctgggcggccacccctgcttcctgaccacccaggacatccacctgggcgtgaatgaaagcctgacagacacagcccgggtgctgagctccatggctgatgctgtgctggcccgggtgtacaagcagagcgacctggacaccctggccaaggaggccagcatccccatcatcaatggcctgagtgacctgtaccaccccatccagatcctggccgactacctgaccctgcaggagcactacagcagcctgaagggcctgaccctgtcctggattggagatggcaacaacatcctgcacagcatcatgatgtctgctgccaagtttggcatgcacctgcaggccgccacccccaagggctatgagccagatgcctctgtgaccaagctggccgagcagtatgccaaggaaaatggcaccaagctgctgctgaccaatgaccccctggaggccgcccatggaggaaatgtgctgatcacagacacctggatctccatgggccaggaggaggagaagaagaagaggctgcaggccttccagggctaccaggtgaccatgaagacagccaaggtggccgccagtgactggaccttcctgcactgcctgcccaggaagccagaggaggtggatgatgaggtgttctacagccccaggagcctggtgtttcctgaggccgagaacaggaagtggaccatcatggctgtgatggtgtccctgctgacagactacagcccccagctgcagaagcccaagttctag

SEQ ID NO: 11788 - DNA, 1065 bp, Artificial Sequence
  derived and/or modified sequence
atgctgttcaacctgcggatcctgctgaacaacgccgccttccggaacgggcacaactttatggtgagaaacttccggtgtggtcagcctcttcagaataaggtgcagcttaaggggcgcgatctccttacccttaagaatttcaccggcgaggaaataaagtatatgctatggctgagtgccgatctaaagtttcgcattaaacagaagggagagtatttacccctgctccagggcaagagccttgggatgattttcgagaagagatcaacaagaacccgtctttccaccgagacaggcttcgcacttctcgggggacatccctgcttcttgacaactcaggacatccacctgggtgtcaacgagagcctcacagacaccgccagggtcctgagttccatggccgatgccgtgttggcgcgcgtgtacaaacaatcagacctcgatacattggcgaaagaagcttctatccccatcatcaacgggctgtctgacctgtaccacccgatccaaatactcgcggactatctgacgttgcaggaacattattcctcactcaaaggcctgactcttagctggataggtgatgggaataatattctccactccatcatgatgagcgccgccaagttcggcatgcacctgcaggctgctactccgaagggttacgagcccgacgcttccgtgaccaaactggctgaacaatacgccaaagaaaatggaacaaaactgctgttgaccaacgaccccctggaagccgctcacggcgggaacgtactgatcactgatacatggatttcaatgggtcaggaagaggagaagaagaagaggctacaggctttccagggatatcaggtgacaatgaagaccgctaaagttgctgcaagcgactggactttcctccattgccttcctcgcaaaccagaagaggtggacgatgaggtattctatagtccaagatccttggtctttcctgaggccgagaaccgcaaatggactatcatggccgtgatggtgtccttactgactgactattctcctcagctccagaaaccaaaattctag

SEQ ID NO: 11789 - DNA, 1065 bp, Artificial Sequence
  derived and/or modified sequence
atgttatttaatctgcgtatccttctgaacaatgccgcattccgcaatggtcataactttatggtccggaattttcgatgtggccagccactccagaacaaagtgcagcttaaaggacgtgacctgcttactctgaagaatttcaccggggaagaaatcaaatatatgttgtggttgagcgcggacttaaaatttcggattaagcagaagggagagtatctgccgcttctccaaggcaaatccctgggcatgattttcgaaaagcgcagtaccaggactcggctctcaactgaaactggcttcgcattattagggggtcatccctgtttcctgaccacacaggacattcatcttggtgtgaatgagagtctcaccgataccgcaagagtcctgagctcaatggccgatgccgtgttagcccgagtgtataagcaaagcgacctagacacactcgctaaggaagcatccatccctattatcaacggacttagtgacctttatcaccccatacaaatacttgccgattaccttactctgcaagagcactactcaagtttaaaaggtttgacgctgtcatggatcggcgatgggaataacatactccattccatcatgatgagcgctgctaagttcggaatgcatctgcaggccgctaccccaaaggggtacgaaccggacgcttctgtgacaaaactagccgaacagtacgccaaagagaatggcacgaagctcctcctgaccaacgacccgctcgaggccgcacacggaggtaacgttctgatcacagacacatggatttcaatgggccaagaagaagagaagaagaaacggctgcaagcattccaaggttaccaggtgactatgaagacagctaaagtggccgctagcgactggactttcttacattgcctgcccaggaaaccagaggaggtggatgacgaagtgttctactccccacgcagtctagtgttccctgaagcagagaaccggaaatggacaataatggccgttatggtaagccttttgactgattactcgcctcagctgcaaaagcctaagttttag

SEQ ID NO: 11790 - DNA, 1065 bp, Artificial Sequence
  derived and/or modified sequence
atgttgtttaacctacgcatactcctcaacaacgcagcttttagaaacggccacaactttatggtgcgcaactttcggtgtggccaacctttgcagaataaggtgcagctgaaagggcgggatctgctgactttaaaaaatttcactggggaggaaatcaagtacatgctctggctctctgcagatttaaagttcaggattaagcagaaaggagagtacctgccactccttcaggggaagtcattaggcatgatctttgagaagcggagcacgcgcactcgactgtcaacggaaaccggattcgctctgctgggaggccacccttgtttcctcacaacccaagacattcatctcggcgtcaatgagtcgctcactgataccgcccgggtcctatcatctatggctgatgctgtgctggcccgcgtgtacaagcaaagtgatctcgacaccctcgccaaggaggcctcaattcctatcataaacggactttctgacctatatcatccaatccagatcctggcggactacctgactctgcaggaacactactcctctctgaagggattgacattaagctggatcggagatggcaacaacatcttacatagcattatgatgtctgctgcaaagttcggcatgcatctgcaggctgctacccccaaaggctatgagcccgacgcatctgtaacaaaactcgcagagcagtatgcaaaggaaaacggtacgaaattgctgctaaccaatgaccccttggaagccgcccacggggggaatgtgctcatcacagatacatggattagcatgggacaggaggaggagaagaaaaaaaggttacaggcattccagggataccaagtgacaatgaagaccgccaaagtagcagcaagcgattggaccttcctgcactgcctcccccgtaagcccgaggaagtggacgatgaagtattttatagtccacgtagtctggtgttccctgaggctgagaacaggaaatggactatcatggctgtcatggtgagtttacttaccgattactctcctcagttgcaaaaacccaagttttag

SEQ ID NO: 11791 - DNA, 1065 bp, Artificial Sequence
  derived and/or modified sequence
atgttgttcaatctcagaattcttctaaacaatgccgcttttcgcaacggccataattttatggtacgcaacttcaggtgtggtcaacccctccagaataaggtgcaattgaaaggacgcgacctgctaaccctgaaaaatttcacaggcgaagagatcaaatatatgctctggctgagtgcagatctaaaattcagaattaagcaaaaaggcgaatatctgccgctgctgcaagggaagtccctgggtatgatctttgagaagcgcagcaccaggacccgacttagcactgaaactggtttcgcattgctcggcggccacccttgctttctgacaacacaggatatacatctgggtgttaatgagtcactgaccgatacggcacgtgtcctgagctctatggccgatgccgtcctcgcccgggtgtacaaacagtcagatctcgatacactggcgaaagaggcctcaatccccatcataaacggattaagcgacttataccaccccattcagatacttgcggactatttaaccttgcaggagcactatagtagcctaaaaggcctcactctctcatggatcggagacggcaataatatcctacactcaatcatgatgagtgctgcaaaatttggaatgcaccttcaagcagctactcctaaaggatacgagcccgatgcatccgtgaccaaactggctgaacaatatgccaaagagaacggcacgaagctactcctgacaaatgatcccctcgaggcggcacacgggggaaacgtgctaattaccgacacctggatttccatgggacaggaggaggaaaaaaaaaaacgattacaggcgtttcagggataccaagtaacgatgaagacggcaaaggtggccgccagcgattggacatttctgcattgtcttccccgtaagcccgaagaggtagacgacgaggtgttctactctcctcgaagcttggtttttcctgaggctgaaaatagaaaatggactatcatggccgttatggtctctctcctgacagattacagtccccaattgcaaaaacccaaattctag

SEQ ID NO: 11792 - DNA, 1585 bp, Artificial Sequence
  derived and/or modified sequence
aggggactttgataaggaagctgaagggtgatattacctttgctccctcactgcaactgaacacatttcttagtttttaggtggcccccgctggctaacttgctgtggagttttcaagggcatagaatcgtcctttacacaattaaaagaagatgctgtttaatctgaggatcctgttaaacaatgcagcttttagaaatggtcacaacttcatggttcgaaattttcggtgtggacaaccactacaaaataaagtgcagctgaagggccgtgaccttctcactctaaaaaactttaccggagaagaaattaaatatatgctatggctatcagcagatctgaaatttaggataaaacagaaaggagagtatttgcctttattgcaagggaagtccttaggcatgatttttgagaaaagaagtactcgaacaagattgtctacagaaacaggctttgcacttctgggaggacatccttgttttcttaccacacaagatattcatttgggtgtgaatgaaagtctcacggacacggcccgtgtattgtctagcatggcagatgcagtattggctcgagtgtataaacaatcagatttggacaccctggctaaagaagcatccatcccaattatcaatgggctgtcagatttgtaccatcctatccagatcctggctgattacctcacgctccaggaacactatagctctctgaaaggtcttaccctcagctggatcggggatgggaacaatatcctgcactccatcatgatgagcgcagcgaaattcggaatgcaccttcaggcagctactccaaagggttatgagccggatgctagtgtaaccaagttggcagagcagtatgccaaagagaatggtaccaagctgttgctgacaaatgatccattggaagcagcgcatggaggcaatgtattaattacagacacttggataagcatgggacaagaagaggagaagaaaaagcggctccaggctttccaaggttaccaggttacaatgaagactgctaaagttgctgcctctgactggacatttttacactgcttgcccagaaagccagaagaagtggatgatgaagtcttttattctcctcgatcactagtgttcccagaggcagaaaacagaaagtggacaatcatggctgtcatggtgtccctgctgacagattactcacctcagctccagaagcctaaattttgatgttgtgttacttgtcaagaaagaagcaatgttcttcagtaacagaatgagttggtttatggggaaaagagaagagaatctaaaaaataaacaaatccctaacacgtggtatgggtgaaccgtatgatatgctttgccattgtgaaactttccttaagcctttaatttaagtgctgatgcactgtaatacgtgcttaactttgcttaaactctctaattcccaatttctgagttacatttagatatcatattaattatcatatacatttacttcaacataaaatactgtgttcataatgtataatgtctaagccattaagtgtaatctatgcttattacctaaataaattatcacccatgctaattta

SEQ ID NO: 11793 - RNA, 1208 nt, Artificial Sequence
  derived and/or modified sequence
gggaaauaagagagaaaagaagaguaagaagaaauauaagagccaccaugcucuuuaaccuccgcauccuguugaauaacgcugcguuccgaaaugggcauaacuucaugguacgcaacuucagaugcggccagccacuccagaacaaggugcagcuuaaaggucgggaccuccuuacucugaagaacuuuaccggagaagagaucaaguacaugcuguggcuuucagcggauuugaaguuucgcauuaaacagaagggagaguaucuuccccucuugcaagggaagucgcucgggaugaucuucgagaagcgcucgacaaggacccggcucagcaccgaaaccggauuugcgcuguugggagggcacccguguuuucucacgacgcaagacauucacuugggagugaaugagucguugacagacacugccagaguccuuucaucgauggccgaugcggugcuugcgagggucuacaaacagucggaucuugacacacuggccaaggaagccucgaucccgaucauuaacgggcucucggauuuguaccacccaauccagaucuuggcggauuaucuuacauugcaagagcauuauuccucccucaaggggcugacucucagcuggauuggugacggaaauaacauccuccauucaaucaugaugagcgcagcgaaauucggaaugcaccuccaagcggccacgcccaaagguuaugaaccugaugcgagcguaacuaaacucgcggagcaguaugcaaaggaaaauggcacgaaacucuugcucacaaaugaccccuuggaggcagcacacggugguaauguccugauuacagacacauggaucuccauggggcaggaggaggagaaaaagaaaagacuucaggcauuucagggauaccagguaacgaugaaaacggcgaaggucgccgccucagacuggacuuuccuccauugccugccgaggaagccggaagaagucgaugaugagguguuuuacagcccccgaucccugguguucccugaagccgaaaaucggaaguggacaauuauggcagugauggugucccuucuuacggacuacucgccccagcugcaaaaaccgaaauucuaaugagcugccuucugcggggcuugccuucuggccaugcccuucuucucucccuugcaccuguaccucuuggucuuugaauaaagccugaguaggaag

SEQ ID NO: 11794 - RNA, 1065 nt, Artificial Sequence
  derived and/or modified sequence
auguuguuuaaccuacgcauacuccucaacaacgcagcuuuuagaaacggccacaacuuuauggugcgcaacuuucgguguggccaaccuuugcagaauaaggugcagcugaaagggcgggaucugcugacuuuaaaaaauuucacuggggaggaaaucaaguacaugcucuggcucucugcagauuuaaaguucaggauuaagcagaaaggagaguaccugccacuccuucaggggaagucauuaggcaugaucuuugagaagcggagcacgcgcacucgacugucaacggaaaccggauucgcucugcugggaggccacccuuguuuccucacaacccaagacauucaucucggcgucaaugagucgcucacugauaccgcccggguccuaucaucuauggcugaugcugugcuggcccgcguguacaagcaaagugaucucgacacccucgccaaggaggccucaauuccuaucauaaacggacuuucugaccuauaucauccaauccagauccuggcggacuaccugacucugcaggaacacuacuccucucugaagggauugacauuaagcuggaucggagauggcaacaacaucuuacauagcauuaugaugucugcugcaaaguucggcaugcaucugcaggcugcuacccccaaaggcuaugagcccgacgcaucuguaacaaaacucgcagagcaguaugcaaaggaaaacgguacgaaauugcugcuaaccaaugaccccuuggaagccgcccacggggggaaugugcucaucacagauacauggauuagcaugggacaggaggaggagaagaaaaaaagguuacaggcauuccagggauaccaagugacaaugaagaccgccaaaguagcagcaagcgauuggaccuuccugcacugccucccccguaagcccgaggaaguggacgaugaaguauuuuauaguccacguagucugguguucccugaggcugagaacaggaaauggacuaucauggcugucauggugaguuuacuuaccgauuacucuccucaguugcaaaaacccaaguuuuag

SEQ ID NO: 11795 - RNA, 1065 nt, Artificial Sequence
  derived and/or modified sequence
auguuguucaaucucagaauucuucuaaacaaugccgcuuuucgcaacggccauaauuuuaugguacgcaacuucagguguggucaaccccuccagaauaaggugcaauugaaaggacgcgaccugcuaacccugaaaaauuucacaggcgaagagaucaaauauaugcucuggcugagugcagaucuaaaauucagaauuaagcaaaaaggcgaauaucugccgcugcugcaagggaagucccuggguaugaucuuugagaagcgcagcaccaggacccgacuuagcacugaaacugguuucgcauugcucggcggccacccuugcuuucugacaacacaggauauacaucuggguguuaaugagucacugaccgauacggcacguguccugagcucuauggccgaugccguccucgcccggguguacaaacagucagaucucgauacacuggcgaaagaggccucaauccccaucauaaacggauuaagcgacuuauaccaccccauucagauacuugcggacuauuuaaccuugcaggagcacuauaguagccuaaaaggccucacucucucauggaucggagacggcaauaauauccuacacucaaucaugaugagugcugcaaaauuuggaaugcaccuucaagcagcuacuccuaaaggauacgagcccgaugcauccgugaccaaacuggcugaacaauaugccaaagagaacggcacgaagcuacuccugacaaaugauccccucgaggcggcacacgggggaaacgugcuaauuaccgacaccuggauuuccaugggacaggaggaggaaaaaaaaaaacgauuacaggcguuucagggauaccaaguaacgaugaagacggcaaagguggccgccagcgauuggacauuucugcauugucuuccccguaagcccgaagagguagacgacgagguguucuacucuccucgaagcuugguuuuuccugaggcugaaaauagaaaauggacuaucauggccguuauggucucucuccugacagauuacaguccccaauugcaaaaacccaaauucuag

SEQ ID NO: 11796 - protein, 539 aa, Artificial Sequence
  derived and/or modified sequence
MAAALRVAAVGARLSVLASGLRAAVRSLCSQATSVNERIENKRRTALLGGGQRRIDAQHKRGKLTARERISLLLDPGSFVESDMFVEHRCADFGMAADKNKFPGDSVVTGRGRINGRLVYVFSQDFTVFGGSLSGAHAQKICKIMDQAITVGAPVIGLNDSGGARIQEGVESLAGYADIFLRNVTASGVIPQISLIMGPCAGGAVYSPALTDFTFMVKDTSYLFITGPDVVKSVTNEDVTQEELGGAKTHTTMSGVAHRAFENDVDALCNLRDFFNYLPLSSQDPAPVRECHDPSDRLVPELDTIVPLESTKAYNMVDIIHSVVDEREFFEIMPNYAKNIIVGFARMNGRTVGIVGNQPKVASGCLDINSSVKGARFVRFCDAFNIPLITFVDVPGFLPGTAQEYGGIIRHGAKLLYAFAEATVPKVTVITRKAYGGAYDVMSSKHLCGDTNYAWPTAEIAVMGAKGAVEIIFKGHENVEAAQAEYIEKFANPFPAAVRGFVDDIIQPSSTRARICCDLDVLASKKVQRPWRKHANIPL

SEQ ID NO: 11797 - protein, 550 aa, Artificial Sequence
  derived and/or modified sequence
MAAALRVAAVGARLSVLASGLRAAVRSLCSQATSVNERIENKRRTALLGGGQRRIDAQHKRGKLTARERISLLLDPGSFVESDMFVEHRCADFGMAADKNKFPGDSVVTGRGRINGRLVYVFSQDFTVFGGSLSGAHAQKICKIMDQAITVGAPVIGLNDSGGARIQEGVESLAGYADIFLRNVTASGVIPQISLIMGPCAGGAVYSPALTDFTFMVKDTSYLFITGPDVVKSVTNEDVTQEELGGAKTHTTMSGVAHRAFENDVDALCNLRDFFNYLPLSSQDPAPVRECHDPSDRLVPELDTIVPLESTKAYNMVDIIHSVVDEREFFEIMPNYAKNIIVGFARMNGRTVGIVGNQPKVASGCLDINSSVKGARFVRFCDAFNIPLITFVDVPGFLPGTAQEYGGIIRHGAKLLYAFAEATVPKVTVITRKAYGGAYDVMSSKHLCGDTNYAWPTAEIAVMGAKGAVEIIFKGHENVEAAQAEYIEKFANPFPAAVRGFVDDIIQPSSTRARICCDLDVLASKKVRVQEVFHQVVQSGHRDGRGAVRW

SEQ ID NO: 11798 - DNA, 1620 bp, Artificial Sequence
  derived and/or modified sequence
atggctgccgccctccgagtcgccgccgttggagcaagactcagcgtcctcgccagcggcctccgcgcggctgtgcgaagtctgtgtagccaagcgacttccgtgaatgaacggattgagaacaagaggaggacggccttgttggggggcggacagcggagaattgatgcacagcacaaaaggggaaagctgacagctcgggagcgcattagtctattgttagaccctggaagtttcgtggaatctgacatgttcgtagagcaccgctgcgctgatttcggaatggctgctgacaagaataagtttccgggcgatagtgtcgtgaccggaaggggaagaataaatggaaggttggtttacgttttctctcaggactttaccgtgttcgggggatcgctatccggcgcccatgctcagaagatctgcaagataatggatcaagctatcactgtgggagctcccgttattggcctgaatgacagtggaggggctcgaatacaggaaggggttgaatctctcgcaggatatgccgatattttcctgaggaacgtcaccgctagcggggtgataccccagatctccctcatcatgggaccttgtgctgggggggctgtgtatagcccggcactgaccgattttactttcatggtgaaagatacttcatacctttttatcaccggaccagacgtcgtgaagtcagtgacaaacgaggacgtgacacaggaggagctgggaggcgctaagacccacaccacaatgagtggggttgctcatcgggctttcgagaatgatgtggacgctctctgtaatctccgtgattttttcaattacctcccgttaagtagccaggaccctgcccccgtccgagaatgtcacgaccccagcgaccggttggttccagagctcgacacaattgtgccgctggagtccactaaggcatataacatggtcgatatcattcattcggtcgtcgatgaaagagagttcttcgaaattatgccaaactacgctaaaaatattatcgtcggattcgctcggatgaacggcaggactgtgggtattgttggaaaccagcctaaagtggctagcggctgccttgatatcaacagcagtgttaagggagcacgtttcgtccgcttttgtgacgcctttaatattcccctgatcacctttgtggatgtgcctggcttcctgcccggaacagcccaagaatatggcggcattatccgccacggcgccaaattgctttatgcgttcgctgaagccaccgtcccaaaggtgaccgtgataacacgaaaggcatacggcggcgcttacgatgtgatgtcctccaaacacctgtgcggggacacgaactacgcttggcctaccgccgagattgccgtcatgggggccaaaggcgctgtagagatcatcttcaagggccacgagaatgtggaggccgctcaggctgagtatattgaaaaattcgccaatccctttcctgctgctgttagaggattcgtcgacgatatcatccagccgagttccacacgcgcaagaatttgctgcgacctggatgttctcgcctccaagaaagtccagcgtccctggaggaagcatgccaacatcccattatag

SEQ ID NO: 11799 - DNA, 1653 bp, Artificial Sequence
  derived and/or modified sequence
atggccgctgccctgcgcgtggcagcggttggcgcacggctgtcagttctggcgtctggcctgagggctgccgttcggagcctgtgttctcaggcaacatccgtgaacgaacgcatagagaacaaacgtagaaccgccctattaggtggcggccaacgccgcatcgacgcgcagcataagaggggcaagctgacggcgcgagagaggatttccctcctgctcgatcccggatctttcgtggaaagcgacatgttcgtggagcacaggtgcgctgactttggtatggccgcagacaaaaataagttcccaggcgactctgttgtgaccgggcgcggccgaatcaacggtcgcctagtttatgtatttagccaggacttcaccgtgtttggcggaagtctgagtggagcacacgcccagaaaatctgcaaaattatggaccaagccatcactgtcggagcaccggtgatagggctgaatgatagcggcggagcgaggatccaggaaggggtggagtctctggcaggctacgctgacattttccttcgcaatgttactgcatcaggagtcatccctcagataagccttattatgggtccatgcgcagggggggccgtgtactcgcctgccttgaccgattttacctttatggtgaaagatacaagctacctgttcataaccggacccgacgtcgtcaaaagcgtgaccaacgaggacgttacccaggaagaattgggcggggccaaaacacataccacaatgagcggtgtggcccacagggcattcgagaacgatgtggatgccctgtgcaacctgcgtgacttttttaattatctccccctgtcctcgcaggatcctgcccccgtgagagaatgtcatgatccctccgaccgtctggttccagaactggatactatcgtgcccctcgaaagtaccaaagcctataacatggtggatatcattcactccgttgtagacgagcgcgaattttttgagatcatgcctaactatgccaagaatatcattgtcggctttgccagaatgaatggcaggaccgtcggaatcgtgggaaaccagcccaaggtagcttcagggtgcctggacattaacagctctgttaaaggtgcccggttcgtgcgattttgcgacgctttcaatatacccctcatcaccttcgtggacgtgcctgggttcctgcccggcactgcgcaggagtatggtggcattattaggcatggcgccaaactcttgtacgccttcgccgaagccaccgttcccaaagtgactgttatcacaagaaaagcatatggcggcgcgtatgatgtgatgtcctcaaaacatctgtgcggcgatactaattatgcgtggcccacagctgagatcgcagtcatgggtgccaagggcgccgtcgagattattttcaaaggccatgagaacgtagaggccgcccaggccgaatacattgaaaagttcgcgaatccctttccggcagcagttaggggcttcgtggacgacattatacagccctcatccacaagggctcggatctgctgtgacttggacgtgctggctagcaagaaggtaagggtgcaggaggtgtttcaccaagtggtgcagtccgggcatagagatggaagaggtgcagtcaggtggtag

SEQ ID NO: 11800 - DNA, 1620 bp, Artificial Sequence
  derived and/or modified sequence
atggctgctgccctgcgggtggccgctgtgggcgcccggctgtctgtgctggccagcggcctgcgggctgctgtgcgcagcctgtgcagccaggccacctctgtgaatgaaagaattgagaacaagagaagaacagccctgctgggcggcggccagaggagaattgatgcccagcacaagaggggcaagctgacagcccgggagcgcatcagcctgctgctggaccccggcagctttgtggagagtgacatgtttgtggagcaccgctgtgccgactttggcatggctgctgacaagaacaagtttcctggggacagcgtggtgacaggccggggccgcatcaatggccgcctggtgtatgtgttcagccaggacttcaccgtgtttggaggcagcctgagcggggcccacgcccagaagatctgcaagatcatggaccaggccatcaccgtgggcgcccctgtgattggcctgaatgattctggaggagcccgcatccaggagggcgtggagagcctggccggctatgctgacatcttcctgagaaatgtgacagccagcggggtcatcccccagatcagcctcatcatgggcccctgtgccggcggcgctgtgtacagccctgccctgacagacttcaccttcatggtgaaggacaccagctacctgttcatcaccggcccagatgtggtgaagtctgtgaccaatgaagatgtgacccaggaggagctgggcggggccaagacccacaccaccatgtctggagtggcccaccgggcctttgaaaatgatgtggatgccctgtgcaacctgcgggacttcttcaactacctgcccctgagcagccaggaccctgcccctgtgcgggagtgccacgaccccagcgaccggctggtgcctgagctggacaccatcgtgcccctggagagcaccaaggcctacaacatggtggacatcatccacagcgtggtggatgagcgggagttctttgagatcatgcccaactatgccaagaacatcatcgtgggctttgccaggatgaatggccgcacagtgggcatcgtgggcaaccagcccaaggtggccagcggctgcctggacatcaacagctctgtgaagggggccaggtttgtgcgcttctgtgatgccttcaacatccccctcatcacctttgtggatgtgcccggcttcctgcctggaacagcccaggagtatggaggcatcatcagacatggagccaagctgctgtatgcctttgctgaggccaccgtgcccaaggtgaccgtcatcaccaggaaggcctatggaggagcctatgatgtgatgagcagcaagcacctgtgtggggacaccaactatgcctggcccacagctgagattgctgtgatgggcgccaagggagctgtggagatcatcttcaagggccatgaaaatgtggaggccgcccaggccgagtacatcgagaagtttgccaaccccttccctgctgctgtgcggggctttgtggatgacatcatccagcccagcagcacccgggcccgcatctgctgtgacctggatgtgctggccagcaagaaggtgcagaggccctggaggaagcacgccaacatccccctgtag

SEQ ID NO: 11801 - DNA, 1653 bp, Artificial Sequence
  derived and/or modified sequence
atggctgctgccctgcgggtggccgctgtgggcgcccggctgtctgtgctggccagcggcctgcgggctgctgtgcgcagcctgtgcagccaggccacctctgtgaatgaaagaattgagaacaagagaagaacagccctgctgggcggcggccagaggagaattgatgcccagcacaagaggggcaagctgacagcccgggagcgcatcagcctgctgctggaccccggcagctttgtggagagtgacatgtttgtggagcaccgctgtgccgactttggcatggctgctgacaagaacaagtttcctggggacagcgtggtgacaggccggggccgcatcaatggccgcctggtgtatgtgttcagccaggacttcaccgtgtttggaggcagcctgagcggggcccacgcccagaagatctgcaagatcatggaccaggccatcaccgtgggcgcccctgtgattggcctgaatgattctggaggagcccgcatccaggagggcgtggagagcctggccggctatgctgacatcttcctgagaaatgtgacagccagcggggtcatcccccagatcagcctcatcatgggcccctgtgccggcggcgctgtgtacagccctgccctgacagacttcaccttcatggtgaaggacaccagctacctgttcatcaccggcccagatgtggtgaagtctgtgaccaatgaagatgtgacccaggaggagctgggcggggccaagacccacaccaccatgtctggagtggcccaccgggcctttgaaaatgatgtggatgccctgtgcaacctgcgggacttcttcaactacctgcccctgagcagccaggaccctgcccctgtgcgggagtgccacgaccccagcgaccggctggtgcctgagctggacaccatcgtgcccctggagagcaccaaggcctacaacatggtggacatcatccacagcgtggtggatgagcgggagttctttgagatcatgcccaactatgccaagaacatcatcgtgggctttgccaggatgaatggccgcacagtgggcatcgtgggcaaccagcccaaggtggccagcggctgcctggacatcaacagctctgtgaagggggccaggtttgtgcgcttctgtgatgccttcaacatccccctcatcacctttgtggatgtgcccggcttcctgcctggaacagcccaggagtatggaggcatcatcagacatggagccaagctgctgtatgcctttgctgaggccaccgtgcccaaggtgaccgtcatcaccaggaaggcctatggaggagcctatgatgtgatgagcagcaagcacctgtgtggggacaccaactatgcctggcccacagctgagattgctgtgatgggcgccaagggagctgtggagatcatcttcaagggccatgaaaatgtggaggccgcccaggccgagtacatcgagaagtttgccaaccccttccctgctgctgtgcggggctttgtggatgacatcatccagcccagcagcacccgggcccgcatctgctgtgacctggatgtgctggccagcaagaaggtgcgggtgcaggaggtgttccaccaggtggtgcagagcggccacagagatggaagaggagctgtgcgctggtag

SEQ ID NO: 11802 - DNA, 1620 bp, Artificial Sequence
  derived and/or modified sequence
atggccgccgccctgcgggtggccgccgtgggcgcccggctgagcgtcctggcatcaggactgcgcgccgccgtacgttctctctgttcccaggccacttcagttaatgagagaatcgaaaataagagacggactgcgcttctaggaggcggacagaggaggattgatgcccagcacaagcggggaaaactgaccgcccgggagcggatctctctactgttggaccccgggtccttcgtggagtccgacatgtttgttgagcacagatgcgcagacttcgggatggctgccgacaagaacaaatttcccggcgattctgtagtgacaggcagaggtaggattaacggccggctggtgtacgtgttcagtcaggatttcactgtctttggcgggagcctcagcggagcacacgcccagaaaatatgcaagattatggaccaggccattaccgtcggcgcacctgtgattggactgaatgatagcggtggagcccggattcaagaaggggtagagtctcttgcgggctatgctgacatcttcctccggaatgtgaccgcctctggggtcattccacagatctctctgatcatgggaccgtgtgcaggaggagctgtttactccccggcattgaccgatttcacgtttatggtgaaggatacatcatacctgtttatcaccgggcctgatgtggtcaagagcgtaaccaacgaggacgtcactcaggaagagctcgggggtgccaagacgcacacaacgatgtccggagtcgcacaccgggcgtttgagaatgacgtcgacgcattgtgcaacctccgggatttttttaactatctgcccctttctagccaggaccccgctcccgtgagagagtgccatgaccctagcgatcgcctggtgccggagctcgataccatcgtccccctggagtctactaaggcatataatatggtggatattattcactcagtcgttgacgaacgggagttttttgaaattatgcctaactatgctaagaacatcatcgtcggattcgctaggatgaatggacggaccgtggggatagtcgggaaccagcctaaggtggcgagcgggtgtctcgatataaattctagcgtgaaaggggctagattcgtgcgattctgtgacgcctttaacatccccttaatcacatttgtggacgtgcccggcttcctgcctggcactgctcaggaatatgggggaatcatccggcacggggctaagcttctttacgcatttgctgaggcaacagtgcctaaggttaccgttatcaccagaaaagcctatggaggagcctacgacgtcatgtcttctaagcacttgtgcggcgatactaactacgcttggccaactgcagagatcgccgtgatgggagccaagggcgccgtagagatcatttttaagggacatgagaacgtggaggcagcccaggcagagtacatcgagaaattcgccaatccctttcccgcagctgtgcggggcttcgtcgatgatattatccagcctagctcaactcgggctcgcatctgttgcgacctggacgtcctcgcatccaaaaaagttcagcgtccctggagaaaacatgccaacattccactctag

SEQ ID NO: 11803 - DNA, 1653 bp, Artificial Sequence
  derived and/or modified sequence
atggccgccgccctgcgggtggccgccgtgggcgcccggctgagcgtgcttgccagcggattaagagccgcggtcaggagtctctgttctcaagccacgagcgtcaacgagaggatcgaaaacaagagacggacagcccttctgggcggcggccaaaggaggattgacgcacagcacaaacgcgggaaattaacggctcgggagcggatctctctcctgctcgacccaggatccttcgttgagagcgacatgtttgtagaacacaggtgcgcggatttcgggatggcagccgataaaaacaagtttccaggagactctgttgttacgggacggggcagaatcaacgggcggctcgtttatgtgttttctcaggatttcacagttttcggtgggtctctctcaggagcccacgcccagaagatctgtaaaatcatggatcaggccatcacagtgggggcccctgtaatcggcttaaacgactcaggtggtgctaggatccaagaaggggtcgaatctttggcaggctacgctgacattttcttacgaaatgtgacagcctcgggcgtcattcctcagatttccctgattatgggcccctgtgcaggtggcgccgtgtacagtcctgctctcaccgacttcacttttatggtgaaagacacttcctacctgttcatcacaggcccagacgtagttaagtcagtcactaacgaggacgtgacacaggaagagctgggcggtgccaagacccatacaaccatgagcggagtagcacatcgcgcttttgaaaatgatgttgatgcattatgtaatctgcgggattttttcaactacttaccactgtccagccaggacccagcacccgtgagagagtgccacgacccctccgacagactggtacctgagctggatacaattgtgccattagagagtacgaaggcttacaacatggtggacattatccactcagtcgtggatgagagagagttcttcgagatcatgcccaactacgccaagaatatcatcgttggatttgccaggatgaacgggcggactgtggggatcgtggggaatcagcccaaggtggcgtcaggttgtctggacattaacagctccgtaaagggagcccggtttgttcggttttgcgacgcgttcaatattccactcatcacgtttgtggacgtccccgggtttttacctgggacagcacaggaatatgggggcattatccggcacggagctaagttgctctacgctttcgcagaggccacagtccccaaagtgaccgtcatcacccgcaaagcctatggcggggcatacgatgtaatgtcttcaaagcacttatgtggagacactaactacgcctggcctacagctgaaatcgccgtcatgggagcaaaaggagccgtggagatcatctttaaaggacatgagaacgtcgaggccgcacaagcagaatacattgagaagttcgctaacccctttcctgccgccgttaggggattcgttgatgacataatacagcccagtagtactagagcacggatttgctgtgatttggacgtactcgcctctaagaaagtgcgtgtgcaggaagtgttccatcaggttgtgcagagcggacaccgggatgggaggggagcagtgcggtggtag

SEQ ID NO: 11804 - DNA, 1620 bp, Artificial Sequence
  derived and/or modified sequence
atggcggctgcactgagggtggcagcagtaggtgcgagactttctgtcctagcctctggtctacgggcagcagtccgctctctgtgttctcaggcaactagcgttaacgagcggatagaaaataagcgcagaacagccctactgggcggaggacagcgcagaatcgatgctcagcacaagagagggaagctcactgcacgggagcgtatctcactactccttgatcctggctctttcgtggagtccgatatgttcgtcgaacaccgctgtgccgactttggcatggccgctgataagaacaaattccctggagacagcgtggtcaccgggagggggcgaatcaacggaagactggtgtacgtcttcagccaagacttcactgtgttcggaggttcactaagcggggctcatgcccaaaaaatatgtaagatcatggatcaggctatcaccgtgggcgcacctgttattggtctcaatgatagtggaggcgctcggattcaggaaggtgtggagagtctggctggatacgccgacatatttctgagaaacgtcactgcgagcggggtaattcctcaaattagtctaatcatggggccatgtgctggcggagcagtttattcccccgctctaacggattttacattcatggtgaaggatacctcctatctgttcattacaggcccagacgtggtgaagagcgttaccaatgaagatgtcacgcaggaagagctggggggtgccaaaacacatacgactatgagcggcgtggcgcacagagctttcgagaatgacgtggatgcactgtgcaacttgcgcgacttctttaattacctgccactgagctctcaggatcctgctcctgtgagagaatgccatgacccatccgatcgcctggttccagagcttgacaccattgtccccctcgaatcgaccaaagcctataatatggtggacattatccactcagtggtcgatgaacgcgaattttttgaaatcatgcccaactatgcaaaaaacatcattgtggggtttgcacgcatgaatggccgtacggtggggattgtaggcaaccagccgaaggtcgcatccggctgcctggacatcaactcatctgtcaaaggggctcgtttcgtgcggttttgcgacgcctttaatatccctctcattactttcgtggacgtacccggtttccttccgggaacggcgcaggaatacggagggatcattcggcacggagcgaagttactttatgcatttgccgaagccaccgtgcccaaagtgacagtgatcacacgcaaagcatatgggggtgcctacgacgttatgtcctcaaaacacctgtgtggcgacacaaactacgcttggccaactgctgagatagcagtcatgggagctaaaggggcagtagagattatctttaagggacatgaaaacgtagaggccgctcaggctgagtatatcgaaaagttcgcaaatccattcccggcagctgttcgtgggttcgttgatgacatcatccagcctagctcgaccagagccagaatttgctgcgacttggatgtgctggctagtaagaaagtacaacggccttggcgaaaacacgcaaacatccctctgtag

SEQ ID NO: 11805 - DNA, 1653 bp, Artificial Sequence
  derived and/or modified sequence
atggctgcggcactgcgcgtcgctgcagtgggcgcacgcctctcagtattagcatccggcttgagggccgctgtgcggtccctctgttcccaagccacatccgttaatgaacgcatcgagaataagcgcaggaccgcactgttgggtggtggccagaggaggattgatgcccaacacaagcggggtaagctaaccgctcgggagaggatcagtcttctcctggatccagggtctttcgtggagtctgacatgtttgtcgagcaccgatgcgctgatttcggtatggccgcagataaaaacaagtttcccggagatagcgtggtgacaggcaggggaagaatcaacggtcgacttgtgtatgtgttttcccaggatttcacagtgtttggaggcagtcttagcggcgcacacgctcagaagatctgcaaaattatggatcaagccatcacagtgggagctcccgtgataggactgaacgattccggaggtgcgagaatacaagagggagtggaatcactcgcaggatatgccgacatctttttacgaaatgtgaccgcatccggcgttattcctcaaatctcattgatcatgggaccctgtgctggaggcgctgtgtattcacctgcccttacagatttcacttttatggtcaaagatacaagctatttgtttattactggaccggatgttgtgaagagtgttaccaatgaagatgtaactcaggaggagttggggggtgctaagacccatactaccatgagcggcgtggcccaccgtgctttcgagaacgacgtggacgctctctgtaacctccgggactttttcaactatctgccactgtcttctcaagacccagctcctgttcgagagtgtcatgacccatccgaccggcttgttcctgagctcgatacaatcgttcccttggagagcacgaaggcctataacatggtggatatcattcacagtgtggtagacgaaagggagttctttgagattatgcctaactatgccaaaaacatcattgtgggatttgctcgaatgaacgggaggactgtgggcatcgtgggcaaccaacccaaagttgcctccggttgccttgatatcaactcatctgttaagggggctaggttcgtccggttttgtgacgcatttaatattcctctgatcactttcgtggatgtcccgggatttttacccggaacggctcaggaatacggcggtataattagacatggggctaaactgctctacgcctttgctgaagccacagtacccaaggtgacagttattacccgcaaagcttatggaggcgcttacgatgtgatgtcatcaaaacacttgtgcggagacaccaattacgcttggcccactgctgagatcgccgtgatgggggcaaagggagccgttgaaataatctttaagggtcacgagaatgtggaagccgctcaggctgaatatatagaaaaattcgccaacccttttccggcagctgtcagaggctttgttgatgacattatccagccgtcctcgacaagagcaaggatctgttgtgacctggatgtgctcgcttccaagaaagtaagggttcaagaggtctttcaccaggtggtgcagagtggacatagggatggcagaggtgcagtgagatggtag

SEQ ID NO: 11806 - DNA, 1833 bp, Artificial Sequence
  derived and/or modified sequence
agcgccgtacccacgctttagcacatgcgtactcaggtgcgccggtaggggacgcgccggcacagcaaaaatggcggcggcattacgggtggcggcggtcggggcaaggctcagcgttctggcgagcggtctccgcgccgcggtccgcagcctttgcagccaggccacctctgttaacgaacgcatcgaaaacaagcgccggaccgcgctgctgggagggggccaacgccgtattgacgcgcagcacaagcgaggaaagctaacagccagggagaggatcagtctcttgctggaccctggcagctttgttgagagcgacatgtttgtggaacacagatgtgcagattttggaatggctgctgataagaataagtttcctggagacagcgtggtcactggacgaggccgaatcaatggaagattggtttatgtcttcagtcaggattttacagtttttggaggcagtctgtcaggagcacatgcccaaaagatctgcaaaatcatggaccaggccataacggtgggggctccagtgattgggctgaatgactctgggggagcacggatccaagaaggagtggagtctttggctggctatgcagacatctttctgaggaatgttacggcatccggagtcatccctcagatttctctgatcatgggcccatgtgctggtggggccgtctactccccagccctaacagacttcacgttcatggtaaaggacacctcctacctgttcatcactggccctgatgttgtgaagtctgtcaccaatgaggatgttacccaggaggagctcggtggtgccaagacccacaccaccatgtcaggtgtggcccacagagcttttgaaaatgatgttgatgccttgtgtaatctccgggatttcttcaactacctgcccctgagcagtcaggacccggctcccgtccgtgagtgccacgatcccagtgaccgtctggttcctgagcttgacacaattgtccctttggaatcaaccaaagcctacaacatggtggacatcatacactctgttgttgatgagcgtgaattttttgagatcatgcccaattatgccaagaacatcattgttggttttgcaagaatgaatgggaggactgttggaattgttggcaaccaacctaaggtggcctcaggatgcttggatattaattcatctgtgaaaggggctcgttttgtcagattctgtgatgcattcaatattccactcatcacttttgttgatgtccctggctttctacctggcacagcacaggaatacgggggcatcatccggcatggtgccaagcttctctacgcatttgctgaggcaactgtacccaaagtcacagtcatcaccaggaaggcctatggaggtgcctatgatgtcatgagctctaagcacctttgtggtgataccaactatgcctggcccaccgcagagattgcagtcatgggagcaaagggcgctgtggagatcatcttcaaagggcatgagaatgtggaagctgctcaggcagagtacatcgagaagtttgccaaccctttccctgcagcagtgcgagggtttgtggatgacatcatccaaccttcttccacacgtgcccgaatctgctgtgacctggatgtcttggccagcaagaaggtacaacgtccttggagaaaacatgcaaatattccattgtaaacaaatcaaaggaaaagaaaccaagaactgaattactgtctgcccattcacatcccattcctgccttttgcaatcatgaaacctgggaatccaaatagttggataacttagaataactaagtttattaaattctagaaagatc

SEQ ID NO: 11807 - DNA, 6090 bp, Artificial Sequence
  derived and/or modified sequence
cgcgccggcacagcaaaaatggcggcggcattacgggtggcggcggtcggggcaaggctcagcgttctggcgagcggtctccgcgccgcggtccgcagcctttgcagccaggccacctctgttaacgaacgcatcgaaaacaagcgccggaccgcgctgctgggagggggccaacgccgtattgacgcgcagcacaagcgaggaaagctaacagccagggagaggatcagtctcttgctggaccctggcagctttgttgagagcgacatgtttgtggaacacagatgtgcagattttggaatggctgctgataagaataagtttcctggagacagcgtggtcactggacgaggccgaatcaatggaagattggtttatgtcttcagtcaggattttacagtttttggaggcagtctgtcaggagcacatgcccaaaagatctgcaaaatcatggaccaggccataacggtgggggctccagtgattgggctgaatgactctgggggagcacggatccaagaaggagtggagtctttggctggctatgcagacatctttctgaggaatgttacggcatccggagtcatccctcagatttctctgatcatgggcccatgtgctggtggggccgtctactccccagccctaacagacttcacgttcatggtaaaggacacctcctacctgttcatcactggccctgatgttgtgaagtctgtcaccaatgaggatgttacccaggaggagctcggtggtgccaagacccacaccaccatgtcaggtgtggcccacagagcttttgaaaatgatgttgatgccttgtgtaatctccgggatttcttcaactacctgcccctgagcagtcaggacccggctcccgtccgtgagtgccacgatcccagtgaccgtctggttcctgagcttgacacaattgtccctttggaatcaaccaaagcctacaacatggtggacatcatacactctgttgttgatgagcgtgaattttttgagatcatgcccaattatgccaagaacatcattgttggttttgcaagaatgaatgggaggactgttggaattgttggcaaccaacctaaggtggcctcaggatgcttggatattaattcatctgtgaaaggggctcgttttgtcagattctgtgatgcattcaatattccactcatcacttttgttgatgtccctggctttctacctggcacagcacaggaatacgggggcatcatccggcatggtgccaagcttctctacgcatttgctgaggcaactgtacccaaagtcacagtcatcaccaggaaggcctatggaggtgcctatgatgtcatgagctctaagcacctttgtggtgataccaactatgcctggcccaccgcagagattgcagtcatgggagcaaagggcgctgtggagatcatcttcaaagggcatgagaatgtggaagctgctcaggcagagtacatcgagaagtttgccaaccctttccctgcagcagtgcgagggtttgtggatgacatcatccaaccttcttccacacgtgcccgaatctgctgtgacctggatgtcttggccagcaagaaggtaagagtccaagaagtgtttcaccaggttgtgcagtctggacaccgagatggtagaggggctgtaagatggtagaggaaccagctcaggagagcagctgggctagcagctttacggaagccttggatggtggggaaactcccgtacagaaactcagctggtcaaagaaactcaaagccacaagaccttggaagctttgtcaagtggaccagcctccatggaccacggaataccttgagagtaatgacagttgagtgttctcttgtgtgggaatgccttccccagctggtgccctcaccttaaagggaaaaagaaaatacactgaattttgtaaatgggaaatacttgggtccactgagctgatagctgacaagtgtctgtctttaaactgagagcagataatatggtgagctgtggtgtaggaagcactgctagggtcttgctggtcctgccccgccttgtgttaatccagttcctcctgagctacacagctgacaagtggtgaagctgggatttgaactcagatgggtttgaccccagccaagcctgtgttctgatcatttcaaagtactaccactcagctgatgaggaaggtgagatggacttctaagggttggcctaagagtaggggtgagggaggttggtggtctgttcccctgggcttgtcttaacccagaaagctactacatttagacagctttcctatctcccgcatgattctcttgcaaagcagtaccaacagatggccagtcatctttttgagttgctagagtaatggggagcacatccacaatacacccttctaatgcttgttagaaagtgcttttgttgcaaagttcttctagcttctttttttgaccctgtcttggtctccccagcccaactttctgcctctggttgcactgatactttgtcctggtgctggtgcttaagatgtggtctgctcagccaaagaagtctgtgaaggatactcacccacatgtggagttgatgaatcagccctcttcacctattcaacagatgtgactgttttgtctttctggttccaaaggatttctggagagctatgactttacccttttagaagtattggtcctcatactctgtgcacctctgatgtcagcatgggatttctacaattccaagcaggagttgcagccacttgataggcagtgcctcagtctggggcctctgtggaatccagctggcatattccagccaatgtggcagcctcaatagttagttaagttttgaccatgtccctactgtcctgggtggtgaaaatactccctttatgtgtccttgggagcagaaagatgctcttcaaaaagtggtgcctgatggagatctccacagaacaagacactcagaagggcagggatagaatcttacctgagcttggtctagtatgaaaagcctaaggctgggtgcgatggcccatgccctgtaatcccagcactttgggaggccaaggcaggtggattgcttgagctcagttcatgaccggcctgggcaacatggtgaaagcctgtctctactaaaaatacaaaacttagctgggcgtggtggtgggtgcctgtaattccagctacttgagagcctgaggcaggagaatctcttgaaccccagaggcggaggttgctgtgagctgagatcacaccattgtactccagcctgggtgacagaccgagaccctgtcttcacttaccgccccccccccccccccgaaaaaaaaaaggcaagcctgagtggcatcaaacctttgtttcccatgaatatactagtccctgcttgatggactgttacctgggaacaggggcaaacagggagttacagtcaagccacaaatgggagatttgcaagcctgacccaagcctgaaagtgctcatctagtctcatactcttgtaaccatctagatgagctgttacagaccatccttaaatgaccttccttccttggctgtctggaaagcttgcttgctgatttgtctcccacacctttgccttttttgcataggcatattaggccatttaaggaactcaccccctattgccagacccatgaagtgtgtagggtatgacttcttaaagaaagagtgaggaggtctaatgccaagagaaactttttaagacagtctggctctgttacctagattggagtgcagtagtggtgcaatcttggctcactgcaacaacctccaccttgtgggctcaagccatcctcctaccttagcctcacgagtagctggtgtgcgccatcatacgcagctaatttttgtattttttgtagaggagttttaccatgctacccaggctggtctcgaactcttgagctcaagtgatccactcaccttggccttccaaagtgctgggattacaggcgtgagccaccatgcctggctgaaaacttcatttctgtagctgcattgactctatgtggtcttcaaaagggcactgccagggtgcaattatgcatgtaagcccagagtctcaagccgtgaggacccatgctacaggccagtggatgggtgttccctgaatgcctcatgcaaaactcagtttgcaagagactccctcttaaaccacagatgacttggcctacacacactccagagaaatctaaggaatgaaagaaagtgagctattcctaaattctgctttcttaaaaaaaattaaaaagccaaaacaacaaaaccaccaactcactaataaggttaacttgctgccatttaacagattatcagaaattgcaaactctctcaagagccacaggacagaaaatcatctctttaaagccatacctggtagaaacaataggatgactaccacaagcctgattttgaatagtttattaaaggaaaggtgaagcatcagtttcaaattgtacaaaaggaaaaaaaacctcatattgcaaatgtacaatttacagaattactagcaaaaccaatcaaggagacaccgaaaatacaaaaatttgattgacttcaaactgaactggaaacccattggagtagatatttagcctttttgtgtggcatggtagtctacaattctgtcagcatctgttttccatacaagactgtcacgcaaaggatcaatttgtgcatgtgccagggcacctcatggcttgctccctggccaaaaccacaggcaggcagggctggggtggacagtccagtcattcctgcaccttcacttccagtgaagcccacaattctgggagaaagtgaggccccagctcccctaactggagcccaagaattgctgaattagcagagaagatatttttggtgaccaggtttttttcagaactgtacaaatgttgagaaaaatgttttgtgtctttactaaaaggatgaataaaatcatccatcatcatcttgctttcccgcacaaaagatgatcactgggtgtgcagaattttaaaaaatgtttttcgtatttgataaaaagggaaagcctcatgattctgttgcagctactttaaaaaccagcccagaaacagctgtggatgaattggtttggaaattctgaggcttactttagaaatcagaaaggaagagagagactaagtggggtttttaaaacaatagcagcaagtcataaaagtctaggcagaatgtaactctaaaccattgtagactgtcctgaagattcataatttctttccccaaaagaattattcttaatatgcacatttaacactgaaatgtagctgtaattcaaggtaagcttaggaacttcaccctctaagcacagacttctatgcagcacatacttctataatcagtaaacttaattcacaaaattagcgcataagggtattaagtgcatgggaagtaaacacagttatgttacacttaaaattacttttgaatgattgataaaggatttcttcatgattgattatcttaagaaaatggaagtctgtgtaacttgaatttggcagggcatgaaataagtggtaaaaacagcaaactgataacttgagaatcattttcgttttactgagaatactttatttgctggtagaagttgctaaaaatgcacagaacaaataccaatagaaaatgcactgtatttgaatctccctagtctatataaaatgaacggtgtacagcatctgttggaaaaatggctgcatggacatttcttattttatgcccacttataaataaaaataaaccttttattcaagagtatataaaatctgggaattcatatccatatccacagagggtgtgtggtttttggcagagatgtactatgtcagaatttcatcttagcttgtcaatgttctgctccttcattatttgtgttccacaaaggtcaaccaaatccagtgaactccaaaacactcttcgcaattaggatgagctgcttactcataggtttaataaaaatggttagcttttaaaacataaaaaggcaaaatgttaaaacggtttttaaattgtacaacaggaaaataaagttaaaaatatgttttttttt

SEQ ID NO: 11808 - DNA, 1620 bp, Artificial Sequence
  derived and/or modified sequence
atggccgccgccctgagagtggccgccgtgggcgccagactgagcgtgctggccagcggcctgagagccgccgtgagaagcctgtgcagccaggccaccagcgtgaacgagagaatcgagaacaagagaagaaccgccctgctgggcggcggccagagaagaatcgacgcccagcacaagagaggcaagctgaccgccagagagagaatcagcctgctgctggaccccggcagcttcgtggagagcgacatgttcgtggagcacagatgcgccgacttcggcatggccgccgacaagaacaagttccccggcgacagcgtggtgaccggcagaggcagaatcaacggcagactggtgtacgtgttcagccaggacttcaccgtgttcggcggcagcctgagcggcgcccacgcccagaagatctgcaagatcatggaccaggccatcaccgtgggcgcccccgtgatcggcctgaacgacagcggcggcgccagaatccaggagggcgtggagagcctggccggctacgccgacatcttcctgagaaacgtgaccgccagcggcgtgatcccccagatcagcctgatcatgggcccctgcgccggcggcgccgtgtacagccccgccctgaccgacttcaccttcatggtgaaggacaccagctacctgttcatcaccggccccgacgtggtgaagagcgtgaccaacgaggacgtgacccaggaggagctgggcggcgccaagacccacaccaccatgagcggcgtggcccacagagccttcgagaacgacgtggacgccctgtgcaacctgagagacttcttcaactacctgcccctgagcagccaggaccccgcccccgtgagagagtgccacgaccccagcgacagactggtgcccgagctggacaccatcgtgcccctggagagcaccaaggcctacaacatggtggacatcatccacagcgtggtggacgagagagagttcttcgagatcatgcccaactacgccaagaacatcatcgtgggcttcgccagaatgaacggcagaaccgtgggcatcgtgggcaaccagcccaaggtggccagcggctgcctggacatcaacagcagcgtgaagggcgccagattcgtgagattctgcgacgccttcaacatccccctgatcaccttcgtggacgtgcccggcttcctgcccggcaccgcccaggagtacggcggcatcatcagacacggcgccaagctgctgtacgccttcgccgaggccaccgtgcccaaggtgaccgtgatcaccagaaaggcctacggcggcgcctacgacgtgatgagcagcaagcacctgtgcggcgacaccaactacgcctggcccaccgccgagatcgccgtgatgggcgccaagggcgccgtggagatcatcttcaagggccacgagaacgtggaggccgcccaggccgagtacatcgagaagttcgccaaccccttccccgccgccgtgagaggcttcgtggacgacatcatccagcccagcagcaccagagccagaatctgctgcgacctggacgtgctggccagcaagaaggtgcagagaccctggagaaagcacgccaacatccccctgtag

SEQ ID NO: 11809 - DNA, 1653 bp, Artificial Sequence
  derived and/or modified sequence
atggccgccgccctgagagtggccgccgtgggcgccagactgagcgtgctggccagcggcctgagagccgccgtgagaagcctgtgcagccaggccaccagcgtgaacgagagaatcgagaacaagagaagaaccgccctgctgggcggcggccagagaagaatcgacgcccagcacaagagaggcaagctgaccgccagagagagaatcagcctgctgctggaccccggcagcttcgtggagagcgacatgttcgtggagcacagatgcgccgacttcggcatggccgccgacaagaacaagttccccggcgacagcgtggtgaccggcagaggcagaatcaacggcagactggtgtacgtgttcagccaggacttcaccgtgttcggcggcagcctgagcggcgcccacgcccagaagatctgcaagatcatggaccaggccatcaccgtgggcgcccccgtgatcggcctgaacgacagcggcggcgccagaatccaggagggcgtggagagcctggccggctacgccgacatcttcctgagaaacgtgaccgccagcggcgtgatcccccagatcagcctgatcatgggcccctgcgccggcggcgccgtgtacagccccgccctgaccgacttcaccttcatggtgaaggacaccagctacctgttcatcaccggccccgacgtggtgaagagcgtgaccaacgaggacgtgacccaggaggagctgggcggcgccaagacccacaccaccatgagcggcgtggcccacagagccttcgagaacgacgtggacgccctgtgcaacctgagagacttcttcaactacctgcccctgagcagccaggaccccgcccccgtgagagagtgccacgaccccagcgacagactggtgcccgagctggacaccatcgtgcccctggagagcaccaaggcctacaacatggtggacatcatccacagcgtggtggacgagagagagttcttcgagatcatgcccaactacgccaagaacatcatcgtgggcttcgccagaatgaacggcagaaccgtgggcatcgtgggcaaccagcccaaggtggccagcggctgcctggacatcaacagcagcgtgaagggcgccagattcgtgagattctgcgacgccttcaacatccccctgatcaccttcgtggacgtgcccggcttcctgcccggcaccgcccaggagtacggcggcatcatcagacacggcgccaagctgctgtacgccttcgccgaggccaccgtgcccaaggtgaccgtgatcaccagaaaggcctacggcggcgcctacgacgtgatgagcagcaagcacctgtgcggcgacaccaactacgcctggcccaccgccgagatcgccgtgatgggcgccaagggcgccgtggagatcatcttcaagggccacgagaacgtggaggccgcccaggccgagtacatcgagaagttcgccaaccccttccccgccgccgtgagaggcttcgtggacgacatcatccagcccagcagcaccagagccagaatctgctgcgacctggacgtgctggccagcaagaaggtgagagtgcaggaggtgttccaccaggtggtgcagagcggccacagagacggcagaggcgccgtgagatggtag

SEQ ID NO: 11810 - protein, 277 aa, Artificial Sequence
  derived and/or modified sequence
MGLLECCARCLVGAPFASLVATGLCFFGVALFCGCGHEALTGTEKLIETYFSKNYQDYEYLINVIHAFQYVIYGTASFFFLYGALLLAEGFYTTGAVRQIFGDYKTTICGKGLSATVTGGQKGRGSRGQHQAHSLERVCHCLGKWLGHPDKFVGITYALTVVWLLVFACSAVPVYIYFNTWTTCQSIAFPSKTSASIGSLCADARMYGVLPWNAFPGKVCGSNLLSICKTAEFQMTFHLFIAAFVGAAATLVSLLTFMIAATYNFAVLKLMGRGTKF

SEQ ID NO: 11811 - protein, 127 aa, Artificial Sequence
  derived and/or modified sequence
MGLLECCARCLVGAPFASLVATGLCFFGVALFCGCGHEALTGTEKLIETYFSKNYQDYEYLINVIHAFQYVIYGTASFFFLYGALLLAEGFYTTGAVRQIFGDYKTTICGKGLSATVTGGQKGRGSR

SEQ ID NO: 11812 - protein, 255 aa, Artificial Sequence
  derived and/or modified sequence
MGLLECCARCLVGAPFASLVATGLCFFGVALFCGCGHEALTGTEKLIETYFSKNYQDYEYLINVIHAFQYVIYGTASFFFLYGALLLAEGFYTTGAVRQKGRGSRGQHQAHSLERVCHCLGKWLGHPDKFVGITYALTVVWLLVFACSAVPVYIYFNTWTTCQSIAFPSKTSASIGSLCADARMYGVLPWNAFPGKVCGSNLLSICKTAEFQMTFHLFIAAFVGAAATLVSLLTFMIAATYNFAVLKLMGRGTKF

SEQ ID NO: 11813 - protein, 137 aa, Artificial Sequence
  derived and/or modified sequence
MGLLECCARCLVGAPFASLVATGLCFFGVALFCGCGHEALTGTEKLIETYFSKNYQDYEYLINVIHAFQYVIYGTASFFFLYGALLLAEGFYTTGAVRQIFGDYKTTICGKGLSATVTGGQKGRGSRGQHQAHSLER

SEQ ID NO: 11814 - protein, 123 aa, Artificial Sequence
  derived and/or modified sequence
MGLLECCARCLVGAPFASLVATGLCFFGVALFCGCGHEALTGTEKLIETYFSKNYQDYEYLINVIHAFQYVIYGTASFFFLYGALLLAEGFYTTGAVRQIFGDYKTTICGKGLSATVTGGQKG

SEQ ID NO: 11815 - protein, 136 aa, Artificial Sequence
  derived and/or modified sequence
MGLLECCARCLVGAPFASLVATGLCFFGVALFCGCGHEALTGTEKLIETYFSKNYQDYEYLINVIHAFQYVIYGTASFFFLYGALLLAEGFYTTGAVRQIFGDYKTTICGKGLSATVTGGQKGRGSRGQHQAHSLE

SEQ ID NO: 11816 - DNA, 834 bp, Artificial Sequence
  derived and/or modified sequence
atgggcctcctagaatgttgcgcacggtgtttagtgggagccccatttgcaagcctggtagcaacgggcctgtgtttttttggtgtggcccttttctgcgggtgcggtcacgaggcattgactggaacggaaaaacttatagagacttactttagcaaaaactaccaggattatgaatacctcatcaatgtgatccatgcgtttcagtacgtgatctatggcaccgccagttttttcttcctttatggtgccttgttactcgccgagggattttacaccaccggagccgtgcgacagatttttggcgactacaagacgaccatttgcgggaagggactttcagccactgttaccggcggccaaaaggggagaggctctcgcggtcagcatcaagcgcattcgctggagagggtctgtcactgcttgggcaagtggctcggacaccctgacaagtttgtcggtattacgtacgccctcactgttgtatggctcctggttttcgcctgcagtgcagtgccagtgtacatatacttcaatacttggaccacctgtcagagcattgcctttccctcaaaaacatcggcgtctattggttccttgtgcgccgatgccagaatgtacggagtgctgccctggaacgcattcccaggaaaggtgtgcggcagcaatctgctgtctatctgcaagacagccgagtttcagatgaccttccacctgttcatcgctgcctttgtgggggccgcggccactctggttagcctgctgactttcatgatcgccgcaacctacaactttgctgtgctgaaactaatggggcgaggtacgaaattctag

SEQ ID NO: 11817 - DNA, 834 bp, Artificial Sequence
  derived and/or modified sequence
atgggcctcctggagtgctgcgctcgttgtttagtgggtgccccgttcgcatctctcgtggcgacaggcttatgctttttcggcgtggcgcttttctgcggatgtgggcacgaggcactcactggaactgagaaacttattgagacatatttcagcaagaactatcaagactacgaatatttgatcaatgtgattcacgccttccaatacgtgatatacgggacggcctctttcttcttcctctacggtgcactattactggccgagggtttttacacaactggcgccgtcaggcagatttttggtgattataaaacgaccatctgtgggaagggacttagcgccaccgtgactggcgggcagaaaggacggggatcccgagggcagcatcaggctcactcgctcgagagagtttgtcactgtttagggaagtggctgggccacccagataagtttgtgggcatcacatacgctctcaccgtagtgtggctgttagtgtttgcctgttcggcggtaccggtgtacatttactttaacacctggaccacatgccagtccatcgcatttccaagcaagacgtccgccagcattggaagtctgtgcgctgacgcgaggatgtacggggtgttaccttggaatgcatttcctggaaaagtgtgtggcagcaatctactcagtatctgcaaaaccgcggagtttcaaatgacctttcatctctttatcgcggcgttcgtgggcgctgctgccactctggtttcgttactgaccttcatgatcgcagctacctataattttgccgtcctcaagctgatgggaaggggcactaaattttag

SEQ ID NO: 11818 - DNA, 384 bp, Artificial Sequence
  derived and/or modified sequence
atgggattactggagtgctgtgctaggtgcttagtcggcgcacccttcgcttccctggtagcaaccggactttgctttttcggcgtggccctgttctgcggctgtggtcatgaggccctaacgggaaccgagaaattaattgaaacttatttctcaaagaactaccaggactatgaatatctgatcaatgtgattcacgcttttcagtatgttatctatgggaccgcaagcttcttcttcctgtacggcgccctgctccttgccgaaggattttatacaacaggagccgtgcgacagatctttggcgactataagacgaccatatgcggtaagggcctatcagctactgtcaccggcggccagaaaggccgaggcagccgatag

SEQ ID NO: 11819 - DNA, 768 bp, Artificial Sequence
  derived and/or modified sequence
atgggattgctggagtgttgcgccaggtgcctggtgggagccccattcgcaagtctggtagctacaggactatgcttttttggagtcgctctcttttgtggatgcgggcacgaggctctcactggaactgagaaactgattgaaacctatttttcaaaaaattaccaggattatgagtacctaattaatgtgatccacgctttccaatacgtcatctacggaaccgcctccttcttcttcctctacggggcactccttctcgccgagggcttttacacaactggcgcggtgcgacagaaggggcggggttctaggggacagcaccaagctcactctctggagcgagtttgtcattgcctcggcaaatggcttggccacccggataaattcgtcggtataacttatgccctgacagtggtatggttattggtgtttgcatgcagtgcggtaccggtgtatatttactttaacacgtggacgacgtgccaatccatcgcattcccatccaaaacgtctgcgtcaatcggcagcctctgcgcagatgccaggatgtacggcgtgctgccatggaacgcctttcccggcaaagtgtgtggctctaatctgctttcaatttgcaagacggcagagttccagatgacttttcacctattcatcgccgcctttgtcggagcggctgctaccctggtttctcttctgactttcatgatcgccgccacttacaattttgctgtgcttaagctgatggggagaggcaccaagttctag

SEQ ID NO: 11820 - DNA, 414 bp, Artificial Sequence
  derived and/or modified sequence
atgggattgcttgaatgttgcgcacgttgtttggttggcgcgcctttcgcttctttagtcgctaccggtctgtgcttttttggagtcgctttgttttgtggctgtgggcacgaagccctgacaggtacagaaaagctgattgagacttacttcagcaaaaattatcaagattatgagtacctaattaacgtgatacatgccttccagtacgtcatctacggcaccgccagctttttcttcctgtacggggccctgctgctggcggaagggttttataccacaggagccgtgcgtcagatctttggagattacaaaacaaccatctgtgggaaaggactgagcgccacggttacgggcggccagaaaggcagagggagtagaggtcaacatcaggcccattctctcgagagatag

SEQ ID NO: 11821 - DNA, 372 bp, Artificial Sequence
  derived and/or modified sequence
atgggcttactggaatgttgtgcgaggtgtttagtgggcgcccccttcgctagcctggtcgctacaggcctatgcttttttggcgtggctctgttctgcggatgtggccatgaggcactcacaggcacagaaaagctgatagagacatatttttccaaaaactatcaggactacgaatacctcatcaatgtgatccatgctttccagtacgtgatttacggaactgcatcgttcttcttcctgtatggagccctcctgctcgcggagggcttctatacaaccggagccgtgcgacagatttttggcgattataagacaaccatatgcgggaaaggattatctgctacggtcaccgggggccagaaaggctag

SEQ ID NO: 11822 - DNA, 411 bp, Artificial Sequence
  derived and/or modified sequence
atggggctgctcgagtgttgcgcaaggtgtttagtcggcgccccgtttgcatccctggtcgcaactggcctatgtttctttggcgtggcattgttttgtggttgcggccacgaggcgctgactggcaccgaaaagctgatagagacatatttttctaagaactaccaagattacgagtacctcatcaatgttatacacgcctttcaatatgtaatctacggcactgctagcttttttttcctgtatggcgcactgttgctggccgagggattttataccacgggcgcggtgcgccagattttcggggattacaagacaaccatctgtgggaaaggtttgagtgccaccgtaaccgggggtcagaaaggccgggggtccaggggccagcaccaggcccatagtttggagtag

SEQ ID NO: 11823 - DNA, 834 bp, Artificial Sequence
  derived and/or modified sequence
atgggcctgctggagtgctgtgcccgctgcctggtgggcgccccctttgccagcctggtggccaccggcctgtgcttctttggagtggccctcttctgtggctgcggccacgaggccctgactggaacagagaagctgattgagacctacttcagcaagaactaccaggactatgagtacctgatcaacgtcatccacgccttccagtatgtgatctatggaacagccagcttcttcttcctgtatggagccctgctgctggccgagggcttctacaccaccggggctgtgcggcagatctttggagactacaagaccaccatctgtgggaagggcctgagcgccaccgtgactggaggccagaagggccggggcagccggggccagcaccaggcccacagcctggagcgggtgtgccactgcctgggcaagtggctgggccacccagacaagtttgtgggcatcacctacgccctgactgtggtgtggctgctggtgtttgcctgcagcgctgtgcctgtgtacatctacttcaacacctggaccacctgccagagcatcgccttccccagcaagaccagcgccagcatcggcagcctgtgtgctgatgccaggatgtatggagtgctgccctggaatgccttccctgggaaggtgtgtggcagcaacctgctgagcatctgcaagacagctgagttccagatgaccttccacctgttcatcgccgcctttgtgggcgccgccgccaccctggtgtccctgctgaccttcatgattgctgccacctacaactttgctgtgctgaagctgatgggccggggcaccaagttctag

SEQ ID NO: 11824 - DNA, 384 bp, Artificial Sequence
  derived and/or modified sequence
atgggcctgctggagtgctgtgcccgctgcctggtgggcgccccctttgccagcctggtggccaccggcctgtgcttctttggagtggccctcttctgtggctgcggccacgaggccctgactggaacagagaagctgattgagacctacttcagcaagaactaccaggactatgagtacctgatcaacgtcatccacgccttccagtatgtgatctatggaacagccagcttcttcttcctgtatggagccctgctgctggccgagggcttctacaccaccggggctgtgcggcagatctttggagactacaagaccaccatctgtgggaagggcctgagcgccaccgtgactggaggccagaagggccggggcagcaggtag

SEQ ID NO: 11825 - DNA, 768 bp, Artificial Sequence
  derived and/or modified sequence
atgggcctgctggagtgctgtgcccgctgcctggtgggcgccccctttgccagcctggtggccaccggcctgtgcttctttggagtggccctcttctgtggctgcggccacgaggccctgactggaacagagaagctgattgagacctacttcagcaagaactaccaggactatgagtacctgatcaacgtcatccacgccttccagtatgtgatctatggaacagccagcttcttcttcctgtatggagccctgctgctggccgagggcttctacaccaccggggctgtgcggcagaagggccggggcagccggggccagcaccaggcccacagcctggagcgggtgtgccactgcctgggcaagtggctgggccacccagacaagtttgtgggcatcacctacgccctgactgtggtgtggctgctggtgtttgcctgcagcgctgtgcctgtgtacatctacttcaacacctggaccacctgccagagcatcgccttccccagcaagaccagcgccagcatcggcagcctgtgtgctgatgccaggatgtatggagtgctgccctggaatgccttccctgggaaggtgtgtggcagcaacctgctgagcatctgcaagacagctgagttccagatgaccttccacctgttcatcgccgcctttgtgggcgccgccgccaccctggtgtccctgctgaccttcatgattgctgccacctacaactttgctgtgctgaagctgatgggccggggcaccaagttctag

SEQ ID NO: 11826 - DNA, 414 bp, Artificial Sequence
  derived and/or modified sequence
atgggcctgctggagtgctgtgcccgctgcctggtgggcgccccctttgccagcctggtggccaccggcctgtgcttctttggagtggccctcttctgtggctgcggccacgaggccctgactggaacagagaagctgattgagacctacttcagcaagaactaccaggactatgagtacctgatcaacgtcatccacgccttccagtatgtgatctatggaacagccagcttcttcttcctgtatggagccctgctgctggccgagggcttctacaccaccggggctgtgcggcagatctttggagactacaagaccaccatctgtgggaagggcctgagcgccaccgtgactggaggccagaagggccggggcagccggggccagcaccaggcccacagcctggagaggtag

SEQ ID NO: 11827 - DNA, 372 bp, Artificial Sequence
  derived and/or modified sequence
atgggcctgctggagtgctgtgcccgctgcctggtgggcgccccctttgccagcctggtggccaccggcctgtgcttctttggagtggccctcttctgtggctgcggccacgaggccctgactggaacagagaagctgattgagacctacttcagcaagaactaccaggactatgagtacctgatcaacgtcatccacgccttccagtatgtgatctatggaacagccagcttcttcttcctgtatggagccctgctgctggccgagggcttctacaccaccggggctgtgcggcagatctttggagactacaagaccaccatctgtgggaagggcctgagcgccaccgtgactggaggccagaagggctag

SEQ ID NO: 11828 - DNA, 411 bp, Artificial Sequence
  derived and/or modified sequence
atgggcctgctggagtgctgtgcccgctgcctggtgggcgccccctttgccagcctggtggccaccggcctgtgcttctttggagtggccctcttctgtggctgcggccacgaggccctgactggaacagagaagctgattgagacctacttcagcaagaactaccaggactatgagtacctgatcaacgtcatccacgccttccagtatgtgatctatggaacagccagcttcttcttcctgtatggagccctgctgctggccgagggcttctacaccaccggggctgtgcggcagatctttggagactacaagaccaccatctgtgggaagggcctgagcgccaccgtgactggaggccagaagggccggggcagccggggccagcaccaggcccacagcctggagtag

SEQ ID NO: 11829 - DNA, 834 bp, Artificial Sequence
  derived and/or modified sequence
atgggcctgctggagtgctgcgcccggtgcctggtgggcgcccccttcgcttctctcgttgctactggactgtgctttttcggcgttgccctgttctgtggatgcggacacgaggctctcactgggaccgagaagctgattgaaacctacttcagcaagaattatcaagactacgagtatctgatcaacgtgatccacgcttttcagtatgtcatttacgggactgcaagtttcttctttctctatggtgctctgctgctggctgagggtttttataccaccggtgctgttaggcagattttcggtgactacaaaaccaccatttgcggaaaaggactgtctgcgaccgttaccggggggcaaaaagggaggggcagcagaggtcaacaccaggcccactcactggaacgcgtatgccattgcttagggaaatggctggggcacccggataagttcgtcgggattacgtacgccttgacagtcgtttggctgctggtgtttgcgtgttctgctgtgcctgtgtacatctatttcaatacttggacaacctgccagagtattgcattcccaagcaagacctctgcctcaatcggaagtctatgcgcggatgctagaatgtacggtgtgctgccatggaatgcctttccgggtaaggtgtgtggatccaacctgcttagcatttgtaaaaccgccgagttccagatgacattccacctgttcatcgcagcgttcgtgggcgcagcggccacactggtctctttgctgacctttatgatcgctgctacatataattttgccgtgctgaaacttatgggccgcggcacgaagttctag

SEQ ID NO: 11830 - DNA, 834 bp, Artificial Sequence
  derived and/or modified sequence
atgggcctgctggagtgctgcgcccggtgcctggtgggcgccccctttgccagcctggtagccacggggctgtgcttttttggcgtggccttgttctgcggctgtgggcacgaagctctgaccggaacagaaaagctcatcgagacttacttctcgaaaaattaccaggactatgagtaccttatcaacgtgattcatgccttccaatatgtgatctacggcaccgcttctttctttttcctgtacggcgccctgttactcgcagaaggtttttacacaactggagcagtgaggcagatcttcggggactacaaaactacaatctgtggaaaggggctgtccgccacagtcacaggtggccagaagggcaggggatcacggggacagcatcaagcacactcattggaacgtgtgtgccattgcctggggaagtggctgggccatcctgataaattcgtaggcattacttatgccctcaccgtagtttggcttctcgtattcgcatgttccgccgtgcctgtgtacatatactttaatacttggactacgtgccagtccatcgctttcccaagcaagacgtctgcttcaatcgggtccttatgtgccgacgcccgaatgtatggagtcctcccctggaacgcattccctggcaaagtgtgtggcagcaacctcctgtccatttgcaaaacagcagagttccagatgacttttcacctcttcatcgctgcatttgtcggggctgccgctactctggtaagtttattgacttttatgattgctgcaacctacaattttgccgtgctgaagctgatgggtagagggactaaattctag

SEQ ID NO: 11831 - DNA, 384 bp, Artificial Sequence
  derived and/or modified sequence
atgggcctgctggagtgctgcgcccggtgcctggtgggcgcccccttcgctagcctcgttgcaaccgggctgtgcttctttggtgtggcactgttttgcggctgtggtcatgaggccctgactgggactgagaaactcatcgagacttatttctctaagaactaccaagattatgaatacctcatcaacgtgattcatgcgtttcagtatgtcatttacggcacagcatcttttttcttcctgtacggggcgcttctcctggccgagggtttttacacgacaggtgccgttagacagattttcggtgattataagacaaccatctgcggcaagggactatccgccaccgtgaccggaggccagaaaggtcggggatctcgctag

SEQ ID NO: 11832 - DNA, 768 bp, Artificial Sequence
  derived and/or modified sequence
atgggcctgctggagtgctgcgcccggtgcctggtgggcgcccccttcgctagcctcgtggccacaggcttgtgcttttttggggtcgcactgttctgtgggtgcggccatgaagctcttaccggtaccgaaaagctgatagaaacctattttagcaagaattaccaggattacgagtatctaattaatgtgatccacgcctttcagtacgtgatatatggcacagcaagctttttttttctgtatggcgctctcctgttggccgagggcttctatacaaccggcgcagtcagacagaagggccgcggctcaagggggcaacaccaagcccactctctcgaacgcgtatgccactgcctcgggaagtggctgggccaccccgacaagttcgtagggatcacatatgctctgaccgtggtctggctcctggtttttgcatgcagcgcagttccagtgtacatctacttcaatacatggacaacctgccaaagcatcgcctttccatctaagactagcgcttccattgggtccctgtgtgctgacgcccgcatgtatggcgtgctgccctggaacgcgttcccaggcaaggtctgtggttctaacctgctctccatctgtaaaacagctgagttccagatgacctttcatctctttattgccgccttcgttggagcagcagcaacactggtgagcctgctgactttcatgatcgccgctacgtacaatttcgccgtgctgaaactgatgggccgcggaacgaaattttag

SEQ ID NO: 11833 - DNA, 414 bp, Artificial Sequence
  derived and/or modified sequence
atgggcctgctggagtgctgcgcccggtgcctggtgggcgcccccttcgcaagtttggtggccacaggtctatgcttctttggggtggcgctgttctgcggttgcggacacgaggccctgaccggcacagagaaattaattgagacctacttttccaaaaattatcaggactacgagtatctgattaatgtgattcacgcttttcaatatgtgatttacggcactgcttcgtttttctttttatatggcgccctgttactggccgaaggcttctacaccacgggtgcagtgcgccagattttcggcgattataagactaccatctgtggcaaagggcttagcgccaccgtcacagggggacagaaagggcgaggctcccggggccagcatcaggcccactccttagaaaggtag

SEQ ID NO: 11834 - DNA, 372 bp, Artificial Sequence
  derived and/or modified sequence
atgggcctgctggagtgctgcgcccggtgcctggtgggcgcccccttcgccagcctggtggcaaccggattatgcttcttcggcgtggcgttgttctgcggatgcggccatgaggccctgacaggaacagagaaattgatagaaacatatttcagcaaaaattatcaagattatgaatatttgattaatgtaattcacgccttccagtacgtgatctatggaacagcatctttttttttcttatacggcgcccttctcctcgcggagggtttctacactactggagcagtgcgtcaaatcttcggagactacaaaactactatatgcggcaaaggactctctgctaccgtgacaggagggcagaaggggtag

SEQ ID NO: 11835 - DNA, 411 bp, Artificial Sequence
  derived and/or modified sequence
atgggcctgctggagtgctgcgcccggtgcctggtgggcgccccctttgcgtcgctggtggctacaggtctgtgttttttcggtgtagcgctgttctgtggatgtgggcatgaagccctgaccggcacagaaaagctcattgaaacctacttctctaaaaactaccaagattatgagtatttgattaacgtcattcatgcatttcagtacgtcatctatgggacagccagtttcttttttctgtacggggccctgctattggctgaaggcttctacaccacgggggccgttcggcagattttcggggattataaaaccacgatttgtgggaagggactcagcgccacagtgaccggagggcagaaaggtagaggctcccgcggccaacaccaggctcattctctggagtag

SEQ ID NO: 11836 - DNA, 834 bp, Artificial Sequence
  derived and/or modified sequence
atgggcctgctcgagtgctgtgctaggtgtctggtgggcgcaccatttgcttccctggtggcaacaggattgtgtttctttggtgtggctctgttttgcggctgtggacacgaggccctgacaggcacagagaagttaatcgagacatatttctcaaagaactatcaggactacgagtaccttattaacgtgatccatgctttccagtatgttatttacggcaccgcgagttttttcttcttgtacggcgcactgttgttagcagagggcttttacactactggcgcagtgaggcagatattcggggactacaagactacaatctgcgggaaaggactcagcgccacagtaactgggggtcaaaaaggcaggggctctagaggtcagcatcaagcccacagtctggagagagtgtgtcattgtctgggcaaatggttgggccacccagacaaattcgtcggaattacatatgcccttaccgtggtatggttgctggtgtttgcctgttccgccgtacctgtctacatctactttaacacctggacaacatgtcagtcgatcgcctttccatcaaagaccagcgcaagtattggttctctgtgcgccgatgcccgaatgtatggtgtgttgccttggaatgctttcccaggcaaagtgtgtggtagcaatctcctttccatttgcaaaacagccgagtttcagatgactttccacctctttattgcggcatttgtcggcgcagccgctaccctcgtcagtctgctgacttttatgatagccgctacatacaactttgccgttctcaaattaatggggaggggcacgaagttctag

SEQ ID NO: 11837 - DNA, 834 bp, Artificial Sequence
  derived and/or modified sequence
atgggcctcctggagtgctgcgccagatgtcttgtgggggctccattcgcaagcctggtggcaacaggcctttgtttttttggagtagccttgttttgcgggtgtggccacgaagctttaacagggacggagaaattgatagagacttatttctccaagaactaccaagattacgagtatctgataaacgtgatacatgctttccagtacgtcatttatggaacagcgagcttttttttcttatatggtgcactcctgttggccgagggtttctacacaaccggcgcagttcgacagatcttcggggactacaaaactaccatctgcggcaagggactcagcgctaccgtgactggcggacaaaagggaaggggtagtcgagggcaacaccaggcacatagcctggagcgtgtctgccattgcttgggcaaatggctgggccatcccgacaagtttgtgggaattacgtatgcattgacagttgtttggttgttggtgttcgcatgctctgccgtacccgtatatatttactttaacacgtggacgacttgccagagtattgcattcccctccaagacatcagcaagcattgggtccctctgtgccgatgctcgcatgtacggggtgctaccatggaacgcctttccaggaaaagtctgtggctccaatctgctgtcgatctgcaagaccgcggagttccaaatgactttccatcttttcatcgcggctttcgtgggcgcagccgctacactagtcagtctgcttaccttcatgatcgctgctacttacaatttcgcagtcttgaaactaatggggagagggactaagttctag

SEQ ID NO: 11838 - DNA, 384 bp, Artificial Sequence
  derived and/or modified sequence
atgggcctgctcgaatgctgtgctagatgcctggttggtgcaccgttcgcttctcttgtggcaaccggcctgtgcttctttggcgttgccttgttctgcggatgcggtcatgaagcactgacaggcactgagaaactaatcgaaacgtatttctctaagaattaccaggactatgagtacctgattaacgttatacacgcctttcagtacgtaatctatgggacagctagctttttctttctgtatggtgccctgcttcttgctgagggattttatactactggagccgttaggcaaatctttggggactacaaaaccacgatttgtggcaagggcctgagcgccacggtgaccggcggacagaagggtagaggctctcgctag

SEQ ID NO: 11839 - DNA, 768 bp, Artificial Sequence
  derived and/or modified sequence
atgggacttctggaatgctgtgcccgttgtcttgtcggcgctcccttcgcctcccttgtggccacgggtctgtgcttttttggtgttgccctgttctgcggctgtgggcacgaggctctgacaggtacggaaaagctgatcgagacatatttctcaaaaaactatcaagactatgagtacctaattaacgtcatccacgcgtttcagtatgtgatctatggaacggcatcattcttctttctgtatggagcattgctccttgctgagggcttttatacaacaggcgcagtacgccagaagggcaggggatccagaggtcagcaccaggcgcacagtctagaacgcgtctgccactgcttaggcaaatggttaggccacccggataagttcgtcggcataacgtatgccctgactgtggtttggctcctcgtcttcgcatgctctgccgtgccagtgtacatctatttcaacacctggaccacttgccaatcaattgcttttccaagtaagacttccgcttccatcggatccttatgtgcggatgcccgaatgtatggggttctgccctggaatgcatttccgggtaaagtctgcgggagcaacctgctgtctatttgcaagacggctgagtttcagatgacattccacctatttattgccgctttcgtgggcgcagccgcaaccctggtgtccctcttgacgtttatgattgccgctacctataatttcgctgtcctaaagctgatggggcgtggaacaaagttttag

SEQ ID NO: 11840 - DNA, 414 bp, Artificial Sequence
  derived and/or modified sequence
atgggcttgctagaatgctgcgctcggtgtttggtgggcgcaccttttgcaagccttgttgccaccggactctgtttcttcggtgttgccttgttttgtgggtgcgggcatgaggccctgaccggcaccgagaagctgatcgagacctactttagcaagaattatcaggattacgagtatctaataaacgtgatccacgcctttcagtatgtcatttacgggaccgcatcattcttctttctgtacggagccttgctgctagctgagggattctacaccaccggcgcagtcaggcagatatttggtgactacaagacaacaatttgtggtaagggactgtctgctacagtgacagggggacagaaaggacgagggtccaggggacaacatcaggcgcactcattggagcggtag

SEQ ID NO: 11841 - DNA, 372 bp, Artificial Sequence
  derived and/or modified sequence
atgggtcttctggagtgctgtgcgagatgtctcgtaggggcaccgtttgcctctctggtagcaaccgggctgtgtttttttggggtggccctcttctgcggttgcggccatgaagccctcactggtacagagaagttaattgagacttacttttctaaaaactatcaggactatgaatacctcatcaatgtgatacacgcctttcaatacgtgatttatgggaccgcaagtttctttttcctctatggtgcactcctgctcgccgagggattttacacgaccggagccgtgcgccagatctttggggactataagaccaccatttgcggcaaagggttgagtgccacggtgaccgggggtcagaaaggatag

SEQ ID NO: 11842 - DNA, 411 bp, Artificial Sequence
  derived and/or modified sequence
atgggtctcctggagtgttgtgccaggtgcctggtgggagccccatttgctagcttagtagccactggcttgtgttttttcggcgtggctctcttctgcgggtgcggccacgaggcactcacaggcaccgagaaacttattgagacctatttttccaagaattaccaggattacgagtacctgataaacgtcatccacgccttccaatatgtcatctatgggacggcatccttctttttcttgtacggagccctactgctcgcggagggcttctacactacgggggcagttcgtcagatttttggcgattataagacgaccatctgcgggaaaggactgtccgcaaccgtgactggcggacaaaagggaaggggctccagggggcagcaccaggcacacagcctggagtag

SEQ ID NO: 11843 - DNA, 3002 bp, Artificial Sequence
  derived and/or modified sequence
caggagaagaggacaaagatactcagagagaaaaagtaaaagaccgaagaaggaggctggagagaccaggatccttccagctgaacaaagtcagccacaaagcagactagccagccggctacaattggagtcagagtcccaaagacatgggcttgttagagtgctgtgcaagatgtctggtaggggccccctttgcttccctggtggccactggattgtgtttctttggggtggcactgttctgtggctgtggacatgaagccctcactggcacagaaaagctaattgagacctatttctccaaaaactaccaagactatgagtatctcatcaatgtgatccatgccttccagtatgtcatctatggaactgcctctttcttcttcctttatggggccctcctgctggctgagggcttctacaccaccggcgcagtcaggcagatctttggcgactacaagaccaccatctgcggcaagggcctgagcgcaacggtaacagggggccagaaggggaggggttccagaggccaacatcaagctcattctttggagcgggtgtgtcattgtttgggaaaatggctaggacatcccgacaagtttgtgggcatcacctatgccctgaccgttgtgtggctcctggtgtttgcctgctctgctgtgcctgtgtacatttacttcaacacctggaccacctgccagtctattgccttccccagcaagacctctgccagtataggcagtctctgtgctgatgccagaatgtatggtgttctcccatggaatgctttccctggcaaggtttgtggctccaaccttctgtccatctgcaaaacagctgagttccaaatgaccttccacctgtttattgctgcatttgtgggggctgcagctacactggtttccctgctcaccttcatgattgctgccacttacaactttgccgtccttaaactcatgggccgaggcaccaagttctgatcccccgtagaaatccccctttctctaatagcgaggctctaaccacacagcctacaatgctgcgtctcccatcttaactctttgcctttgccaccaactggccctcttcttacttgatgagtgtaacaagaaaggagagtcttgcagtgattaaggtctctctttggactctcccctcttatgtacctcttttagtcattttgcttcatagctggttcctgctagaaatgggaaatgcctaagaagatgacttcccaactgcaagtcacaaaggaatggaggctctaattgaattttcaagcatctcctgaggatcagaaagtaatttcttctcaaagggtacttccactgatggaaacaaagtggaaggaaagatgctcaggtacagagaaggaatgtctttggtcctcttgccatctataggggccaaatatattctctttggtgtacaaaatggaattcattctggtctctctattaccactgaagatagaagaaaaaagaatgtcagaaaaacaataagagcgtttgcccaaatctgcctattgcagctgggagaagggggtcaaagcaaggatctttcacccacagaaagagagcactgaccccgatggcgatggactactgaagccctaactcagccaaccttacttacagcataagggagcgtagaatctgtgtagacgaagggggcatctggccttacacctcgttagggaagagaaacagggtgttgtcagcatcttctcactcccttctccttgataacagctaccatgacaaccctgtggtttccaaggagctgagaatagaaggaaactagcttacatgagaacagactggcctgaggagcagcagttgctggtggctaatggtgtaacctgagatggccctctggtagacacaggatagataactctttggatagcatgtctttttttctgttaattagttgtgtactctggcctctgtcatatcttcacaatggtgctcatttcatgggggtattatccattcagtcatcgtaggtgatttgaaggtcttgatttgttttagaatgatgcacatttcatgtattccagtttgtttattacttatttggggttgcatcagaaatgtctggagaataattctttgattatgactgttttttaaactaggaaaattggacattaagcatcacaaatgatattaaaaattggctagttgaatctattgggattttctacaagtattctgcctttgcagaaacagatttggtgaatttgaatctcaatttgagtaatctgatcgttctttctagctaatggaaaatgattttacttagcaatgttatcttggtgtgttaagagttaggtttaacataaaggttattttctcctgatatagatcacataacagaatgcaccagtcatcagctattcagttggtaagcttccaggaaaaaggacaggcagaaagagtttgagacctgaatagctcccagatttcagtcttttcctgtttttgttaactttgggttaaaaaaaaaaaaagtctgattggttttaattgaaggaaagatttgtactacagttcttttgttgtaaagagttgtgttgttcttttcccccaaagtggtttcagcaatatttaaggagatgtaagagctttacaaaaagacacttgatacttgttttcaaaccagtatacaagataagcttccaggctgcatagaaggaggagagggaaaatgttttgtaagaaaccaatcaagataaaggacagtgaagtaatccgtaccttgtgttttgttttgatttaataacataacaaataaccaacccttccctgaaaacctcacatgcatacatacacatatatacacacacaaagagagttaatcaactgaaagtgtttccttcatttctgatatagaattgcaattttaacacacataaaggataaacttttagaaacttatcttacaaagtgtattttataaaattaaagaaaataaaattaagaatgttctcaatcaaa

SEQ ID NO: 11844 - DNA, 3133 bp, Artificial Sequence
  derived and/or modified sequence
atggcttctcacgcttgtgctgcatatcccacaccaattagacccaaggatcagttggaagtttccaggacatcttcattttatttccaccctcaatccacatttccagatgtctctgcagcaaagcgaaattccaggagaagaggacaaagatactcagagagaaaaagtaaaagaccgaagaaggaggctggagagaccaggatccttccagctgaacaaagtcagccacaaagcagactagccagccggctacaattggagtcagagtcccaaagacatgggcttgttagagtgctgtgcaagatgtctggtaggggccccctttgcttccctggtggccactggattgtgtttctttggggtggcactgttctgtggctgtggacatgaagccctcactggcacagaaaagctaattgagacctatttctccaaaaactaccaagactatgagtatctcatcaatgtgatccatgccttccagtatgtcatctatggaactgcctctttcttcttcctttatggggccctcctgctggctgagggcttctacaccaccggcgcagtcaggcagatctttggcgactacaagaccaccatctgcggcaagggcctgagcgcaacggtaacagggggccagaaggggaggggttccagaggccaacatcaagctcattctttggagcgggtgtgtcattgtttgggaaaatggctaggacatcccgacaagtttgtgggcatcacctatgccctgaccgttgtgtggctcctggtgtttgcctgctctgctgtgcctgtgtacatttacttcaacacctggaccacctgccagtctattgccttccccagcaagacctctgccagtataggcagtctctgtgctgatgccagaatgtatggtgttctcccatggaatgctttccctggcaaggtttgtggctccaaccttctgtccatctgcaaaacagctgagttccaaatgaccttccacctgtttattgctgcatttgtgggggctgcagctacactggtttccctgctcaccttcatgattgctgccacttacaactttgccgtccttaaactcatgggccgaggcaccaagttctgatcccccgtagaaatccccctttctctaatagcgaggctctaaccacacagcctacaatgctgcgtctcccatcttaactctttgcctttgccaccaactggccctcttcttacttgatgagtgtaacaagaaaggagagtcttgcagtgattaaggtctctctttggactctcccctcttatgtacctcttttagtcattttgcttcatagctggttcctgctagaaatgggaaatgcctaagaagatgacttcccaactgcaagtcacaaaggaatggaggctctaattgaattttcaagcatctcctgaggatcagaaagtaatttcttctcaaagggtacttccactgatggaaacaaagtggaaggaaagatgctcaggtacagagaaggaatgtctttggtcctcttgccatctataggggccaaatatattctctttggtgtacaaaatggaattcattctggtctctctattaccactgaagatagaagaaaaaagaatgtcagaaaaacaataagagcgtttgcccaaatctgcctattgcagctgggagaagggggtcaaagcaaggatctttcacccacagaaagagagcactgaccccgatggcgatggactactgaagccctaactcagccaaccttacttacagcataagggagcgtagaatctgtgtagacgaagggggcatctggccttacacctcgttagggaagagaaacagggtgttgtcagcatcttctcactcccttctccttgataacagctaccatgacaaccctgtggtttccaaggagctgagaatagaaggaaactagcttacatgagaacagactggcctgaggagcagcagttgctggtggctaatggtgtaacctgagatggccctctggtagacacaggatagataactctttggatagcatgtctttttttctgttaattagttgtgtactctggcctctgtcatatcttcacaatggtgctcatttcatgggggtattatccattcagtcatcgtaggtgatttgaaggtcttgatttgttttagaatgatgcacatttcatgtattccagtttgtttattacttatttggggttgcatcagaaatgtctggagaataattctttgattatgactgttttttaaactaggaaaattggacattaagcatcacaaatgatattaaaaattggctagttgaatctattgggattttctacaagtattctgcctttgcagaaacagatttggtgaatttgaatctcaatttgagtaatctgatcgttctttctagctaatggaaaatgattttacttagcaatgttatcttggtgtgttaagagttaggtttaacataaaggttattttctcctgatatagatcacataacagaatgcaccagtcatcagctattcagttggtaagcttccaggaaaaaggacaggcagaaagagtttgagacctgaatagctcccagatttcagtcttttcctgtttttgttaactttgggttaaaaaaaaaaaaagtctgattggttttaattgaaggaaagatttgtactacagttcttttgttgtaaagagttgtgttgttcttttcccccaaagtggtttcagcaatatttaaggagatgtaagagctttacaaaaagacacttgatacttgttttcaaaccagtatacaagataagcttccaggctgcatagaaggaggagagggaaaatgttttgtaagaaaccaatcaagataaaggacagtgaagtaatccgtaccttgtgttttgttttgatttaataacataacaaataaccaacccttccctgaaaacctcacatgcatacatacacatatatacacacacaaagagagttaatcaactgaaagtgtttccttcatttctgatatagaattgcaattttaacacacataaaggataaacttttagaaacttatcttacaaagtgtattttataaaattaaagaaaataaaattaagaatgttctcaatc

SEQ ID NO: 11845 - DNA, 588 bp, Artificial Sequence
  derived and/or modified sequence
aaggcaaaatcacaggaaaagttccaggagaccataccttccttctccggagtcttccaacaggagaagaggacaaagatactcagagagaaaaagtaaaagaccgaagaaggaggctggagagaccaggatccttccagctgaacaaagtcagccacaaagcagactagccagccggctacaattggagtcagagtcccaaagacatgggcttgttagagtgctgtgcaagatgtctggtaggggccccctttgcttccctggtggccactggattgtgtttctttggggtggcactgttctgtggctgtggacatgaagccctcactggcacagaaaagctaattgagacctatttctccaaaaactaccaagactatgagtatctcatcaatgtgatccatgccttccagtatgtcatctatggaactgcctctttcttcttcctttatggggccctcctgctggctgagggcttctacaccaccggcgcagtcaggcagatctttggcgactacaagaccaccatctgcggcaagggcctgagcgcaacggtaacagggggccagaaggggaggggttccagag

SEQ ID NO: 11846 - DNA, 1442 bp, Artificial Sequence
  derived and/or modified sequence
agagagaaaaagtaaaagaccgaagaaggaggctggagagaccaggatccttccagctgaacaaagtcagccacaaagcagactagccagccggctacaattggagtcagagtcccaaagacatgggcttgttagagtgctgtgcaagatgtctggtaggggccccctttgcttccctggtggccactggattgtgtttctttggggtggcactgttctgtggctgtggacatgaagccctcactggcacagaaaagctaattgagacctatttctccaaaaactaccaagactatgagtatctcatcaatgtgatccatgccttccagtatgtcatctatggaactgcctctttcttcttcctttatggggccctcctgctggctgagggcttctacaccaccggcgcagtcaggcagaaggggaggggttccagaggccaacatcaagctcattctttggagcgggtgtgtcattgtttgggaaaatggctaggacatcccgacaagtttgtgggcatcacctatgccctgaccgttgtgtggctcctggtgtttgcctgctctgctgtgcctgtgtacatttacttcaacacctggaccacctgccagtctattgccttccccagcaagacctctgccagtataggcagtctctgtgctgatgccagaatgtatggtgttctcccatggaatgctttccctggcaaggtttgtggctccaaccttctgtccatctgcaaaacagctgagttccaaatgaccttccacctgtttattgctgcatttgtgggggctgcagctacactggtttccctgctcaccttcatgattgctgccacttacaactttgccgtccttaaactcatgggccgaggcaccaagttctgatcccccgtagaaatccccctttctctaatagcgaggctctaaccacacagcctacaatgctgcgtctcccatcttaactctttgcctttgccaccaactggccctcttcttacttgatgagtgtaacaagaaaggagagtcttgcagtgattaaggtctctctttggactctcccctcttatgtacctcttttagtcattttgcttcatagctggttcctgctagaaatgggaaatgcctaagaagatgacttcccaactgcaagtcacaaaggaatggaggctctaattgaattttcaagcatctcctgaggatcagaaagtaatttcttctcaaagggtacttccactgatggaaacaaagtggaaggaaagatgctcaggtacagagaaggaatgtctttggtcctcttgccatctataggggccaaatatattctctttggtgtacaaaatggaattcattctggtctctctattaccactgaagatagaagaaaaaagaatgtcagaaaaacaataagagcgtttgcccaaatctgcctattgcagc

SEQ ID NO: 11847 - DNA, 623 bp, Artificial Sequence
  derived and/or modified sequence
gggctctggaggacctggaagataccctatgaggtctgtagggagccctcaggaaaggtctgctgacgaggagaagaggacaaagatactcagagagaaaaagtaaaagaccgaagaaggaggctggagagaccaggatccttccagctgaacaaagtcagccacaaagcagactagccagccggctacaattggagtcagagtcccaaagacatgggcttgttagagtgctgtgcaagatgtctggtaggggccccctttgcttccctggtggccactggattgtgtttctttggggtggcactgttctgtggctgtggacatgaagccctcactggcacagaaaagctaattgagacctatttctccaaaaactaccaagactatgagtatctcatcaatgtgatccatgccttccagtatgtcatctatggaactgcctctttcttcttcctttatggggccctcctgctggctgagggcttctacaccaccggcgcagtcaggcagatctttggcgactacaagaccaccatctgcggcaagggcctgagcgcaacggtaacagggggccagaaggggaggggttccagaggccaacatcaagctcattctttggagcg

SEQ ID NO: 11848 - DNA, 786 bp, Artificial Sequence
  derived and/or modified sequence
agtcttctatgccagggctaggaaagctgccttccaaaatttggtctgggaagacattatcctgggaatgagaagcaaagcctcagctctagaagcccaaataatagcagatgacccaggctttcactggcacccagtacaggcagcaggctgcaccaagaaggctggcagtgcctcttgaggaatcccttggcagtgcaggagcctagctggactcaagaatattttgccaagggcacccagcagaaccaatggaagcagaatcacagaaataggagaagaggacaaagatactcagagagaaaaagtaaaagaccgaagaaggaggctggagagaccaggatccttccagctgaacaaagtcagccacaaagcagactagccagccggctacaattggagtcagagtcccaaagacatgggcttgttagagtgctgtgcaagatgtctggtaggggccccctttgcttccctggtggccactggattgtgtttctttggggtggcactgttctgtggctgtggacatgaagccctcactggcacagaaaagctaattgagacctatttctccaaaaactaccaagactatgagtatctcatcaatgtgatccatgccttccagtatgtcatctatggaactgcctctttcttcttcctttatggggccctcctgctggctgagggcttctacaccaccggcgcagtcaggcagatctttggcgactacaagaccaccatctgcggcaagggcctgagcgcaacggtaacagggggccagaaggg

SEQ ID NO: 11849 - DNA, 580 bp, Artificial Sequence
  derived and/or modified sequence
aatcttgcctttctcccaccccaggaaggagaagaggacaaagatactcagagagaaaaagtaaaagaccgaagaaggaggctggagagaccaggatccttccagctgaacaaagtcagccacaaagcagactagccagccggctacaattggagtcagagtcccaaagacatgggcttgttagagtgctgtgcaagatgtctggtaggggccccctttgcttccctggtggccactggattgtgtttctttggggtggcactgttctgtggctgtggacatgaagccctcactggcacagaaaagctaattgagacctatttctccaaaaactaccaagactatgagtatctcatcaatgtgatccatgccttccagtatgtcatctatggaactgcctctttcttcttcctttatggggccctcctgctggctgagggcttctacaccaccggcgcagtcaggcagatctttggcgactacaagaccaccatctgcggcaagggcctgagcgcaacggtaacagggggccagaaggggaggggttccagaggccaacatcaagctcattctttggagc

SEQ ID NO: 11850 - DNA, 834 bp, Artificial Sequence
  derived and/or modified sequence
atgggcctgctggagtgctgcgccagatgcctggtgggcgcccccttcgccagcctggtggccaccggcctgtgcttcttcggcgtggccctgttctgcggctgcggccacgaggccctgaccggcaccgagaagctgatcgagacctacttcagcaagaactaccaggactacgagtacctgatcaacgtgatccacgccttccagtacgtgatctacggcaccgccagcttcttcttcctgtacggcgccctgctgctggccgagggcttctacaccaccggcgccgtgagacagatcttcggcgactacaagaccaccatctgcggcaagggcctgagcgccaccgtgaccggcggccagaagggcagaggcagcagaggccagcaccaggcccacagcctggagagagtgtgccactgcctgggcaagtggctgggccaccccgacaagttcgtgggcatcacctacgccctgaccgtggtgtggctgctggtgttcgcctgcagcgccgtgcccgtgtacatctacttcaacacctggaccacctgccagagcatcgccttccccagcaagaccagcgccagcatcggcagcctgtgcgccgacgccagaatgtacggcgtgctgccctggaacgccttccccggcaaggtgtgcggcagcaacctgctgagcatctgcaagaccgccgagttccagatgaccttccacctgttcatcgccgccttcgtgggcgccgccgccaccctggtgagcctgctgaccttcatgatcgccgccacctacaacttcgccgtgctgaagctgatgggcagaggcaccaagttctag

SEQ ID NO: 11851 - DNA, 384 bp, Artificial Sequence
  derived and/or modified sequence
atgggcctgctggagtgctgcgccagatgcctggtgggcgcccccttcgccagcctggtggccaccggcctgtgcttcttcggcgtggccctgttctgcggctgcggccacgaggccctgaccggcaccgagaagctgatcgagacctacttcagcaagaactaccaggactacgagtacctgatcaacgtgatccacgccttccagtacgtgatctacggcaccgccagcttcttcttcctgtacggcgccctgctgctggccgagggcttctacaccaccggcgccgtgagacagatcttcggcgactacaagaccaccatctgcggcaagggcctgagcgccaccgtgaccggcggccagaagggcagaggcagcagatag

SEQ ID NO: 11852 - DNA, 768 bp, Artificial Sequence
  derived and/or modified sequence
atgggcctgctggagtgctgcgccagatgcctggtgggcgcccccttcgccagcctggtggccaccggcctgtgcttcttcggcgtggccctgttctgcggctgcggccacgaggccctgaccggcaccgagaagctgatcgagacctacttcagcaagaactaccaggactacgagtacctgatcaacgtgatccacgccttccagtacgtgatctacggcaccgccagcttcttcttcctgtacggcgccctgctgctggccgagggcttctacaccaccggcgccgtgagacagaagggcagaggcagcagaggccagcaccaggcccacagcctggagagagtgtgccactgcctgggcaagtggctgggccaccccgacaagttcgtgggcatcacctacgccctgaccgtggtgtggctgctggtgttcgcctgcagcgccgtgcccgtgtacatctacttcaacacctggaccacctgccagagcatcgccttccccagcaagaccagcgccagcatcggcagcctgtgcgccgacgccagaatgtacggcgtgctgccctggaacgccttccccggcaaggtgtgcggcagcaacctgctgagcatctgcaagaccgccgagttccagatgaccttccacctgttcatcgccgccttcgtgggcgccgccgccaccctggtgagcctgctgaccttcatgatcgccgccacctacaacttcgccgtgctgaagctgatgggcagaggcaccaagttctag

SEQ ID NO: 11853 - DNA, 414 bp, Artificial Sequence
  derived and/or modified sequence
atgggcctgctggagtgctgcgccagatgcctggtgggcgcccccttcgccagcctggtggccaccggcctgtgcttcttcggcgtggccctgttctgcggctgcggccacgaggccctgaccggcaccgagaagctgatcgagacctacttcagcaagaactaccaggactacgagtacctgatcaacgtgatccacgccttccagtacgtgatctacggcaccgccagcttcttcttcctgtacggcgccctgctgctggccgagggcttctacaccaccggcgccgtgagacagatcttcggcgactacaagaccaccatctgcggcaagggcctgagcgccaccgtgaccggcggccagaagggcagaggcagcagaggccagcaccaggcccacagcctggagagatag

SEQ ID NO: 11854 - DNA, 372 bp, Artificial Sequence
  derived and/or modified sequence
atgggcctgctggagtgctgcgccagatgcctggtgggcgcccccttcgccagcctggtggccaccggcctgtgcttcttcggcgtggccctgttctgcggctgcggccacgaggccctgaccggcaccgagaagctgatcgagacctacttcagcaagaactaccaggactacgagtacctgatcaacgtgatccacgccttccagtacgtgatctacggcaccgccagcttcttcttcctgtacggcgccctgctgctggccgagggcttctacaccaccggcgccgtgagacagatcttcggcgactacaagaccaccatctgcggcaagggcctgagcgccaccgtgaccggcggccagaagggctag

SEQ ID NO: 11855 - DNA, 411 bp, Artificial Sequence
  derived and/or modified sequence
atgggcctgctggagtgctgcgccagatgcctggtgggcgcccccttcgccagcctggtggccaccggcctgtgcttcttcggcgtggccctgttctgcggctgcggccacgaggccctgaccggcaccgagaagctgatcgagacctacttcagcaagaactaccaggactacgagtacctgatcaacgtgatccacgccttccagtacgtgatctacggcaccgccagcttcttcttcctgtacggcgccctgctgctggccgagggcttctacaccaccggcgccgtgagacagatcttcggcgactacaagaccaccatctgcggcaagggcctgagcgccaccgtgaccggcggccagaagggcagaggcagcagaggccagcaccaggcccacagcctggagtag

SEQ ID NO: 11856 - protein, 569 aa, Artificial Sequence
  derived and/or modified sequence
MSFGILKPDLRIVFVHNKAVIWQKSRVSDHKMALMSVLGTAVMNNMESFQYHSEESQIYLSGFLPKCDADHSFTSLSTPERSFIFINSRPVHQKDILKLIRHHYNLKCLKESTRLYPVFFLKIDVPTADVDVNLTPDKSQVLLQNKESVLIALENLMTTCYGPLPSTNSYENNKTDVSAADIVLSKTAETDVLFNKVESSGKNYSNVDTSVIPFQNDMHNDESGKNTDDCLNHQISIGDFGYGHCSSEISNIDKNTKNAFQDISMSNVSWENSQTEYSKTCFISSVKHTQSENGNKDHIDESGENEEEAGLENSSEISADEWSRGNILKNSVGENIEPVKILVPEKSLPCKVSNNNYPIPEQMNLNEDSCNKKSNVIDNKSGKVTAYDLLSNRVIKKPMSASALFVQDHRPQFLIENPKTSLEDATLQIEELWKTLSEEEKLKYEEKATKDLERYNSQMKRAIEQESQMSLKDGRKKIKPTSAWNLAQKHKLKTSLSNQPKLDELLQSQIEKRRSQNIKMVQIPFSMKNLKINFKKQNKVDLEEKDEPCLIHNLRFPDAWLMTSKTESF

SEQ ID NO: 11857 - protein, 73 aa, Artificial Sequence
  derived and/or modified sequence
MKQLPAATVRLLSSSQIITSVVSVVKELIENSLDAGATSVDVKLENYGFDKIEVRDNGEGIKAVDAPVMAMKY

SEQ ID NO: 11858 - protein, 932 aa, Artificial Sequence
  derived and/or modified sequence
MKQLPAATVRLLSSSQIITSVVSVVKELIENSLDAGATSVDVKLENYGFDKIEVRDNGEGIKAVDAPVMAMKYYTSKINSHEDLENLTTYGFRGEALGSICCIAEVLITTRTAADNFSTQYVLDGSGHILSQKPSHLGQGTTVTALRLFKNLPVRKQFYSTAKKCKDEIKKIQDLLMSFGILKPDLRIVFVHNKAVIWQKSRVSDHKMALMSVLGTAVMNNMESFQYHSEESQIYLSGFLPKCDADHSFTSLSTPERSFIFINSRPVHQKDILKLIRHHYNLKCLKESTRLYPVFFLKIDVPTADVDVNLTPDKSQVLLQNKESVLIALENLMTTCYGPLPSTNSYENNKTDVSAADIVLSKTAETDVLFNKVESSGKNYSNVDTSVIPFQNDMHNDESGKNTDDCLNHQISIGDFGYGHCSSEISNIDKNTKNAFQDISMSNVSWENSQTEYSKTCFISSVKHTQSENGNKDHIDESGENEEEAGLENSSEISADEWSRGNILKNSVGENIEPVKILVPEKSLPCKVSNNNYPIPEQMNLNEDSCNKKSNVIDNKSGKVTAYDLLSNRVIKKPMSASALFVQDHRPQFLIENPKTSLEDATLQIEELWKTLSEEEKLKYEEKATKDLERYNSQMKRAIEQESQMSLKDGRKKIKPTSAWNLAQKHKLKTSLSNQPKLDELLQSQIEKRRSQNIKMVQIPFSMKNLKINFKKQNKVDLEEKDEPCLIHNLRFPDAWLMTSKTEVMLLNPYRVEEALLFKRLLENHKLPAEPLEKPIMLTESLFNGSHYLDVLYKMTADDQRYSGSTYLSDPRLTANGFKIKLIPGVSITENYLEIEGMANCLPFYGVADLKEILNAILNRNAKEVYECRPRKVISYLEGEAVRLSRQLPMYLSKEDIQDIIYRMKHQFGNEIKECVHGRPFFHHLTYLPETT

SEQ ID NO: 11859 - DNA, 2799 bp, Artificial Sequence
  derived and/or modified sequence
atgaagcagctgcccgccgccaccgtgagactgctgagcagcagccagatcatcaccagcgtggtgagcgtggtgaaggagctgatcgagaacagcctggacgccggcgccaccagcgtggacgtgaagctggagaactacggcttcgacaagatcgaggtgagagacaacggcgagggcatcaaggccgtggacgcccccgtgatggccatgaagtactacaccagcaagatcaacagccacgaggacctggagaacctgaccacctacggcttcagaggcgaggccctgggcagcatctgctgcatcgccgaggtgctgatcaccaccagaaccgccgccgacaacttcagcacccagtacgtgctggacggcagcggccacatcctgagccagaagcccagccacctgggccagggcaccaccgtgaccgccctgagactgttcaagaacctgcccgtgagaaagcagttctacagcaccgccaagaagtgcaaggacgagatcaagaagatccaggacctgctgatgagcttcggcatcctgaagcccgacctgagaatcgtgttcgtgcacaacaaggccgtgatctggcagaagagcagagtgagcgaccacaagatggccctgatgagcgtgctgggcaccgccgtgatgaacaacatggagagcttccagtaccacagcgaggagagccagatctacctgagcggcttcctgcccaagtgcgacgccgaccacagcttcaccagcctgagcacccccgagagaagcttcatcttcatcaacagcagacccgtgcaccagaaggacatcctgaagctgatcagacaccactacaacctgaagtgcctgaaggagagcaccagactgtaccccgtgttcttcctgaagatcgacgtgcccaccgccgacgtggacgtgaacctgacccccgacaagagccaggtgctgctgcagaacaaggagagcgtgctgatcgccctggagaacctgatgaccacctgctacggccccctgcccagcaccaacagctacgagaacaacaagaccgacgtgagcgccgccgacatcgtgctgagcaagaccgccgagaccgacgtgctgttcaacaaggtggagagcagcggcaagaactacagcaacgtggacaccagcgtgatccccttccagaacgacatgcacaacgacgagagcggcaagaacaccgacgactgcctgaaccaccagatcagcatcggcgacttcggctacggccactgcagcagcgagatcagcaacatcgacaagaacaccaagaacgccttccaggacatcagcatgagcaacgtgagctgggagaacagccagaccgagtacagcaagacctgcttcatcagcagcgtgaagcacacccagagcgagaacggcaacaaggaccacatcgacgagagcggcgagaacgaggaggaggccggcctggagaacagcagcgagatcagcgccgacgagtggagcagaggcaacatcctgaagaacagcgtgggcgagaacatcgagcccgtgaagatcctggtgcccgagaagagcctgccctgcaaggtgagcaacaacaactaccccatccccgagcagatgaacctgaacgaggacagctgcaacaagaagagcaacgtgatcgacaacaagagcggcaaggtgaccgcctacgacctgctgagcaacagagtgatcaagaagcccatgagcgccagcgccctgttcgtgcaggaccacagaccccagttcctgatcgagaaccccaagaccagcctggaggacgccaccctgcagatcgaggagctgtggaagaccctgagcgaggaggagaagctgaagtacgaggagaaggccaccaaggacctggagagatacaacagccagatgaagagagccatcgagcaggagagccagatgagcctgaaggacggcagaaagaagatcaagcccaccagcgcctggaacctggcccagaagcacaagctgaagaccagcctgagcaaccagcccaagctggacgagctgctgcagagccagatcgagaagagaagaagccagaacatcaagatggtgcagatccccttcagcatgaagaacctgaagatcaacttcaagaagcagaacaaggtggacctggaggagaaggacgagccctgcctgatccacaacctgagattccccgacgcctggctgatgaccagcaagaccgaggtgatgctgctgaacccctacagagtggaggaggccctgctgttcaagagactgctggagaaccacaagctgcccgccgagcccctggagaagcccatcatgctgaccgagagcctgttcaacggcagccactacctggacgtgctgtacaagatgaccgccgacgaccagagatacagcggcagcacctacctgagcgaccccagactgaccgccaacggcttcaagatcaagctgatccccggcgtgagcatcaccgagaactacctggagatcgagggcatggccaactgcctgcccttctacggcgtggccgacctgaaggagatcctgaacgccatcctgaacagaaacgccaaggaggtgtacgagtgcagacccagaaaggtgatcagctacctggagggcgaggccgtgagactgagcagacagctgcccatgtacctgagcaaggaggacatccaggacatcatctacagaatgaagcaccagttcggcaacgagatcaaggagtgcgtgcacggcagacccttcttccaccacctgacctacctgcccgagaccacctag

SEQ ID NO: 11860 - DNA, 135 bp, Artificial Sequence
  derived and/or modified sequence
atgaagcagctgcccgccgccaccgtgagactgctgagcagcagccagatcatcaccagcgtggtgagcgtggtgaaggagctgatcgagaacagcctggacgccggcgccaccagcgtggacgtgaagctgtag

SEQ ID NO: 11861 - DNA, 2799 bp, Artificial Sequence
  derived and/or modified sequence
atgaagcagctcccagccgcaaccgttaggcttctttcttcatcccaaatcatcaccagcgttgtttctgtggtcaaggagctcatagaaaatagcctggatgccggagcgacttctgttgatgtgaaattagaaaactacggatttgataagattgaggtgcgggataatggtgaaggcattaaggccgtggatgcacccgtgatggctatgaaatattatacttccaaaatcaatagtcacgaggacttagaaaacttaacaacttacgggtttaggggggaagccctcggttctatttgctgtatcgctgaggtgctcataactacaaggacagccgcagataatttctccacacaatacgtcctggacggatctggccatatcttatctcaaaaaccatcccacctcggacaagggacgaccgtgactgctctgagactgtttaaaaatcttcccgttcgcaagcagttctactcaactgctaaaaaatgtaaggatgagatcaagaagatccaggatttgctaatgtcttttgggatccttaaacctgacttgaggatcgtcttcgtgcacaacaaagcagttatctggcaaaagagccgggtgtcagaccataagatggcgctgatgtcggtgctggggacagccgtgatgaataacatggaaagttttcagtaccatagcgaggagtcacaaatatacctctcaggtttccttcctaagtgcgatgccgatcatagtttcaccagcctgagcacccccgagaggagctttatcttcataaactccaggcccgtccaccagaaagacatcctaaaactgattagacaccattacaacctgaaatgtttgaaggaaagtacacgtctgtatccagtgttctttttgaaaatcgacgtccccactgccgacgtcgatgtcaatctaaccccagacaagtcccaggttctgctgcagaataaggaatctgtgctgattgccctcgagaatctgatgaccacttgttatggcccactcccctccaccaactcttatgaaaacaataaaaccgacgtctcagctgccgacatcgtcctcagcaaaaccgcagaaacagacgtcttattcaataaggtcgagagttcagggaagaactattctaatgttgacacctccgtcatcccattccagaacgacatgcacaatgatgagtcggggaagaacaccgatgattgccttaaccaccagatctccatcggagacttcggctatggacactgttcaagcgaaatctcaaatatcgacaaaaacacaaagaatgcttttcaggatatctccatgagtaatgtcagctgggagaactcacagaccgaatattcgaaaacgtgtttcattagtagtgtcaaacacacgcagtctgagaatggtaataaggatcatatcgacgagtctggggagaacgaagaagaagcagggcttgagaatagctcagagattagtgcagacgagtggtccagggggaacattttaaaaaattctgtgggggaaaacatcgagccagtaaagatccttgtcccggaaaaaagtctgccatgcaaggtgtcaaacaataactacccgatccctgaacaaatgaatctgaatgaagatagttgcaacaaaaaaagcaacgtgattgacaataaaagtggaaaagttaccgcgtacgatctgctgtctaaccgtgtgattaagaagcctatgtccgcaagtgcactgtttgtccaggaccatagaccgcagttcctgatagaaaacccaaaaacctcactcgaagacgccaccctccagatcgaggagctgtggaagacactttcagaggaggaaaagctgaagtacgaagagaaggctacgaaagatctggaacgctataattcacaaatgaaaagggctatcgagcaggagtcacaaatgtcactgaaggatggaagaaagaagattaaacccacctcagcctggaacctggctcaaaagcataaactgaagacgtccttgagcaaccagcctaagctggatgaattgctgcagagccagatcgagaagcgtagaagccagaatatcaaaatggtgcaaatacctttcagtatgaagaatctcaagattaactttaagaagcagaataaagtcgacctggaggagaaagacgagccttgcctgatacataatctccgattccccgacgcctggctgatgacaagcaagactgaggtgatgctactgaacccgtacagagttgaagaggcacttctcttcaagcgactgttggagaaccacaagctgcctgctgagcctttggagaagcccataatgctcactgaaagtctttttaatggaagtcactacctggatgttctctataagatgacagctgacgatcaacgatacagcggctcaacctacttaagcgatcctaggcttacagccaacggctttaagatcaagcttatacccggcgtgtcaatcactgaaaactacttggaaattgagggcatggctaactgcctgcccttctatggggtagccgaccttaaggagatcctaaatgcaatattgaacaggaatgcaaaagaggtctacgagtgccgtccccgcaaagtgatttcgtacttggagggagaggccgtgcgccttagcaggcagctcccgatgtacctatctaaggaggatattcaggatataatttatcggatgaaacatcagtttggcaacgaaataaaagaatgtgtgcacgggagaccattctttcaccacctgacctacttgcctgaaaccacatag

SEQ ID NO: 11862 - DNA, 135 bp, Artificial Sequence
  derived and/or modified sequence
atgaaacagctgcccgccgctaccgtcagactgctttctagtagtcagattataacgtcagttgtaagcgtcgtaaaggaactcatcgagaactccctggatgccggggccactagcgttgatgtgaagctgtag

SEQ ID NO: 11863 - DNA, 2799 bp, Artificial Sequence
  derived and/or modified sequence
atgaagcagctgcctgctgccaccgtgcggctgctgagcagcagccagatcatcacctctgtggtgtctgtggtgaaggagctgattgagaacagcctggatgctggggccacctctgtggatgtgaagctggagaactacggctttgacaagattgaggtgcgggacaatggagagggcatcaaggctgtggatgcccctgtgatggccatgaagtactacaccagcaagatcaacagccatgaggacctggagaacctgaccacctacggcttccggggggaggccctgggcagcatctgctgcatcgccgaggtgctgatcaccaccaggacagctgctgacaacttcagcacccagtatgtgctggatggcagcggccacatcctgagccagaagcccagccacctgggccagggcaccaccgtgacagccctgcggctcttcaagaacctgcctgtgaggaagcagttctacagcacagccaagaagtgcaaggatgagatcaagaagatccaggacctgctgatgagctttggcatcctgaagccagacctgcgcatcgtgtttgtgcacaacaaggctgtgatctggcagaagagccgggtgtctgaccacaagatggccctgatgtctgtgctgggcacagctgtgatgaacaacatggagagcttccagtaccacagcgaggagagccagatctacctgagcggcttcctgcccaagtgtgatgctgaccacagcttcaccagcctgagcaccccagagaggagcttcatcttcatcaacagcaggcctgtgcaccagaaggacatcctgaagctgatccgccaccactacaacctgaagtgcctgaaggagagcacccggctgtaccctgtgttcttcctgaagattgatgtgcccacagcagatgtggatgtgaacctgaccccagacaagagccaggtgctgctgcagaacaaggagagcgtgctgattgccctggagaacctgatgaccacctgctacggccccctgcccagcaccaacagctatgagaacaacaagacagatgtgtctgctgctgacatcgtgctgagcaagacagctgagacagatgtgctcttcaacaaggtggagagcagcggcaagaactacagcaatgtggacaccagcgtcatccccttccagaatgacatgcacaatgatgaaagtggcaagaacacagatgactgcctgaaccaccagatcagcattggagactttggctacggccactgcagcagcgagatcagcaacatcgacaagaacaccaagaatgccttccaggacatctccatgagcaatgtgtcctgggagaacagccagacagagtacagcaagacctgcttcatcagctctgtgaagcacacccagagtgaaaatggaaacaaggaccacattgatgagagcggggagaatgaggaggaggccggcctggagaacagcagcgagatctctgcagatgagtggagccggggcaacatcctgaagaacagcgtgggggagaacatcgagcctgtgaagatcctggtgcctgagaagagcctgccctgcaaggtgagcaacaacaactaccccatccctgagcagatgaacctgaatgaagacagctgcaacaagaagagcaatgtgattgacaacaagagcggcaaggtgacagcctatgacctgctgagcaacagagtcatcaagaagcccatgtctgccagcgccctgtttgtgcaggaccaccggccccagttcctgattgagaaccccaagaccagcctggaggatgccaccctgcagatcgaggagctgtggaagaccctgtctgaggaggagaagctgaagtatgaggagaaggccaccaaggacctggagcgctacaacagccagatgaagagggccatcgagcaggagagccagatgagcctgaaggatggcaggaagaagatcaagcccaccagcgcctggaacctggcccagaagcacaagctgaagaccagcctgagcaaccagcccaagctggatgagctgctgcagagccagatcgagaagagaagaagccagaacatcaagatggtgcagatccccttctccatgaagaacctgaagatcaacttcaagaagcagaacaaggtggacctggaggagaaggatgagccctgcctgatccacaacctgcgcttcccagatgcctggctgatgaccagcaagacagaggtgatgctgctgaacccctacagagtggaggaggccctgctcttcaagaggctgctggagaaccacaagctgcctgctgagcccctggagaagcccatcatgctgacagagagcctcttcaacggcagccactacctggatgtgctgtacaagatgacagcagatgaccagcgctacagcggcagcacctacctgagtgacccccggctgacagccaacggcttcaagatcaagctgatccctggggtgtccatcacagagaactacctggagattgagggcatggccaactgcctgcccttctatggagtggccgacctgaaggagatcctgaatgccatcctgaacagaaatgccaaggaggtgtatgaatgtcggcccaggaaggtgatctcctacctggagggggaggccgtgcggctgagccggcagctgcccatgtacctgagcaaagaagacatccaggacatcatctacaggatgaagcaccagtttggaaatgagatcaaggaatgtgtgcacggccggcccttcttccaccacctgacctacctgcctgagaccacctag

SEQ ID NO: 11864 - DNA, 135 bp, Artificial Sequence
  derived and/or modified sequence
atgaagcagctgcctgctgccaccgtgcggctgctgagcagcagccagatcatcacctctgtggtgtctgtggtgaaggagctgattgagaacagcctggatgctggggccacctctgtggatgtgaagctgtag

SEQ ID NO: 11865 - DNA, 2799 bp, Artificial Sequence
  derived and/or modified sequence
atgaagcagctgcccgccgccaccgtgcggctgctgagcagcagccaaattataacatcagttgtttcagttgttaaggagctgatagagaatagtctcgacgctggtgcgaccagtgttgatgtaaaactcgagaactacggctttgacaaaattgaagtacgggataatggcgaaggcatcaaagctgtcgatgcgcccgttatggcaatgaagtattatacttccaagatcaactcccatgaagatctggaaaatctcacgacctacggttttcggggcgaggccctgggctccatctgttgtattgcagaggtgctcatcactacaagaacagctgcagataatttttcaactcaatacgtccttgatggatccggccatatcctgtcccaaaagccatcgcacttagggcaaggtaccactgtgaccgccctgcgactctttaagaatttgcctgtgagaaaacaattctactctacggctaagaagtgcaaggacgaaattaagaagatccaggacttgttaatgagcttcggcatcctgaagccggacctgcgcatagtgtttgtgcacaataaagccgtgatctggcagaagagccgcgtcagtgaccataagatggccctcatgtccgttctggggacggccgtaatgaataatatggaaagtttccagtaccattcggaggagtctcagatctatctgtcagggttccttccaaaatgcgacgccgaccatagttttaccagcctgagcacaccagagagaagtttcatcttcattaattcccgtccggtacaccaaaaggacatcttgaagctgattaggcatcattataatctcaaatgccttaaggagagcacccggctgtatcctgtctttttcttaaagattgatgtccccacggctgatgttgatgtcaaccttactcctgacaagagccaggtacttcttcagaacaaagaaagtgtattgattgctctggagaatcttatgactacatgttatggcccattgcctagtaccaattcatatgaaaataataagactgacgttagcgcagcggatattgttctttccaaaaccgccgagaccgatgtgctgtttaacaaggtggaatcctctggaaagaactactctaatgtggacacgtctgtaatcccattccagaacgacatgcacaacgacgagagcggcaaaaataccgatgactgtctgaaccaccagatcagtatcggagactttggctatggacactgctcctctgaaattagcaacattgataagaacacgaaaaatgcttttcaggacatatccatgagcaacgtctcttgggagaactcccaaaccgaatattctaaaacatgttttatttcctcagttaagcacactcagtcggaaaacggtaacaaggatcatatagatgaatccggagaaaatgaagaagaggcaggcctggagaattccagtgaaatttcggccgacgagtggtcacgcggcaatattttgaaaaacagtgtcggagaaaacatagagcccgtgaaaatacttgttcccgagaagagcctgccctgtaaggtctctaataataattacccaatccccgagcagatgaacttaaatgaggacagctgtaacaagaagtcaaatgtcatcgacaacaagtccgggaaggtgaccgcatacgacctcttgtccaaccgtgtcattaagaagcctatgtctgcctcagcgctgttcgtccaggaccaccgcccacaattcctaattgaaaatccaaaaacaagcctcgaagacgctacattgcagatagaagaactgtggaaaacgctttccgaggaggagaagctgaaatatgaggagaaagcaactaaggatctggagagatataacagccagatgaaacgggctattgagcaggaaagtcagatgagcttgaaagatggcaggaagaagattaagccgacatccgcttggaatctggcgcaaaagcacaagttgaagacctccttatccaatcagcctaagctggatgagctgctgcagagccagatcgaaaagcgccgttcacagaacatcaagatggttcagattccgttttcaatgaaaaatttgaagattaatttcaaaaagcaaaacaaggtggacctggaagagaaagacgaaccttgcctgatccataacctgcgtttcccagatgcctggcttatgactagtaaaaccgaagtcatgctgctgaatccctatagggtggaagaggctttgctgtttaaacgcctgctcgaaaatcacaagcttcccgccgagccattagagaagcctattatgctgaccgaatcattgtttaacggcagccactatcttgacgtgttatacaagatgaccgctgacgaccaacggtactctgggtccacctatttgtcagaccccagactgaccgctaatggattcaagatcaagctgataccaggcgtctccatcactgaaaactatctggagatcgagggaatggccaattgtctgcccttctatggcgtggctgacctgaaggagattctcaacgccatcttgaaccgaaacgccaaagaggtatacgagtgcaggccaaggaaagtcatctcatatttggagggcgaagctgtacggctcagtcgccagctcccaatgtacctttccaaagaagacatccaggacattatttaccgaatgaaacatcagttcggaaacgaaatcaaagagtgtgtccatgggagacccttcttccatcatctgacctacctgcccgagaccacgtag

SEQ ID NO: 11866 - DNA, 135 bp, Artificial Sequence
  derived and/or modified sequence
atgaagcagctgcccgccgccaccgtgcggctgctgagcagcagccaaatcattacctcagttgtatctgtggtgaaggagctcatcgagaattccctagatgccggtgccacctccgttgatgtgaagctatag

SEQ ID NO: 11867 - DNA, 2799 bp, Artificial Sequence
  derived and/or modified sequence
atgaagcagctgccagccgctactgttagattgttaagtagtagccagataattacatcagtcgtttccgtggtgaaggagctgatcgagaactccttggatgcaggagccacatccgtggacgttaagctggaaaactacggcttcgacaaaattgaggtcagagacaatggcgaaggaatcaaggctgtggatgcccctgtgatggctatgaaatattacacctccaagatcaatagccacgaggacctcgaaaacctcactacatatggctttcggggagaggctctgggcagtatttgctgtatcgctgaggtattgattaccacaaggacagccgctgacaatttctccacgcagtacgtattagacggctctggccacatcctgtcacagaagcctagccacctgggccaggggacaacagttaccgcactgcgcctgtttaaaaatctgccggttcgcaagcagttctacagtacagctaagaagtgcaaggacgagattaagaaaatccaagacctcttgatgagtttcgggatactcaaacccgacttgaggatcgtttttgtccataataaggcagtgatatggcaaaagagccgggtgagcgaccataaaatggctcttatgagtgtgttgggaactgccgtgatgaataacatggagagtttccaatatcactccgaagagagtcagatctatctgagcggattcttgccgaagtgcgatgctgaccattcattcacatctctatcgactcctgaacgttctttcatatttataaacagccgaccggtgcaccagaaggatatccttaagctgatcagacaccattataacctcaagtgcctgaaagagagtaccaggctgtatcctgtcttttttctgaaaatcgacgtccctaccgcagatgttgacgtgaatcttacacccgacaaaagtcaggtgttactacagaataaagagtcagttctgattgcactcgagaaccttatgaccacatgttacggacccctgccaagcactaacagctacgagaataataaaactgatgtgagcgccgctgacatagtgctgtcgaaaacggccgaaacggatgttctctttaataaggtggaaagtagcggcaagaattacagcaacgtggacaccagtgtgattccctttcagaatgacatgcacaacgacgaaagcggcaagaacaccgacgattgtctcaaccaccagatcagcatcggggattttgggtatgggcattgctcctcagagattagtaacatcgataaaaatacaaaaaacgcatttcaggatatctccatgagtaatgtaagttgggagaactcccagactgagtattctaaaacttgttttatatcatcagtaaagcacacgcagtccgagaacggtaataaggaccacatcgatgagtctggtgagaacgaagaagaggctggattagagaacagttctgaaatctcagcggacgagtggagcaggggtaacatactgaaaaattccgtaggcgaaaatatcgaaccagttaaaatcctggtgcctgagaaaagtctgccctgtaaagtcagcaataacaactacccaatccctgagcagatgaacctcaacgaggactcctgtaataagaaatccaacgtcattgataataagtccgggaaagtgacagcgtatgacctgctgtctaaccgcgttataaaaaagcctatgtctgcctccgcactatttgtgcaggatcatcggcctcagtttctgattgagaatcccaaaaccagtttggaggatgctacattgcagattgaggagctgtggaagacgctgagcgaggaggaaaaactgaaatacgaggagaaagcaaccaaggacttggagagatacaatagtcaaatgaagcgcgcaattgagcaggaaagccaaatgtccctgaaggatggtagaaaaaagattaagccgacatctgcttggaatttggcccagaaacataagttgaaaacctccttgagcaatcaacctaagctggacgaactccttcagtctcagatcgaaaaacgtaggtcccagaatatcaaaatggtccagatcccctttagtatgaagaatctgaaaatcaacttcaaaaaacagaataaagtcgatctagaggagaaggacgagccctgcctcattcataacctgcgctttcccgacgcatggcttatgaccagcaagaccgaagttatgctgctcaacccctatagggtggaggaggccctcctcttcaaacgactcctggagaaccacaaactgccagctgagcctttagagaagcccataatgctcacggaatctctgttcaatggcagccactatctcgatgttctttataaaatgacagccgatgatcagcggtacagcggtagcacctatctgtctgatcccaggctaactgcaaatggcttcaagataaagttaatccccggtgtgtccattacagagaactatctagagattgaggggatggccaactgtctgcccttctacggggtggccgacctgaaggaaatcctgaacgcaattctgaaccggaacgccaaagaagtttatgaatgccgaccaaggaaggttatttcttatctggagggcgaggccgttaggttatcccgccaactgcctatgtaccttagtaaggaggacattcaagacatcatctatcggatgaaacaccaatttggcaatgaaatcaaggagtgtgtccatggcagacctttttttcatcacctgacatatttgccagagacaacatag

SEQ ID NO: 11868 - DNA, 135 bp, Artificial Sequence
  derived and/or modified sequence
atgaagcagctgccagccgcaacggttcgcctactgtcatccagccagatcatcacatctgttgtgtccgtggtgaaggaactcatagaaaacagtcttgatgcaggggctacgagtgtggatgtgaaactgtag

SEQ ID NO: 11869 - DNA, 2764 bp, Artificial Sequence
  derived and/or modified sequence
ggcaagacaacgaggatttgcgtagggggcgagcctctgaggccacttggctcttacggccacgcagggcgccgcagatgcagccggagcccgcttttccctctcaggacgacccctaggccgccagcagttccctaccgacgaaggcgactgtacagcgtccaccgcgttcgtgcccacttacccgccgccccactccgggccgccggctcgcagcaggaccagcccggctgctacggccgcggatacacgccctcaggcccggcgctgcgcagcttgcggaagctttcccggacagactcgctgccagcggattggctgcgagcagcgccaatctcacgttgcccccgggcgaggcgggactcagtgccgcgctctctgcacccgctctgccgcgcgcgtgcgtgctgggtgcgggtgcgggtgcggggttgggcctgcgcatcgggtgagacgctggctgcttgcggctagtggatggtaattgcctgcctcgcgctagcaggaagctgctctgttaaaagcgaaaatgaaacaattgcctgcggcaacagttcgactcctttcaagttctcagatcatcacttcggtggtcagtgttgtaaaagagcttattgaaaactccttggatgctggtgccacaagcgtagatgttaaactggagaactatggatttgataaaattgaggtgcgagataacggggagggtatcaaggctgttgatgcacctgtaatggcaatgaagtactacacctcaaaaataaatagtcatgaagatcttgaaaatttgacaacttacggttttcgtggagaagccttggggtcaatttgttgtatagctgaggttttaattacaacaagaacggctgctgataattttagcacccagtatgttttagatggcagtggccacatactttctcagaaaccttcacatcttggtcaaggtacaactgtaactgctttaagattatttaagaatctacctgtaagaaagcagttttactcaactgcaaaaaaatgtaaagatgaaataaaaaagatccaagatctcctcatgagctttggtatccttaaacctgacttaaggattgtctttgtacataacaaggcagttatttggcagaaaagcagagtatcagatcacaagatggctctcatgtcagttctggggactgctgttatgaacaatatggaatcctttcagtaccactctgaagaatctcagatttatctcagtggatttcttccaaagtgtgatgcagaccactctttcactagtctttcaacaccagaaagaagtttcatcttcataaacagtcgaccagtacatcaaaaagatatcttaaagttaatccgacatcattacaatctgaaatgcctaaaggaatctactcgtttgtatcctgttttctttctgaaaatcgatgttcctacagctgatgttgatgtaaatttaacaccagataaaagccaagtattattacaaaataaggaatctgttttaattgctcttgaaaatctgatgacgacttgttatggaccattacctagtacaaattcttatgaaaataataaaacagatgtttccgcagctgacatcgttcttagtaaaacagcagaaacagatgtgctttttaataaagtggaatcatctggaaagaattattcaaatgttgatacttcagtcattccattccaaaatgatatgcataatgatgaatctggaaaaaacactgatgattgtttaaatcaccagataagtattggtgactttggttatggtcattgtagtagtgaaatttctaacattgataaaaacactaagaatgcatttcaggacatttcaatgagtaatgtatcatgggagaactctcagacggaatatagtaaaacttgttttataagttccgttaagcacacccagtcagaaaatggcaataaagaccatatagatgagagtggggaaaatgaggaagaagcaggtcttgaaaactcttcggaaatttctgcagatgagtggagcaggggaaatatacttaaaaattcagtgggagagaatattgaacctgtgaaaattttagtgcctgaaaaaagtttaccatgtaaagtaagtaataataattatccaatccctgaacaaatgaatcttaatgaagattcatgtaacaaaaaatcaaatgtaatagataataaatctggaaaagttacagcttatgatttacttagcaatcgagtaatcaagaaacccatgtcagcaagtgctctttttgttcaagatcatcgtcctcagtttctcatagaaaatcctaagactagtttagaggatgcaacactacaaattgaagaactgtggaagacattgagtgaagaggaaaaactgaaatatgaagagaaggctactaaagacttggaacgatacaatagtcaaatgaagagagccattgaacaggagtcacaaatgtcactaaaagatggcagaaaaaagataaaacccaccagcgcatggaatttggcccagaagcacaagttaaaaacctcattatctaatcaaccaaaacttgatgaactccttcagtcccaaattgaaaaaagaaggagtcaaaatattaaaatggtacagatccccttttctatgaaaaacttaaaaataaattttaagaaacaaaacaaagttgacttagaagagaaggatgaaccttgcttgatccacaatctcaggtttcctgatgcatggctaatgacatccaaaacagagtctttt

SEQ ID NO: 11870 - DNA, 3012 bp, Artificial Sequence
  derived and/or modified sequence
gtgctgggtgcgggtgcgggtgcggggttgggcctgcgcatcgggtgagacgctggctgcttgcggctagtggatggtaattgcctgcctcgcgctagcaggaagctgctctgttaaaagcgaaaatgaaacaattgcctgcggcaacagttcgactcctttcaagttctcagatcatcacttcggtggtcagtgttgtaaaagagcttattgaaaactccttggatgctggtgccacaagcgtagatgttaaactggagaactatggatttgataaaattgaggtgcgagataacggggagggtatcaaggctgttgatgcacctgtaatggcaatgaagtactacacctcaaaaataaatagtcatgaagatcttgaaaatttgacaacttacggttttcgtggagaagccttggggtcaatttgttgtatagctgaggtacaactgtaactgctttaagattatttaagaatctacctgtaagaaagcagttttactcaactgcaaaaaaatgtaaagatgaaataaaaaagatccaagatctcctcatgagctttggtatccttaaacctgacttaaggattgtctttgtacataacaaggcagttatttggcagaaaagcagagtatcagatcacaagatggctctcatgtcagttctggggactgctgttatgaacaatatggaatcctttcagtaccactctgaagaatctcagatttatctcagtggatttcttccaaagtgtgatgcagaccactctttcactagtctttcaacaccagaaagaagtttcatcttcataaacagtcgaccagtacatcaaaaagatatcttaaagttaatccgacatcattacaatctgaaatgcctaaaggaatctactcgtttgtatcctgttttctttctgaaaatcgatgttcctacagctgatgttgatgtaaatttaacaccagataaaagccaagtattattacaaaataaggaatctgttttaattgctcttgaaaatctgatgacgacttgttatggaccattacctagtacaaattcttatgaaaataataaaacagatgtttccgcagctgacatcgttcttagtaaaacagcagaaacagatgtgctttttaataaagtggaatcatctggaaagaattattcaaatgttgatacttcagtcattccattccaaaatgatatgcataatgatgaatctggaaaaaacactgatgattgtttaaatcaccagataagtattggtgactttggttatggtcattgtagtagtgaaatttctaacattgataaaaacactaagaatgcatttcaggacatttcaatgagtaatgtatcatgggagaactctcagacggaatatagtaaaacttgttttataagttccgttaagcacacccagtcagaaaatggcaataaagaccatatagatgagagtggggaaaatgaggaagaagcaggtcttgaaaactcttcggaaatttctgcagatgagtggagcaggggaaatatacttaaaaattcagtgggagagaatattgaacctgtgaaaattttagtgcctgaaaaaagtttaccatgtaaagtaagtaataataattatccaatccctgaacaaatgaatcttaatgaagattcatgtaacaaaaaatcaaatgtaatagataataaatctggaaaagttacagcttatgatttacttagcaatcgagtaatcaagaaacccatgtcagcaagtgctctttttgttcaagatcatcgtcctcagtttctcatagaaaatcctaagactagtttagaggatgcaacactacaaattgaagaactgtggaagacattgagtgaagaggaaaaactgaaatatgaagagaaggctactaaagacttggaacgatacaatagtcaaatgaagagagccattgaacaggagtcacaaatgtcactaaaagatggcagaaaaaagataaaacccaccagcgcatggaatttggcccagaagcacaagttaaaaacctcattatctaatcaaccaaaacttgatgaactccttcagtcccaaattgaaaaaagaaggagtcaaaatattaaaatggtacagatccccttttctatgaaaaacttaaaaataaattttaagaaacaaaacaaagttgacttagaagagaaggatgaaccttgcttgatccacaatctcaggtttcctgatgcatggctaatgacatccaaaacagaggtaatgttattaaatccatatagagtagaagaagccctgctatttaaaagacttcttgagaatcataaacttcctgcagagccactggaaaagccaattatgttaacagagagtctttttaatggatctcattatttagacgttttatataaaatgacagcagatgaccaaagatacagtggatcaacttacctgtctgatcctcgtcttacagcgaatggtttcaagataaaattgataccaggagtttcaattactgaaaattacttggaaatagaaggaatggctaattgtctcccattctatggagtagcagatttaaaagaaattcttaatgctatattaaacagaaatgcaaaggaagtttatgaatgtagacctcgcaaagtgataagttatttagagggagaagcagtgcgtctatccagacaattacccatgtacttatcaaaagaggacatccaagacattatctacagaatgaagcaccagtttggaaatgaaattaaagagtgtgttcatggtcgcccattttttcatcatttaacctatcttccagaaactacatgattaaatatgtttaagaagattagttaccattgaaattggttctgtcataaaacagcatgagtctggttttaaattatctttgtattatgtgtcacatggttattttttaaatgaggattcactgacttgtttttatattgaaaaaagttccacgtattgtagaaaacgtaaataaactaatatagactatt

SEQ ID NO: 11871 - DNA, 2659 bp, Artificial Sequence
  derived and/or modified sequence
gtaattgcctgcctcgcgctagcaggaagctgctctgttaaaagcgaaaatgaaacaattgcctgcggcaacagttcgactcctttcaagttctcagatcatcacttcggtggtcagtgttgtaaaagagcttattgaaaactccttggatgctggtgccacaagcgtagatgttaaactggtacaactgtaactgctttaagattatttaagaatctacctgtaagaaagcagttttactcaactgcaaaaaaatgtaaagatgaaataaaaaagatccaagatctcctcatgagctttggtatccttaaacctgacttaaggattgtctttgtacataacaaggcagttatttggcagaaaagcagagtatcagatcacaagatggctctcatgtcagttctggggactgctgttatgaacaatatggaatcctttcagtaccactctgaagaatctcagatttatctcagtggatttcttccaaagtgtgatgcagaccactctttcactagtctttcaacaccagaaagaagtttcatcttcataaacagtcgaccagtacatcaaaaagatatcttaaagttaatccgacatcattacaatctgaaatgcctaaaggaatctactcgtttgtatcctgttttctttctgaaaatcgatgttcctacagctgatgttgatgtaaatttaacaccagataaaagccaagtattattacaaaataaggaatctgttttaattgctcttgaaaatctgatgacgacttgttatggaccattacctagtacaaattcttatgaaaataataaaacagatgtttccgcagctgacatcgttcttagtaaaacagcagaaacagatgtgctttttaataaagtggaatcatctggaaagaattattcaaatgttgatacttcagtcattccattccaaaatgatatgcataatgatgaatctggaaaaaacactgatgattgtttaaatcaccagataagtattggtgactttggttatggtcattgtagtagtgaaatttctaacattgataaaaacactaagaatgcatttcaggacatttcaatgagtaatgtatcatgggagaactctcagacggaatatagtaaaacttgttttataagttccgttaagcacacccagtcagaaaatggcaataaagaccatatagatgagagtggggaaaatgaggaagaagcaggtcttgaaaactcttcggaaatttctgcagatgagtggagcaggggaaatatacttaaaaattcagtgggagagaatattgaacctgtgaaaattttagtgcctgaaaaaagtttaccatgtaaagtaagtaataataattatccaatccctgaacaaatgaatcttaatgaagattcatgtaacaaaaaatcaaatgtaatagataataaatctggaaaagttacagcttatgatttacttagcaatcgagtaatcaagaaacccatgtcagcaagtgctctttttgttcaagatcatcgtcctcagtttctcatagaaaatcctaagactagtttagaggatgcaacactacaaattgaagaactgtggaagacattgagtgaagaggaaaaactgaaatatgaagagaaggctactaaagacttggaacgatacaatagtcaaatgaagagagccattgaacaggagtcacaaatgtcactaaaagatggcagaaaaaagataaaacccaccagcgcatggaatttggcccagaagcacaagttaaaaacctcattatctaatcaaccaaaacttgatgaactccttcagtcccaaattgaaaaaagaaggagtcaaaatattaaaatggtacagatccccttttctatgaaaaacttaaaaataaattttaagaaacaaaacaaagttgacttagaagagaaggatgaaccttgcttgatccacaatctcaggtttcctgatgcatggctaatgacatccaaaacagaggtaatgttattaaatccatatagagtagaagaagccctgctatttaaaagacttcttgagaatcataaacttcctgcagagccactggaaaagccaattatgttaacagagagtctttttaatggatctcattatttagacgttttatataaaatgacagcagatgaccaaagatacagtggatcaacttacctgtctgatcctcgtcttacagcgaatggtttcaagataaaattgataccaggagtttcaattactgaaaattacttggaaatagaaggaatggctaattgtctcccattctatggagtagcagatttaaaagaaattcttaatgctatattaaacagaaatgcaaaggaagtttatgaatgtagacctcgcaaagtgataagttatttagagggagaagcagtgcgtctatccagacaattacccatgtacttatcaaaagaggacatccaagacattatctacagaatgaagcaccagtttggaaatgaaattaaagagtgtgttcatggtcgcccattttttcatcatttaacctatcttccagaaactacatgattaaatatgtttaagaagattagttaccattgaaattggttctgtcataaaacagcatgagtctggttttaaattatctttgtattatgtgtcacat

SEQ ID NO: 11872 - DNA, 3225 bp, Artificial Sequence
  derived and/or modified sequence
agactcgctgccagcggattggctgcgagcagcgccaatctcacgttgcccccgggcgaggcgggactcagtgccgcgctctctgcacccgctctgccgcgcgcgtgcgtgctgggtgcgggtgcgggtgcggggttgggcctgcgcatcgggtgagacgctggctgcttgcggctagtggatggtaattgcctgcctcgcgctagcaggaagctgctctgttaaaagcgaaaatgaaacaattgcctgcggcaacagttcgactcctttcaagttctcagatcatcacttcggtggtcagtgttgtaaaagagcttattgaaaactccttggatgctggtgccacaagcgtagatgttaaactggagaactatggatttgataaaattgaggtgcgagataacggggagggtatcaaggctgttgatgcacctgtaatggcaatgaagtactacacctcaaaaataaatagtcatgaagatcttgaaaatttgacaacttacggttttcgtggagaagccttggggtcaatttgttgtatagctgaggttttaattacaacaagaacggctgctgataattttagcacccagtatgttttagatggcagtggccacatactttctcagaaaccttcacatcttggtcaaggtacaactgtaactgctttaagattatttaagaatctacctgtaagaaagcagttttactcaactgcaaaaaaatgtaaagatgaaataaaaaagatccaagatctcctcatgagctttggtatccttaaacctgacttaaggattgtctttgtacataacaaggcagttatttggcagaaaagcagagtatcagatcacaagatggctctcatgtcagttctggggactgctgttatgaacaatatggaatcctttcagtaccactctgaagaatctcagatttatctcagtggatttcttccaaagtgtgatgcagaccactctttcactagtctttcaacaccagaaagaagtttcatcttcataaacagtcgaccagtacatcaaaaagatatcttaaagttaatccgacatcattacaatctgaaatgcctaaaggaatctactcgtttgtatcctgttttctttctgaaaatcgatgttcctacagctgatgttgatgtaaatttaacaccagataaaagccaagtattattacaaaataaggaatctgttttaattgctcttgaaaatctgatgacgacttgttatggaccattacctagtacaaattcttatgaaaataataaaacagatgtttccgcagctgacatcgttcttagtaaaacagcagaaacagatgtgctttttaataaagtggaatcatctggaaagaattattcaaatgttgatacttcagtcattccattccaaaatgatatgcataatgatgaatctggaaaaaacactgatgattgtttaaatcaccagataagtattggtgactttggttatggtcattgtagtagtgaaatttctaacattgataaaaacactaagaatgcatttcaggacatttcaatgagtaatgtatcatgggagaactctcagacggaatatagtaaaacttgttttataagttccgttaagcacacccagtcagaaaatggcaataaagaccatatagatgagagtggggaaaatgaggaagaagcaggtcttgaaaactcttcggaaatttctgcagatgagtggagcaggggaaatatacttaaaaattcagtgggagagaatattgaacctgtgaaaattttagtgcctgaaaaaagtttaccatgtaaagtaagtaataataattatccaatccctgaacaaatgaatcttaatgaagattcatgtaacaaaaaatcaaatgtaatagataataaatctggaaaagttacagcttatgatttacttagcaatcgagtaatcaagaaacccatgtcagcaagtgctctttttgttcaagatcatcgtcctcagtttctcatagaaaatcctaagactagtttagaggatgcaacactacaaattgaagaactgtggaagacattgagtgaagaggaaaaactgaaatatgaagagaaggctactaaagacttggaacgatacaatagtcaaatgaagagagccattgaacaggagtcacaaatgtcactaaaagatggcagaaaaaagataaaacccaccagcgcatggaatttggcccagaagcacaagttaaaaacctcattatctaatcaaccaaaacttgatgaactccttcagtcccaaattgaaaaaagaaggagtcaaaatattaaaatggtacagatccccttttctatgaaaaacttaaaaataaattttaagaaacaaaacaaagttgacttagaagagaaggatgaaccttgcttgatccacaatctcaggtttcctgatgcatggctaatgacatccaaaacagaggtaatgttattaaatccatatagagtagaagaagccctgctatttaaaagacttcttgagaatcataaacttcctgcagagccactggaaaagccaattatgttaacagagagtctttttaatggatctcattatttagacgttttatataaaatgacagcagatgaccaaagatacagtggatcaacttacctgtctgatcctcgtcttacagcgaatggtttcaagataaaattgataccaggagtttcaattactgaaaattacttggaaatagaaggaatggctaattgtctcccattctatggagtagcagatttaaaagaaattcttaatgctatattaaacagaaatgcaaaggaagtttatgaatgtagacctcgcaaagtgataagttatttagagggagaagcagtgcgtctatccagacaattacccatgtacttatcaaaagaggacatccaagacattatctacagaatgaagcaccagtttggaaatgaaattaaagagtgtgttcatggtcgcccattttttcatcatttaacctatcttccagaaactacatgattaaatatgtttaagaagattagttaccattgaaattggttctgtcataaaacagcatgagtctggttttaaattatctttgtattatgtgtcacatggttattttttaaatgaggattcactgacttgtttttatattgaaaaaagttccacgtattgtagaaaacgtaaataaactaatatagactattca

SEQ ID NO: 11873 - protein, 862 aa, Artificial Sequence
  derived and/or modified sequence
MERAESSSTEPAKAIKPIDRKSVHQICSGQVVLSLSTAVKELVENSLDAGATNIDLKLKDYGVDLIEVSDNGCGVEEENFEGLTLKHHTSKIQEFADLTQVETFGFRGEALSSLCALSDVTISTCHASAKVGTRLMFDHNGKIIQKTPYPRPRGTTVSVQQLFSTLPVRHKEFQRNIKKEYAKMVQVLHAYCIISAGIRVSCTNQLGQGKRQPVVCTGGSPSIKENIGSVFGQKQLQSLIPFVQLPPSDSVCEEYGLSCSDALHNLFYISGFISQCTHGVGRSSTDRQFFFINRRPCDPAKVCRLVNEVYHMYNRHQYPFVVLNISVDSECVDINVTPDKRQILLQEEKLLLAVLKTSLIGMFDSDVNKLNVSQQPLLDVEGNLIKMHAADLEKPMVEKQDQSPSLRTGEEKKDVSISRLREAFSLRHTTENKPHSPKTPEPRRSPLGQKRGMLSSSTSGAISDKGVLRPQKEAVSSSHGPSDPTDRAEVEKDSGHGSTSVDSEGFSIPDTGSHCSSEYAASSPGDRGSQEHVDSQEKAPKTDDSFSDVDCHSNQEDTGCKFRVLPQPTNLATPNTKRFKKEEILSSSDICQKLVNTQDMSASQVDVAVKINKKVVPLDFSMSSLAKRIKQLHHEAQQSEGEQNYRKFRAKICPGENQAAEDELRKEISKTMFAEMEIIGQFNLGFIITKLNEDIFIVDQHATDEKYNFEMLQQHTVLQGQRLIAPQTLNLTAVNEAVLIENLEIFRKNGFDFVIDENAPVTERAKLISLPTSKNWTFGPQDVDELIFMLSDSPGVMCRPSRVKQMFASRACRKSVMIGTALNTSEMKKLITHMGEMDHPWNCPHGRPTMRHIANLGVISQN

SEQ ID NO: 11874 - protein, 461 aa, Artificial Sequence
  derived and/or modified sequence
MERAESSSTEPAKAIKPIDRKSVHQICSGQVVLSLSTAVKELVENSLDAGATNIDLKLKDYGVDLIEVSDNGCGVEEENFEGLTLKHHTSKIQEFADLTQVETFGFRGEALSSLCALSDVTISTCHASAKVGTRLMFDHNGKIIQKTPYPRPRGTTVSVQQLFSTLPVRHKEFQRNIKKEYAKMVQVLHAYCIISAGIRVSCTNQLGQGKRQPVVCTGGSPSIKENIGSVFGQKQLQSLIPFVQLPPSDSVCEEYGLSCSDALHNLFYKTMFAEMEIIGQFNLGFIITKLNEDIFIVDQHATDEKYNFEMLQQHTVLQGQRLIAPQTLNLTAVNEAVLIENLEIFRKNGFDFVIDENAPVTERAKLISLPTSKNWTFGPQDVDELIFMLSDSPGVMCRPSRVKQMFASRACRKSVMIGTALNTSEMKKLITHMGEMDHPWNCPHGRPTMRHIANLGVISQN

SEQ ID NO: 11875 - protein, 572 aa, Artificial Sequence
  derived and/or modified sequence
MERAESSSTEPAKAIKPIDRKSVHQICSGQVVLSLSTAVKELVENSLDAGATNIDLKLKDYGVDLIEVSDNGCGVEEENFEGLTLKHHTSKIQEFADLTQVETFGFRGEALSSLCALSDVTISTCHASAKVGTRLMFDHNGKIIQKTPYPRPRGTTVSVQQLFSTLPVRHKEFQRNIKKEYAKMVQVLHAYCIISAGIRVSCTNQLGQGKRQPVVCTGGSPSIKENIGSVFGQKQLQSLIPFVQLPPSDSVCEEYGLSCSDALHNLFYISGFISQCTHGVGRSSTDRQFFFINRRPCDPAKVCRLVNEVYHMYNRHQYPFVVLNISVDSECVDINVTPDKRQILLQEEKLLLAVLKTSLIGMFDSDVNKLNVSQQPLLDVEGNLIKMHAADLEKPMVEKQDQSPSLRTGEEKKDVSISRLREAFSLRHTTENKPHSPKTPEPRRSPLGQKRGMLSSSTSGAISDKGVLRPQKEAVSSSHGPSDPTDRAEVEKDSGHGSTSVDSEGFSIPDTGSHCSSEYAASSPGDRGSQEHVDSQEKAPKTDDSFSDVDCHSNQEDTGLKTGPSDPRTSMN

SEQ ID NO: 11876 - DNA, 2589 bp, Artificial Sequence
  derived and/or modified sequence
atggagagagccgagagcagcagcaccgagcccgccaaggccatcaagcccatcgacagaaagagcgtgcaccagatctgcagcggccaggtggtgctgagcctgagcaccgccgtgaaggagctggtggagaacagcctggacgccggcgccaccaacatcgacctgaagctgaaggactacggcgtggacctgatcgaggtgagcgacaacggctgcggcgtggaggaggagaacttcgagggcctgaccctgaagcaccacaccagcaagatccaggagttcgccgacctgacccaggtggagaccttcggcttcagaggcgaggccctgagcagcctgtgcgccctgagcgacgtgaccatcagcacctgccacgccagcgccaaggtgggcaccagactgatgttcgaccacaacggcaagatcatccagaagaccccctaccccagacccagaggcaccaccgtgagcgtgcagcagctgttcagcaccctgcccgtgagacacaaggagttccagagaaacatcaagaaggagtacgccaagatggtgcaggtgctgcacgcctactgcatcatcagcgccggcatcagagtgagctgcaccaaccagctgggccagggcaagagacagcccgtggtgtgcaccggcggcagccccagcatcaaggagaacatcggcagcgtgttcggccagaagcagctgcagagcctgatccccttcgtgcagctgccccccagcgacagcgtgtgcgaggagtacggcctgagctgcagcgacgccctgcacaacctgttctacatcagcggcttcatcagccagtgcacccacggcgtgggcagaagcagcaccgacagacagttcttcttcatcaacagaagaccctgcgaccccgccaaggtgtgcagactggtgaacgaggtgtaccacatgtacaacagacaccagtaccccttcgtggtgctgaacatcagcgtggacagcgagtgcgtggacatcaacgtgacccccgacaagagacagatcctgctgcaggaggagaagctgctgctggccgtgctgaagaccagcctgatcggcatgttcgacagcgacgtgaacaagctgaacgtgagccagcagcccctgctggacgtggagggcaacctgatcaagatgcacgccgccgacctggagaagcccatggtggagaagcaggaccagagccccagcctgagaaccggcgaggagaagaaggacgtgagcatcagcagactgagagaggccttcagcctgagacacaccaccgagaacaagccccacagccccaagacccccgagcccagaagaagccccctgggccagaagagaggcatgctgagcagcagcaccagcggcgccatcagcgacaagggcgtgctgagaccccagaaggaggccgtgagcagcagccacggccccagcgaccccaccgacagagccgaggtggagaaggacagcggccacggcagcaccagcgtggacagcgagggcttcagcatccccgacaccggcagccactgcagcagcgagtacgccgccagcagccccggcgacagaggcagccaggagcacgtggacagccaggagaaggcccccaagaccgacgacagcttcagcgacgtggactgccacagcaaccaggaggacaccggctgcaagttcagagtgctgccccagcccaccaacctggccacccccaacaccaagagattcaagaaggaggagatcctgagcagcagcgacatctgccagaagctggtgaacacccaggacatgagcgccagccaggtggacgtggccgtgaagatcaacaagaaggtggtgcccctggacttcagcatgagcagcctggccaagagaatcaagcagctgcaccacgaggcccagcagagcgagggcgagcagaactacagaaagttcagagccaagatctgccccggcgagaaccaggccgccgaggacgagctgagaaaggagatcagcaagaccatgttcgccgagatggagatcatcggccagttcaacctgggcttcatcatcaccaagctgaacgaggacatcttcatcgtggaccagcacgccaccgacgagaagtacaacttcgagatgctgcagcagcacaccgtgctgcagggccagagactgatcgccccccagaccctgaacctgaccgccgtgaacgaggccgtgctgatcgagaacctggagatcttcagaaagaacggcttcgacttcgtgatcgacgagaacgcccccgtgaccgagagagccaagctgatcagcctgcccaccagcaagaactggaccttcggcccccaggacgtggacgagctgatcttcatgctgagcgacagccccggcgtgatgtgcagacccagcagagtgaagcagatgttcgccagcagagcctgcagaaagagcgtgatgatcggcaccgccctgaacaccagcgagatgaagaagctgatcacccacatgggcgagatggaccacccctggaactgcccccacggcagacccaccatgagacacatcgccaacctgggcgtgatcagccagaactag

SEQ ID NO: 11877 - DNA, 1386 bp, Artificial Sequence
  derived and/or modified sequence
atggagagagccgagagcagcagcaccgagcccgccaaggccatcaagcccatcgacagaaagagcgtgcaccagatctgcagcggccaggtggtgctgagcctgagcaccgccgtgaaggagctggtggagaacagcctggacgccggcgccaccaacatcgacctgaagctgaaggactacggcgtggacctgatcgaggtgagcgacaacggctgcggcgtggaggaggagaacttcgagggcctgaccctgaagcaccacaccagcaagatccaggagttcgccgacctgacccaggtggagaccttcggcttcagaggcgaggccctgagcagcctgtgcgccctgagcgacgtgaccatcagcacctgccacgccagcgccaaggtgggcaccagactgatgttcgaccacaacggcaagatcatccagaagaccccctaccccagacccagaggcaccaccgtgagcgtgcagcagctgttcagcaccctgcccgtgagacacaaggagttccagagaaacatcaagaaggagtacgccaagatggtgcaggtgctgcacgcctactgcatcatcagcgccggcatcagagtgagctgcaccaaccagctgggccagggcaagagacagcccgtggtgtgcaccggcggcagccccagcatcaaggagaacatcggcagcgtgttcggccagaagcagctgcagagcctgatccccttcgtgcagctgccccccagcgacagcgtgtgcgaggagtacggcctgagctgcagcgacgccctgcacaacctgttctacaagaccatgttcgccgagatggagatcatcggccagttcaacctgggcttcatcatcaccaagctgaacgaggacatcttcatcgtggaccagcacgccaccgacgagaagtacaacttcgagatgctgcagcagcacaccgtgctgcagggccagagactgatcgccccccagaccctgaacctgaccgccgtgaacgaggccgtgctgatcgagaacctggagatcttcagaaagaacggcttcgacttcgtgatcgacgagaacgcccccgtgaccgagagagccaagctgatcagcctgcccaccagcaagaactggaccttcggcccccaggacgtggacgagctgatcttcatgctgagcgacagccccggcgtgatgtgcagacccagcagagtgaagcagatgttcgccagcagagcctgcagaaagagcgtgatgatcggcaccgccctgaacaccagcgagatgaagaagctgatcacccacatgggcgagatggaccacccctggaactgcccccacggcagacccaccatgagacacatcgccaacctgggcgtgatcagccagaactag

SEQ ID NO: 11878 - DNA, 1719 bp, Artificial Sequence
  derived and/or modified sequence
atggagagagccgagagcagcagcaccgagcccgccaaggccatcaagcccatcgacagaaagagcgtgcaccagatctgcagcggccaggtggtgctgagcctgagcaccgccgtgaaggagctggtggagaacagcctggacgccggcgccaccaacatcgacctgaagctgaaggactacggcgtggacctgatcgaggtgagcgacaacggctgcggcgtggaggaggagaacttcgagggcctgaccctgaagcaccacaccagcaagatccaggagttcgccgacctgacccaggtggagaccttcggcttcagaggcgaggccctgagcagcctgtgcgccctgagcgacgtgaccatcagcacctgccacgccagcgccaaggtgggcaccagactgatgttcgaccacaacggcaagatcatccagaagaccccctaccccagacccagaggcaccaccgtgagcgtgcagcagctgttcagcaccctgcccgtgagacacaaggagttccagagaaacatcaagaaggagtacgccaagatggtgcaggtgctgcacgcctactgcatcatcagcgccggcatcagagtgagctgcaccaaccagctgggccagggcaagagacagcccgtggtgtgcaccggcggcagccccagcatcaaggagaacatcggcagcgtgttcggccagaagcagctgcagagcctgatccccttcgtgcagctgccccccagcgacagcgtgtgcgaggagtacggcctgagctgcagcgacgccctgcacaacctgttctacatcagcggcttcatcagccagtgcacccacggcgtgggcagaagcagcaccgacagacagttcttcttcatcaacagaagaccctgcgaccccgccaaggtgtgcagactggtgaacgaggtgtaccacatgtacaacagacaccagtaccccttcgtggtgctgaacatcagcgtggacagcgagtgcgtggacatcaacgtgacccccgacaagagacagatcctgctgcaggaggagaagctgctgctggccgtgctgaagaccagcctgatcggcatgttcgacagcgacgtgaacaagctgaacgtgagccagcagcccctgctggacgtggagggcaacctgatcaagatgcacgccgccgacctggagaagcccatggtggagaagcaggaccagagccccagcctgagaaccggcgaggagaagaaggacgtgagcatcagcagactgagagaggccttcagcctgagacacaccaccgagaacaagccccacagccccaagacccccgagcccagaagaagccccctgggccagaagagaggcatgctgagcagcagcaccagcggcgccatcagcgacaagggcgtgctgagaccccagaaggaggccgtgagcagcagccacggccccagcgaccccaccgacagagccgaggtggagaaggacagcggccacggcagcaccagcgtggacagcgagggcttcagcatccccgacaccggcagccactgcagcagcgagtacgccgccagcagccccggcgacagaggcagccaggagcacgtggacagccaggagaaggcccccaagaccgacgacagcttcagcgacgtggactgccacagcaaccaggaggacaccggcctgaagaccggccccagcgaccccagaaccagcatgaactag

SEQ ID NO: 11879 - DNA, 2589 bp, Artificial Sequence
  derived and/or modified sequence
atggagcgagccgagagttccagtaccgagccagctaaggcgattaaacctattgaccggaaatccgtgcatcaaatttgctccggacaagtagttctgagcttgagcaccgcagttaaagagctcgtggaaaattcactggatgctggcgccactaacattgatttgaagctaaaggactatggagtcgacttgatcgaggtgtcggacaacgggtgcggcgtggaggaggaaaactttgaaggactaactctcaagcaccatacttctaaaatccaggagtttgccgatctcacacaggtggaaacgtttggttttcgcggagaagctctgagctctctatgcgcattatccgacgttaccatctcgacttgccatgcaagcgccaaggttggcaccaggctgatgttcgatcacaacggcaagatcatccagaaaaccccgtatcccagaccaagagggacaactgtgagtgtgcagcaactcttttccaccctgcccgtgagacataaggagttccagagaaatatcaagaaggaatatgctaagatggtgcaggtcctccatgcctattgtatcatctcagcagggatcagagtgtcttgtactaaccagctgggacagggcaaacggcaaccagtggtctgcactggtggttccccttctatcaaggagaatattggatcagtgtttgggcagaagcagttgcaatccctcatcccctttgtgcaacttcccccatccgattctgtctgtgaggagtatggactctcttgttctgacgcgcttcacaacttgttctatatctccggattcatcagtcagtgcacccatggcgtgggccgttcatcgactgacaggcagtttttcttcatcaacagacgaccatgcgacccagcgaaggtctgtaggctcgtgaatgaggtctatcacatgtataacagacaccaatatcctttcgtggtgctgaacatttcagtcgacagcgagtgtgtggatatcaacgttacccctgacaagagacagatactgctccaggaggagaagcttctgctggccgttctgaagacttccctcatagggatgttcgattcagatgttaacaaactcaacgtgtctcagcaacctctgttagatgttgagggcaacttaatcaagatgcacgccgccgaccttgaaaaaccgatggttgaaaagcaagatcaatctccctctctccggactggggaggaaaagaaagacgtgagcatcagcagactgagagaggccttcagcctgcgacatacaacggagaacaagccgcattcccccaaaaccccagaaccccgcaggagcccactgggacagaaaagaggtatgttgagttcgagtacgagtggggccatttccgataagggcgtgctccgcccacagaaggaggccgtcagttctagccacggaccttctgatcctaccgaccgtgccgaggtggagaaagactctggtcatgggagcacttccgttgattctgaggggtttagtatccctgatactggctctcactgttcctcagagtatgccgcaagctctcctggtgatcgtgggagccaggagcacgtcgatagccaggaaaaggcccccaagacagatgattcgttctcagacgtggattgccactcgaatcaagaggacaccgggtgcaaatttagagtgctgccacagcccaccaacctggcaacgcccaacacaaagagatttaaaaaggaggagattctgagcagttccgatatttgccagaagctggttaacacccaggacatgtctgcctctcaggtcgacgtggctgtgaagatcaacaagaaagttgttccgctggacttctccatgtcttctttggcgaaaaggattaaacagctacaccatgaggcacagcagagtgaaggcgagcagaattacaggaaatttcgtgctaagatctgcccaggggaaaaccaagctgcggaggacgagcttaggaaagagatcagtaaaactatgtttgccgagatggagattatcggccagtttaaccttggattcatcatcactaaactgaatgaagacatattcattgtggatcagcacgcaacagatgagaaatataacttcgagatgctgcaacagcataccgtattacagggacagagactaatcgctccacaaacattaaatcttactgccgtgaatgaggcggtgctgatcgagaacttggagatctttcgtaagaacggctttgacttcgtcatcgatgagaacgctcccgtgaccgagcgggcaaagttaattagtctgccaacatctaaaaattggacgtttggaccgcaggacgtggatgaactgatcttcatgttaagcgactctcccggagtaatgtgtagaccatcgagggtgaagcaaatgttcgctagcagggcctgtcgtaaaagcgttatgattggcacagctttgaacacgtccgagatgaagaagctgattacgcacatgggtgagatggatcacccctggaactgtccccatggccggcctaccatgcggcatatcgcgaacctgggagtgatcagccaaaactag

SEQ ID NO: 11880 - DNA, 1386 bp, Artificial Sequence
  derived and/or modified sequence
atggagcgggccgagagcagttccacggaacctgctaaggctatcaagccaattgataggaaatcagtccatcagatatgctccggccaagtcgtgttgtccctctctaccgcggtgaaggagctggtggagaactcactggacgctggagccacgaacatcgacctcaaacttaaggattacggagtggacctgatcgaggtgagcgataatggatgcggagttgaagaagaaaactttgaggggcttactttgaagcatcatacctcaaagatccaggagtttgcagacctcacacaggtggaaactttcgggttccgtggcgaggctctgagttccctatgtgctctttccgacgtcaccataagcacatgccacgccagtgcaaaagtgggaacgaggctgatgtttgaccataacgggaaaattatccaaaagaccccctacccaagaccccgcggtactaccgtcagcgtacagcaactgtttagcactctgcctgtccgccataaagaatttcagcgtaacataaagaaggaatacgccaaaatggtccaggtgttacatgcttactgtattatttcagctggcattcgggtatcctgtacaaatcaactcgggcagggcaagcggcagccagtagtttgtacggggggaagccccagcattaaggagaacattgggagcgtattcgggcagaagcagctgcagagcctcatcccattcgtacagctgcccccctccgatagcgtttgtgaagagtatggactgtcatgttcggacgcgctgcacaaccttttctacaagacaatgtttgccgaaatggagataataggccagtttaatctgggatttatcattaccaagctgaatgaagacatattcatcgtcgaccagcacgccactgacgaaaagtacaattttgagatgctgcagcagcacactgtgctgcagggtcagcggttaattgccccccagacactgaacttgacagcagtgaacgaagctgtgctaatcgaaaatctcgagatttttcgcaaaaacgggtttgattttgtaatagacgagaatgcgccagtcaccgagcgagccaaattaatttctcttccgacttcaaagaattggacgttcggacctcaggacgttgacgaactgatctttatgctaagcgactccccgggtgtcatgtgtcggccatcccgggtgaagcagatgtttgcatccagggcttgccgcaaaagtgtcatgatcggaacagctctcaatacatccgagatgaagaagcttatcacgcacatgggtgagatggaccacccctggaactgcccgcacgggcgtccaaccatgagacatatcgccaatctgggcgtcatctctcaaaactag

SEQ ID NO: 11881 - DNA, 1719 bp, Artificial Sequence
  derived and/or modified sequence
atggaaagagcagagtcttctagcaccgagcctgctaaggctatcaagcctattgatcgcaagtctgtccatcagatttgtagtggccaagtagtgctatccctgtccacagctgtgaaggaactggtagagaacagcctcgatgcgggagctacaaacattgatttgaaactgaaggattatggagtggaccttatcgaggtttcagacaatggatgcggagtagaagaagagaacttcgaaggactcacattgaagcatcacacatctaaaatccaggaatttgccgatctcacacaggtggaaacttttggtttcaggggagaggctctatctagcctgtgcgctctttctgacgttaccatttctacttgccacgcatcagcaaaggttggaactaggttaatgtttgatcataacggaaagattatccagaaaaccccatacccaaggccgcggggcacaaccgtgagtgtacagcaattattctcaactctgcccgtcaggcacaaggaattccagcggaatataaagaaagagtatgctaaaatggtccaggtactgcatgcatattgcattatctcggctggtataagagtctcgtgtacaaaccagctggggcagggtaagcggcagcctgtggtctgcacggggggctcacccagcattaaagagaacatcggtagtgtctttggtcagaaacagctccagtcccttatccctttcgttcagctgcccccaagcgacagtgtgtgtgaggaatacggcctgagttgctccgacgctctacataatttattttatatctccggcttcatctctcaatgtactcacggtgtgggtcgctctagtacagataggcagttcttcttcatcaatcgaaggccctgcgaccctgccaaagtgtgccggctggtaaatgaggtataccacatgtacaataggcaccaatatccttttgtcgtactgaacattagtgtggattcagaatgtgtcgacatcaacgtcacacccgataaaagacaaattctgttgcaggaagagaagctgcttttagcagtgctgaagacttctctgattggaatgttcgactccgatgttaacaagctgaatgtatctcagcaacctctgctcgatgtggaaggaaacctaatcaagatgcatgccgctgacctcgagaagcctatggttgaaaagcaggaccagtctccaagcttgagaacgggcgaggagaagaaggacgtctccattagtcgcctgagggaagccttttctctgcgccatactaccgaaaacaaaccacattcaccaaaaactccggagcccaggcggagcccacttggccagaagagaggtatgctcagctcttcgacctcaggggcaattagcgataaaggagtgctgcggccccagaaagaagctgtcagcagcagccatgggccttctgatcccaccgaccgggccgaggttgagaaggactctggacacggctctacatctgtcgattccgaaggtttcagcattccggacactgggtcccattgttccagtgagtatgccgccagcagcccgggagacagaggctctcaggagcatgtagactcgcaggagaaagcaccaaaaaccgacgattctttcagtgatgtggattgccattccaatcaagaagatacgggtctgaaaaccggcccctccgacccccgcacgtccatgaattag

SEQ ID NO: 11882 - DNA, 2589 bp, Artificial Sequence
  derived and/or modified sequence
atggagcgggcagagagcagcagcacagagcccgccaaggccatcaagcccatcgacaggaagtctgtgcaccagatctgcagcggccaggtggtgctgagcctgagcacagctgtgaaggagctggtggagaacagcctggatgctggggccaccaacatcgacctgaagctgaaggactatggagtggacctgattgaggtgtctgacaatggctgcggcgtggaggaggagaactttgagggcctgaccctgaagcaccacaccagcaagatccaggagtttgctgacctgacccaggtggagaccttcggcttccggggggaggccctgagcagcctgtgtgccctgagtgatgtgaccatcagcacctgccacgccagcgccaaggtgggcacccggctgatgtttgaccacaacgggaagatcatccagaagaccccctacccccggccccggggcaccaccgtgtctgtgcagcagctgttcagcaccctgcctgtgcgccacaaggagttccagaggaacatcaagaaggagtatgccaagatggtgcaggtgctgcacgcctactgcatcatctctgctggcatccgggtgtcctgcaccaaccagctgggccagggcaagaggcagcctgtggtgtgcacaggaggcagccccagcatcaaggaaaatattggctctgtgtttggccagaagcagctgcagagcctcatcccctttgtgcagctgccccccagcgacagcgtgtgtgaggagtatggcctgagctgcagtgatgccctgcacaacctcttctacatcagcggcttcatcagccagtgcacccacggcgtgggccgcagcagcacagaccggcagttcttcttcatcaacagaagaccctgtgaccctgccaaggtgtgccgcctggtgaatgaggtgtaccacatgtacaacagacaccagtacccctttgtggtgctgaacatctctgtggacagtgaatgtgtggacatcaacgtgaccccagacaagaggcagatcctgctgcaggaggagaagctgctgctggccgtgctgaagaccagcctcatcggcatgtttgacagtgatgtgaacaagctgaatgtgtcccagcagcccctgctggatgtggagggcaacctgatcaagatgcatgctgctgacctggagaagcccatggtggagaagcaggaccagagccccagcctgaggactggagaggagaagaaggatgtgtccatcagccggctgcgggaggccttcagcctgcggcacaccacagagaacaagccccacagccccaagaccccagagcccaggaggagccccctgggccagaagaggggcatgctgagcagcagcaccagcggggccatcagtgacaagggcgtgctgcggccccagaaggaggccgtgagcagcagccacggccccagcgaccccacagacagagctgaggtggagaaggacagcggccacggcagcacctctgtggacagcgagggcttcagcatcccagacaccggcagccactgcagcagtgaatatgctgccagcagccctggggaccggggcagccaggagcacgtggacagccaggagaaggcccccaagacagatgacagcttcagtgatgtggactgccacagcaaccaggaggacaccggctgcaagttccgggtgctgccccagcccaccaacctggccacccccaacaccaagcgcttcaagaaggaggagatcctgagcagcagtgacatctgccagaagctggtgaacacccaggacatgtctgccagccaggtggatgtggccgtgaagatcaacaagaaggtggtgcccctggacttctccatgagcagcctggccaagaggatcaagcagctgcaccacgaggcccagcagagcgagggggagcagaactacaggaagttccgggccaagatctgccctggagagaaccaggccgcagaagatgagctgaggaaggagatcagcaagaccatgtttgctgagatggagatcatcggccagttcaacctgggcttcatcatcaccaagctgaatgaagacatcttcatcgtggaccagcacgccacagatgagaagtacaactttgagatgctgcagcagcacacagtgctgcagggccagaggctcatcgccccccagaccctgaacctgacagctgtgaatgaagctgtgctgattgagaacctggagatcttcaggaagaatggatttgattttgtgattgatgaaaatgcccctgtgacagagcgggccaagctgatcagcctgcccaccagcaagaactggaccttcggcccccaggatgtggatgagctgatcttcatgctgagtgacagccctggggtgatgtgccggcccagccgggtgaagcagatgtttgccagccgggcctgcaggaagtctgtgatgattggaacagccctgaacaccagcgagatgaagaagctgatcacccacatgggagagatggaccacccctggaactgcccccacggccggcccaccatgaggcacatcgccaacctgggcgtcatcagccagaactag

SEQ ID NO: 11883 - DNA, 1386 bp, Artificial Sequence
  derived and/or modified sequence
atggagcgggcagagagcagcagcacagagcccgccaaggccatcaagcccatcgacaggaagtctgtgcaccagatctgcagcggccaggtggtgctgagcctgagcacagctgtgaaggagctggtggagaacagcctggatgctggggccaccaacatcgacctgaagctgaaggactatggagtggacctgattgaggtgtctgacaatggctgcggcgtggaggaggagaactttgagggcctgaccctgaagcaccacaccagcaagatccaggagtttgctgacctgacccaggtggagaccttcggcttccggggggaggccctgagcagcctgtgtgccctgagtgatgtgaccatcagcacctgccacgccagcgccaaggtgggcacccggctgatgtttgaccacaacgggaagatcatccagaagaccccctacccccggccccggggcaccaccgtgtctgtgcagcagctgttcagcaccctgcctgtgcgccacaaggagttccagaggaacatcaagaaggagtatgccaagatggtgcaggtgctgcacgcctactgcatcatctctgctggcatccgggtgtcctgcaccaaccagctgggccagggcaagaggcagcctgtggtgtgcacaggaggcagccccagcatcaaggaaaatattggctctgtgtttggccagaagcagctgcagagcctcatcccctttgtgcagctgccccccagcgacagcgtgtgtgaggagtatggcctgagctgcagtgatgccctgcacaacctcttctacaagaccatgtttgctgagatggagatcatcggccagttcaacctgggcttcatcatcaccaagctgaatgaagacatcttcatcgtggaccagcacgccacagatgagaagtacaactttgagatgctgcagcagcacacagtgctgcagggccagaggctgattgccccccagaccctgaacctgacagctgtgaatgaggccgtgctgattgagaacctggagatcttcaggaagaatggatttgattttgtgattgatgaaaatgcccctgtgacagagcgggccaagctgatcagcctgcccaccagcaagaactggaccttcggcccccaggatgtggatgagctgatcttcatgctgagtgacagccctggggtgatgtgccggcccagccgggtgaagcagatgtttgccagccgggcctgcaggaagtctgtgatgattggaacagccctgaacaccagcgagatgaagaagctgatcacccacatgggagagatggaccacccctggaactgcccccacggccggcccaccatgaggcacatcgccaacctgggcgtcatcagccagaactag

SEQ ID NO: 11884 - DNA, 1719 bp, Artificial Sequence
  derived and/or modified sequence
atggagcgggcagagagcagcagcacagagcccgccaaggccatcaagcccatcgacaggaagtctgtgcaccagatctgcagcggccaggtggtgctgagcctgagcacagctgtgaaggagctggtggagaacagcctggatgctggggccaccaacatcgacctgaagctgaaggactatggagtggacctgattgaggtgtctgacaatggctgcggcgtggaggaggagaactttgagggcctgaccctgaagcaccacaccagcaagatccaggagtttgctgacctgacccaggtggagaccttcggcttccggggggaggccctgagcagcctgtgtgccctgagtgatgtgaccatcagcacctgccacgccagcgccaaggtgggcacccggctgatgtttgaccacaacgggaagatcatccagaagaccccctacccccggccccggggcaccaccgtgtctgtgcagcagctgttcagcaccctgcctgtgcgccacaaggagttccagaggaacatcaagaaggagtatgccaagatggtgcaggtgctgcacgcctactgcatcatctctgctggcatccgggtgtcctgcaccaaccagctgggccagggcaagaggcagcctgtggtgtgcacaggaggcagccccagcatcaaggaaaatattggctctgtgtttggccagaagcagctgcagagcctcatcccctttgtgcagctgccccccagcgacagcgtgtgtgaggagtatggcctgagctgcagtgatgccctgcacaacctcttctacatcagcggcttcatcagccagtgcacccacggcgtgggccgcagcagcacagaccggcagttcttcttcatcaacagaagaccctgtgaccctgccaaggtgtgccgcctggtgaatgaggtgtaccacatgtacaacagacaccagtacccctttgtggtgctgaacatctctgtggacagtgaatgtgtggacatcaacgtgaccccagacaagaggcagatcctgctgcaggaggagaagctgctgctggccgtgctgaagaccagcctcatcggcatgtttgacagtgatgtgaacaagctgaatgtgtcccagcagcccctgctggatgtggagggcaacctgatcaagatgcatgctgctgacctggagaagcccatggtggagaagcaggaccagagccccagcctgaggactggagaggagaagaaggatgtgtccatcagccggctgcgggaggccttcagcctgcggcacaccacagagaacaagccccacagccccaagaccccagagcccaggaggagccccctgggccagaagaggggcatgctgagcagcagcaccagcggggccatcagtgacaagggcgtgctgcggccccagaaggaggccgtgagcagcagccacggccccagcgaccccacagacagagctgaggtggagaaggacagcggccacggcagcacctctgtggacagcgagggcttcagcatcccagacaccggcagccactgcagcagtgaatatgctgccagcagccctggggaccggggcagccaggagcacgtggacagccaggagaaggcccccaagacagatgacagcttcagtgatgtggactgccacagcaaccaggaggacaccggcctgaagacaggccccagcgaccccaggacctccatgaactag

SEQ ID NO: 11885 - DNA, 2589 bp, Artificial Sequence
  derived and/or modified sequence
atggagcgggccgagagcagcagcaccgagcccgccaaggccatcaaaccgatcgacagaaagtccgttcaccagatttgctccggccaggtcgtcttaagcttgtcgaccgcagttaaggaattggtagaaaactccctcgatgcgggcgccactaatatcgaccttaagttgaaagactacggggttgatctgatcgaggtgtcagataatggttgtggagtggaggaggagaacttcgaggggttgactctcaagcaccatactagtaaaattcaggagttcgctgacttgacgcaggttgagaccttcgggttccggggggaggctctttcatcactgtgtgctctgtccgatgtgacgatcagcacgtgtcatgcgtctgcgaaagtgggcacaagactgatgtttgatcataacggcaaaatcattcagaaaactccataccctaggcctaggggaacaactgtgagcgtccagcagctctttagcaccctcccagtgcggcataaagagtttcaaaggaacattaagaaagagtacgcaaagatggtccaggtattgcatgcatactgtatcatcagtgctgggataagggtgagctgcaccaatcaactcggccagggcaaacggcagccagtcgtatgtaccggagggtctcctagcattaaggaaaatatcgggtcagtttttgggcagaagcagctccagtcactaattccatttgtccagctgcctcccagtgattcagtgtgcgaggagtacggcctctcttgctccgatgctcttcacaacctattctacatttctgggtttatatctcaatgtactcatggtgtgggccggtcctccaccgataggcagttctttttcataaaccgcagaccttgtgatccagcaaaggtgtgtcgcctggtcaacgaggtctaccacatgtacaatagacatcaatacccgtttgttgtgctgaacatctccgtggactcagaatgcgtggacattaacgtaacccccgataagcggcagattttgctgcaggaagaaaaactccttctcgcggtgctgaagaccagcctgatcggcatgttcgactctgacgtgaacaagctgaatgtctcacagcaaccacttttggacgtagaggggaatcttatcaagatgcacgctgccgatttagaaaagcccatggtggaaaaacaggaccagagcccatccctacggaccggagaggaaaagaaggacgttagcatcagtcgcctcagggaggccttcagcctccgccacacaacggagaataaaccccactcccctaaaactccggagccccgtagatctccactgggccagaaacgtgggatgctctcatcctctacctctggtgcaattagcgataagggtgttctgagacctcaaaaagaggccgtaagcagctcccacggaccatccgaccccaccgatagggcagaagtggaaaaggactccggccatggcagcaccagtgtagactccgaaggtttctccattcccgacactggtagtcactgtagtagcgagtacgccgccagtagccctggggacagaggatcacaagaacatgtggacagtcaagagaaagcgcccaaaaccgacgactccttttctgatgtcgattgtcactctaatcaggaagatacggggtgtaaatttcgggttctaccccagcctaccaatctcgccactcctaacacaaaacgcttcaaaaaggaggaaatactaagtagctctgacatctgccagaaactggtcaatacgcaggatatgtccgcctcacaggtagatgtggctgtgaagattaacaagaaagtcgtgcctttagatttttctatgtcatcacttgccaagcggatcaaacaactacatcacgaagctcagcagtccgagggcgaacagaattatcgaaaattccgcgcaaaaatctgccccggcgagaaccaggccgctgaggacgaactccgtaaggaaatttccaaaacgatgttcgcagaaatggaaatcatcggccagtttaacttaggctttataatcactaagctgaacgaggacattttcattgtggaccagcacgccaccgatgagaaatacaatttcgaaatgctgcagcagcatactgtcctgcagggacaacgcctgattgcccctcagacgcttaatcttacggctgttaacgaggccgtgcttatcgaaaatctggagattttcagaaagaacggctttgatttcgtcattgatgagaatgctccagtgaccgagagagcaaaattgatatctttgcccaccagcaagaattggacattcggacctcaggacgttgacgaacttattttcatgctgtcagattctccaggggtcatgtgtagaccttctcgggtgaaacagatgttcgcctcccgagcctgtagaaagtcagttatgatcggtactgcgttgaacacatcagagatgaagaaattaatcacacacatgggcgagatggatcatccctggaactgccctcacggaaggcccacaatgcgacatattgcaaaccttggcgtgatcagccagaactag

SEQ ID NO: 11886 - DNA, 1386 bp, Artificial Sequence
  derived and/or modified sequence
atggagcgggccgagagcagcagcaccgagcccgccaaggccatcaaacctattgacaggaagtccgtgcatcagatttgctcaggccaggttgttttgtctctctctactgcggttaaggaacttgtggagaactccctggatgcaggcgccaccaacatagacctaaaactgaaagattacggggttgatctgatagaggtgtccgacaacggatgtggcgtcgaagaagagaattttgaagggctcaccttgaagcaccacacttcgaagatacaggagttcgcagacttgacgcaggtggagacgtttggatttcgcggggaagccctgtcgagcttatgtgcgctgtcagacgtgaccatttcaacatgtcacgcgtctgccaaggttggaacacggcttatgttcgatcataatgggaagatcatccaaaaaaccccctacccaagaccacgtggtacaaccgtaagcgtccagcagctcttctccaccctccctgttcggcacaaggaattccagagaaatattaaaaaagagtatgcgaaaatggttcaggtactgcatgcctactgcatcatcagtgccggtatccgggtgtcgtgcaccaatcagctgggccaaggcaaacgccaaccagtggtttgtacgggcggctcccccagcattaaagagaatatcggctccgtctttgggcaaaaacagctacagagccttattccctttgttcagctgcctccctccgattccgtttgcgaggagtacgggctgtcctgctccgatgccctgcataatctcttttataagaccatgtttgcagagatggagataattggccagtttaatctgggcttcattattaccaagctaaatgaggatattttcatcgtggatcaacatgctaccgacgagaaatacaattttgagatgcttcagcagcacactgtgttgcaaggccaaaggctcatagcaccacagacccttaacctgaccgcagtgaacgaagccgtactgattgaaaacctggagatattccgaaagaacggattcgatttcgttatcgatgagaacgcacctgtaacagagcgagccaaactgatctccctgcctacaagcaagaattggacgttcgggccacaagatgtcgacgagctgatatttatgctcagtgattcaccgggagtcatgtgtcgaccctcaagggtgaagcagatgttcgcctctcgagcctgcagaaaaagtgtgatgattggtacggctctcaacacatccgagatgaagaaactcataactcacatgggagagatggaccacccgtggaattgtcctcacgggaggcccaccatgcgccacatcgcaaatcttggtgtaattagtcagaactag

SEQ ID NO: 11887 - DNA, 1719 bp, Artificial Sequence
  derived and/or modified sequence
atggagcgggccgagagcagcagcaccgagcccgccaaggccatcaagccaatcgacaggaaatccgtgcaccaaatctgctccggacaggtggtgctatctctctctacggccgtcaaggagctggtggagaacagcctcgacgccggagccaccaacatcgacttgaagctcaaagattatggtgttgacctgatcgaggtgtctgataatggctgtggggtggaggaagagaactttgaagggctgacactaaaacatcatactagtaagatacaggaatttgcagacttaactcaagtcgaaactttcggattccgtggtgaggcactgagtagtctctgtgctctcagtgacgttaccattagcacttgtcacgccagcgcaaaggttggcactagacttatgtttgaccacaacggcaagatcattcagaaaactccgtacccccgcccacggggcactaccgtgagtgtgcagcagttattttcgaccttgccagtgcgtcataaggagttccagcggaacattaagaaggagtatgctaaaatggtacaggttctgcatgcttattgtattatatccgctggcatccgagtatcctgcaccaaccaattaggtcagggcaagcgtcaacccgtggtgtgcacaggcggctccccctccataaaagagaacatcggctccgtgttcggacaaaaacaattgcaatccctgattccattcgttcagttgcccccttccgactcggtatgtgaagagtatggattgtcctgttctgacgcactgcacaacctgttttatatctcgggctttattagccaatgcacgcatggggtaggcaggagcagtactgaccgccagtttttctttattaaccgtagaccctgtgatccagctaaagtctgcaggctggtgaatgaagtgtatcacatgtataatcggcaccagtacccatttgtcgtcctgaacatttcagtggattcagagtgtgtcgatataaacgtcactcccgacaagaggcagatccttctccaagaagagaaacttctattggcagtcttaaaaactagtttgataggaatgttcgactccgatgttaacaagcttaatgtgagccagcagccgctgctcgacgtagagggcaacctcatcaagatgcatgctgcagatctggagaagcccatggttgaaaaacaggaccagagtccatccctgcgtacaggagaggaaaagaaagacgtgtcaatctcccgccttcgggaggcattctcgcttcggcacaccacagaaaacaaacctcatagtcctaagaccccggaacccagacgttcccccctgggccaaaaaagaggcatgctaagctccagcacatcgggggccatctcagataaaggggtgcttcggccccagaaggaagccgtctcaagttcccacggtccttccgacccgacagaccgcgccgaggttgagaaggattctgggcacggctctacgtccgtggattccgaagggtttagcataccagacactggctcccattgttcgagcgaatacgcagcctcttctcctggggaccgtgggagccaagagcacgtggattcacaagagaaagcacccaagacggacgacagcttctcagacgtcgactgtcacagtaaccaggaagataccggtcttaagaccggaccgtccgatccccgcacttctatgaactag

SEQ ID NO: 11888 - DNA, 2589 bp, Artificial Sequence
  derived and/or modified sequence
atggaaagggcggagtccagtagtacggaaccagccaaggccataaaacccatcgatagaaaatctgttcatcagatttgctcgggccaggtggtcttgtcactctctacagccgtcaaggagctggttgaaaacagtctggacgctggagcgaccaacatcgacctgaaacttaaggactacggggtggacctcattgaggtgagcgacaacggatgtggtgtcgaggaagaaaacttcgaggggctgacacttaaacaccataccagtaagattcaggagtttgcggacctcacacaggtggaaacatttgggttcaggggagaggccctctcttcactgtgtgcactttcagatgtaactatttcgacctgtcacgctagtgctaaagtggggacccggctcatgttcgatcacaacggcaaaattatacaaaaaacaccataccccagacctaggggaacgacagtgagcgtccaacaactgttctctaccctgccagtccgccataaagaatttcaaaggaacataaaaaaagaatacgcaaagatggtccaggtgcttcacgcctactgcatcatttccgccggtatcagagtgtcatgtaccaatcagctgggccaagggaagcgtcagccagtcgtgtgtacaggaggctctccaagcatcaaggagaacattggaagtgtcttcggacagaagcagctgcagtccctgattccatttgtgcagttacccccatcagatagtgtttgcgaagaatacggcctgagctgctccgatgccctgcacaatctcttctatatcagcgggttcatctcccagtgcacacacggagtggggaggtccagcacagaccgacaattttttttcattaatcgccgaccttgcgatcctgcaaaggtgtgccgattagtcaacgaggtctaccacatgtacaacagacaccagtatccctttgtggtcttgaatatttccgtagacagcgaatgcgtcgacattaacgtgacccctgataagcgccagatacttctgcaggaggagaagttgctgctcgcagtgctaaagacctctctcattggcatgttcgattcagacgtgaataagctgaacgtatcccagcagcctctgctcgacgtcgaggggaacttaatcaagatgcacgccgcagaccttgagaaacctatggtggagaagcaggaccaatcacctagcctgcgtaccggtgaagagaagaaagacgtgtccatatccaggctgcgcgaggccttttccttgcggcacacgacagaaaacaaaccacactcccctaagaccccagagccacgcaggtccccactgggccaaaaaagaggcatgcttagctctagtacgtctggtgccatcagtgacaagggcgttctcagaccacagaaagaggccgtcagttcatctcacggtcccagcgatcccactgatagagcagaggtcgagaaagacagcggtcatgggagtacctcggtggattcagaaggcttttccattccggatactggctcacactgttccagcgaatatgccgcttctagcccgggagacaggggatcccaggagcacgtagattctcaagaaaaggcacccaaaactgatgattcatttagcgacgttgactgtcattcaaatcaggaggacacaggatgtaagttcagggttctgcctcaaccgactaacctcgctacgcctaacaccaagcgcttcaaaaaagaagaaattttgtccagctcagacatctgtcagaaattggtgaatacgcaggatatgagcgcatctcaggttgacgtggccgttaaaattaacaagaaagttgttccactagacttttccatgagctccctggccaagcgcatcaaacagctccaccacgaggcccaacagtcagagggcgagcagaattaccgtaagttcagggcaaaaatctgtcccggagagaaccaggctgcggaagatgaactccgaaaggaaatttctaagactatgttcgctgagatggagatcataggacagttcaacctgggctttatcatcacaaagctgaatgaggatatatttattgtcgatcagcacgcgacggacgaaaagtataattttgagatgctgcagcagcataccgtgctacaaggccagagactaattgcccctcagaccctgaatctgacggctgtaaacgaggccgtccttattgaaaacctcgagatcttccggaagaacggctttgattttgtaatagacgaaaatgctccagtaaccgaacgcgcaaaactaatcagtctacctacaagtaaaaactggacttttggaccccaagatgtggacgagctcatatttatgctgagcgattcaccaggggttatgtgccgcccttcgcgggtcaaacagatgttcgccagtcgcgcttgtcgtaagtccgttatgattggtacggcactcaatacatcagaaatgaagaagctgataactcatatgggggagatggaccacccctggaactgtcctcatggacggccaactatgcgacatatcgcaaacctgggggtaatcagccagaattag

SEQ ID NO: 11889 - DNA, 1386 bp, Artificial Sequence
  derived and/or modified sequence
atggaaagagccgagtctagcagcactgaaccagcaaaggctataaaacccatcgaccggaagtcagttcatcaaatctgctccggacaggtcgtactgagtcttagcacggcagtaaaggagctggtggaaaatagtcttgatgccggtgctaccaatatcgacctcaagctgaaagattacggtgtggatctcatcgaggtctccgataacggctgtggagtggaggaagagaatttcgagggtctgactctcaaacaccatacatcaaagatccaagaattcgctgacttgacccaggtggaaactttcgggttcagaggcgaagccttatcctcactgtgcgccttgtccgacgtgactatttctacctgtcatgcttccgctaaggtagggacccgcttaatgtttgatcataatggcaaaattatccaaaagaccccatatcccagaccaagaggcacaactgtgtccgtgcagcagctctttagcactctgcccgttcgacacaaggaattccagcggaacattaaaaaagagtacgctaaaatggtgcaggttctccatgcctattgcatcatcagcgctggaatccgagtcagctgtacgaatcagctcggtcaaggaaaacgccagcccgtcgtatgtaccgggggatcaccctcaatcaaagagaacattggctcagtgttcggccagaagcagctgcaatcgctgatcccatttgttcagctgcccccatctgactcggtgtgcgaagaatacggcctcagctgcagtgacgcccttcacaacctgttttataaaactatgtttgctgaaatggagataatcggacaatttaacttgggattcatcattaccaaactcaatgaggacatatttatcgtggatcagcacgcaacggacgaaaagtacaattttgaaatgttgcagcagcataccgtccttcaaggacagcggctgattgcaccccagacccttaaccttacagccgtgaacgaagccgtccttatcgaaaatctggagatctttagaaagaatggctttgattttgtaatcgacgaaaacgcaccagtcacagaacgtgctaagctcatcagtttgcccacctcgaaaaattggaccttcggccctcaagacgtggacgagcttatcttcatgctttccgacagtccaggggtgatgtgtcggccaagccgcgtcaaacaaatgttcgccagccgagcttgtcggaagagcgtgatgatagggaccgccctcaatacaagtgaaatgaagaaactcattacgcacatgggcgaaatggatcacccttggaattgcccccacgggagacctacaatgagacacatagctaacctgggggtgatttcacagaattag

SEQ ID NO: 11890 - DNA, 1719 bp, Artificial Sequence
  derived and/or modified sequence
atggagagagctgagtccagcagcactgaacccgcaaaagcgatcaaaccaatagaccgcaaaagcgtgcaccagatttgtagcgggcaggtggtgctgtcactgagcacagcggtgaaggagctagtggaaaattcattagacgccggtgctaccaacatcgacctgaagctgaaagattatggagtggatctgatagaagtgtctgacaatggctgcggggtcgaagaagagaatttcgagggtttgaccctcaagcaccacacatcaaaaatccaagagtttgctgatctcacccaggttgagacatttggctttcggggagaggcactaagctcgctctgtgctctttccgacgtgaccatctctacatgtcatgcctctgccaaagtgggaactcggctgatgttcgaccacaacgggaagataatccagaaaacaccttaccctcgtcctagagggacaaccgtaagcgtccaacagctgttctcaacccttcctgtgcggcacaaggagttccagcgaaacattaagaaagagtacgctaagatggtccaggtgctccacgcttactgcatcataagcgccggaatcagggtgtcctgcactaaccaacttggacagggtaaacgacagccggtggtgtgcacgggcggaagcccttctataaaggagaatattggaagtgttttcggacagaaacagctgcagtccttgataccattcgtgcagctgcccccaagcgactccgtttgcgaggaatacggactctcatgttccgatgctctacacaatctgttctacattagtgggttcatctcccagtgtactcacggggtggggagaagctccacagaccggcagtttttcttcataaacagaaggccctgcgaccccgctaaagtgtgccgtctcgttaacgaagtttaccacatgtacaacagacaccagtatccctttgtggttttaaacatttccgtggactccgaatgcgtagatattaatgtgaccccagacaagagacagattctgttgcaagaagagaagctcctgctcgcagtactgaagacaagcttgatagggatgttcgactctgatgttaacaaactgaacgtgagtcagcagccactcctggatgttgagggcaaccttattaagatgcacgctgccgacctggaaaaacctatggttgagaaacaggatcagtctccatctctgaggaccggcgaagaaaagaaagacgtcagcattagtagattgagggaagccttttctctgagacatacaacagagaacaagccccatagtcctaaaacacccgagcctagacggtcaccacttggccaaaaacgagggatgctgagttccagcacgtcaggcgcaataagcgacaagggcgtcctgcgcccacaaaaggaggctgtctcttcatcacatgggccaagtgatcccacagaccgtgctgaagtagaaaaagattctgggcacgggtccacctccgttgattcagagggttttagtatccccgacactggaagccactgtagcagtgagtatgccgcaagtagcccaggggatcgtggcagccaggaacacgtagatagccaggagaaggccccaaagacggacgacagcttttccgacgtcgattgccactctaatcaagaggatacaggcctgaaaacaggcccatctgaccccaggacttcaatgaactag

SEQ ID NO: 11891 - DNA, 2855 bp, Artificial Sequence
  derived and/or modified sequence
ggagcacaacgtcgaaagcagccaatgggagttcaggaggcggagcgcctgtgggagccctggagggaactttcccagtccccgaggcggatcgggtgttgcatccatggagcgagctgagagctcgagtacagaacctgctaaggccatcaaacctattgatcggaagtcagtccatcagatttgctctgggcaggtggtactgagtctaagcactgcggtaaaggagttagtagaaaacagtctggatgctggtgccactaatattgatctaaagcttaaggactatggagtggatcttattgaagtttcagacaatggatgtggggtagaagaagaaaacttcgaaggcttaactctgaaacatcacacatctaagattcaagagtttgccgacctaactcaggttgaaacttttggctttcggggggaagctctgagctcactttgtgcactgagcgatgtcaccatttctacctgccacgcatcggcgaaggttggaactcgactgatgtttgatcacaatgggaaaattatccagaaaaccccctacccccgccccagagggaccacagtcagcgtgcagcagttattttccacactacctgtgcgccataaggaatttcaaaggaatattaagaaggagtatgccaaaatggtccaggtcttacatgcatactgtatcatttcagcaggcatccgtgtaagttgcaccaatcagcttggacaaggaaaacgacagcctgtggtatgcacaggtggaagccccagcataaaggaaaatatcggctctgtgtttgggcagaagcagttgcaaagcctcattccttttgttcagctgccccctagtgactccgtgtgtgaagagtacggtttgagctgttccgatgctctgcataatcttttttacatctcaggtttcatttcacaatgcacgcatggagttggaaggagttcaacagacagacagtttttctttatcaaccggcggccttgtgacccagcaaaggtctgcagactcgtgaatgaggtctaccacatgtataatcgacaccagtatccatttgttgttcttaacatttctgttgattcagaatgcgttgatatcaatgttactccagataaaaggcaaattttgctacaagaggaaaagcttttgttggcagttttaaagacctctttgataggaatgtttgatagtgatgtcaacaagctaaatgtcagtcagcagccactgctggatgttgaaggtaacttaataaaaatgcatgcagcggatttggaaaagcccatggtagaaaagcaggatcaatccccttcattaaggactggagaagaaaaaaaagacgtgtccatttccagactgcgagaggccttttctcttcgtcacacaacagagaacaagcctcacagcccaaagactccagaaccaagaaggagccctctaggacagaaaaggggtatgctgtcttctagcacttcaggtgccatctctgacaaaggcgtcctgagacctcagaaagaggcagtgagttccagtcacggacccagtgaccctacggacagagcggaggtggagaaggactcggggcacggcagcacttccgtggattctgaggggttcagcatcccagacacgggcagtcactgcagcagcgagtatgcggccagctccccaggggacaggggctcgcaggaacatgtggactctcaggagaaagcgcctaaaactgacgactctttttcagatgtggactgccattcaaaccaggaagataccggatgtaaatttcgagttttgcctcagccaactaatctcgcaaccccaaacacaaagcgttttaaaaaagaagaaattctttccagttctgacatttgtcaaaagttagtaaatactcaggacatgtcagcctctcaggttgatgtagctgtgaaaattaataagaaagttgtgcccctggacttttctatgagttctttagctaaacgaataaagcagttacatcatgaagcacagcaaagtgaaggggaacagaattacaggaagtttagggcaaagatttgtcctggagaaaatcaagcagccgaagatgaactaagaaaagagataagtaaaacgatgtttgcagaaatggaaatcattggtcagtttaacctgggatttataataaccaaactgaatgaggatatcttcatagtggaccagcatgccacggacgagaagtataacttcgagatgctgcagcagcacaccgtgctccaggggcagaggctcatagcacctcagactctcaacttaactgctgttaatgaagctgttctgatagaaaatctggaaatatttagaaagaatggctttgattttgttatcgatgaaaatgctccagtcactgaaagggctaaactgatttccttgccaactagtaaaaactggaccttcggaccccaggacgtcgatgaactgatcttcatgctgagcgacagccctggggtcatgtgccggccttcccgagtcaagcagatgtttgcctccagagcctgccggaagtcggtgatgattgggactgctcttaacacaagcgagatgaagaaactgatcacccacatgggggagatggaccacccctggaactgtccccatggaaggccaaccatgagacacatcgccaacctgggtgtcatttctcagaactgaccgtagtcactgtatggaataattggttttatcgcagatttttatgttttgaaagacagagtcttcactaaccttttttgttttaaaatgaacctgctacttaaaaaaaatacacatcacacccatttaaaagtgatcttgagaaccttttcaaaccaga

SEQ ID NO: 11892 - DNA, 1386 bp, Artificial Sequence
  derived and/or modified sequence
atggagcgagctgagagctcgagtacagaacctgctaaggccatcaaacctattgatcggaagtcagtccatcagatttgctctgggcaggtggtactgagtctaagcactgcggtaaaggagttagtagaaaacagtctggatgctggtgccactaatattgatctaaagcttaaggactatggagtggatcttattgaagtttcagacaatggatgtggggtagaagaagaaaacttcgaaggcttaactctgaaacatcacacatctaagattcaagagtttgccgacctaactcaggttgaaacttttggctttcggggggaagctctgagctcactttgtgcactgagcgatgtcaccatttctacctgccacgcatcggcgaaggttggaactcgactgatgtttgatcacaatgggaaaattatccagaaaaccccctacccccgccccagagggaccacagtcagcgtgcagcagttattttccacactacctgtgcgccataaggaatttcaaaggaatattaagaaggagtatgccaaaatggtccaggtcttacatgcatactgtatcatttcagcaggcatccgtgtaagttgcaccaatcagcttggacaaggaaaacgacagcctgtggtatgcacaggtggaagccccagcataaaggaaaatatcggctctgtgtttgggcagaagcagttgcaaagcctcattccttttgttcagctgccccctagtgactccgtgtgtgaagagtacggtttgagctgttccgatgctctgcataatcttttttataaaacgatgtttgcagaaatggaaatcattggtcagtttaacctgggatttataataaccaaactgaatgaggatatcttcatagtggaccagcatgccacggacgagaagtataacttcgagatgctgcagcagcacaccgtgctccaggggcagaggctcatagcacctcagactctcaacttaactgctgttaatgaagctgttctgatagaaaatctggaaatatttagaaagaatggctttgattttgttatcgatgaaaatgctccagtcactgaaagggctaaactgatttccttgccaactagtaaaaactggaccttcggaccccaggacgtcgatgaactgatcttcatgctgagcgacagccctggggtcatgtgccggccttcccgagtcaagcagatgtttgcctccagagcctgccggaagtcggtgatgattgggactgctcttaacacaagcgagatgaagaaactgatcacccacatgggggagatggaccacccctggaactgtccccatggaaggccaaccatgagacacatcgccaacctgggtgtcatttctcagaactga

SEQ ID NO: 11893 - DNA, 1719 bp, Artificial Sequence
  derived and/or modified sequence
atggagcgagctgagagctcgagtacagaacctgctaaggccatcaaacctattgatcggaagtcagtccatcagatttgctctgggcaggtggtactgagtctaagcactgcggtaaaggagttagtagaaaacagtctggatgctggtgccactaatattgatctaaagcttaaggactatggagtggatcttattgaagtttcagacaatggatgtggggtagaagaagaaaacttcgaaggcttaactctgaaacatcacacatctaagattcaagagtttgccgacctaactcaggttgaaacttttggctttcggggggaagctctgagctcactttgtgcactgagcgatgtcaccatttctacctgccacgcatcggcgaaggttggaactcgactgatgtttgatcacaatgggaaaattatccagaaaaccccctacccccgccccagagggaccacagtcagcgtgcagcagttattttccacactacctgtgcgccataaggaatttcaaaggaatattaagaaggagtatgccaaaatggtccaggtcttacatgcatactgtatcatttcagcaggcatccgtgtaagttgcaccaatcagcttggacaaggaaaacgacagcctgtggtatgcacaggtggaagccccagcataaaggaaaatatcggctctgtgtttgggcagaagcagttgcaaagcctcattccttttgttcagctgccccctagtgactccgtgtgtgaagagtacggtttgagctgttccgatgctctgcataatcttttttacatctcaggtttcatttcacaatgcacgcatggagttggaaggagttcaacagacagacagtttttctttatcaaccggcggccttgtgacccagcaaaggtctgcagactcgtgaatgaggtctaccacatgtataatcgacaccagtatccatttgttgttcttaacatttctgttgattcagaatgcgttgatatcaatgttactccagataaaaggcaaattttgctacaagaggaaaagcttttgttggcagttttaaagacctctttgataggaatgtttgatagtgatgtcaacaagctaaatgtcagtcagcagccactgctggatgttgaaggtaacttaataaaaatgcatgcagcggatttggaaaagcccatggtagaaaagcaggatcaatccccttcattaaggactggagaagaaaaaaaagacgtgtccatttccagactgcgagaggccttttctcttcgtcacacaacagagaacaagcctcacagcccaaagactccagaaccaagaaggagccctctaggacagaaaaggggtatgctgtcttctagcacttcaggtgccatctctgacaaaggcgtcctgagacctcagaaagaggcagtgagttccagtcacggacccagtgaccctacggacagagcggaggtggagaaggactcggggcacggcagcacttccgtggattctgaggggttcagcatcccagacacgggcagtcactgcagcagcgagtatgcggccagctccccaggggacaggggctcgcaggaacatgtggactctcaggagaaagcgcctaaaactgacgactctttttcagatgtggactgccattcaaaccaggaagataccggattaaaaactggaccttcggaccccaggacgtcgatgaactga

SEQ ID NO: 11894 - protein, 406 aa, Artificial Sequence
  derived and/or modified sequence
MDGWRRMPRWGLLLLLWGSCTFGLPTDTTTFKRIFLKRMPSIRESLKERGVDMARLGPEWSQPMKRLTLGNTTSSVILTNYMDTQYYGEIGIGTPPQTFKVVFDTGSSNVWVPSSKCSRLYTACVYHKLFDASDSSSYKHNGTELTLRYSTGTVSGFLSQDIITVGGITVTQMFGEVTEMPALPFMLAEFDGVVGMGFIEQAIGRVTPIFDNIISQGVLKEDVFSFYYNRDSENSQSLGGQIVLGGSDPQHYEGNFHYINLIKTGVWQIQMKGVSVGSSTLLCEDGCLALVDTGASYISGSTSSIEKLMEALGAKKRLFDYVVKCNEGPTLPDISFHLGGKEYTLTSADYVFQESYSSKKLCTLAIHAMDIPPPTGPTWALGATFIRKFYTEFDRRNNRIGFALAR

SEQ ID NO: 11895 - protein, 403 aa, Artificial Sequence
  derived and/or modified sequence
MDGWRRMPRWGLLLLLWGSCTFGLPTDTTTFKRIFLKRMPSIRESLKERGVDMARLGPEWSQPMKRLTLGNTTSSVILTNYMDTQYYGEIGIGTPPQTFKVVFDTGSSNVWVPSSKCSRLYTACVYHKLFDASDSSSYKHNGTELTLRYSTGTVSGFLSQDIITVGGITVTQMFGEVTEMPALPFMLAEFDGVVGMGFIEQAIGRVTPIFDNIISQGVLKEDVFSFYYNRNSQSLGGQIVLGGSDPQHYEGNFHYINLIKTGVWQIQMKGVSVGSSTLLCEDGCLALVDTGASYISGSTSSIEKLMEALGAKKRLFDYVVKCNEGPTLPDISFHLGGKEYTLTSADYVFQESYSSKKLCTLAIHAMDIPPPTGPTWALGATFIRKFYTEFDRRNNRIGFALAR

SEQ ID NO: 11896 - protein, 325 aa, Artificial Sequence
  derived and/or modified sequence
MDTQYYGEIGIGTPPQTFKVVFDTGSSNVWVPSSKCSRLYTACVYHKLFDASDSSSYKHNGTELTLRYSTGTVSGFLSQDIITVGGITVTQMFGEVTEMPALPFMLAEFDGVVGMGFIEQAIGRVTPIFDNIISQGVLKEDVFSFYYNRDGENSQSLGGQIVLGGSDPQHYEGNFHYINLIKTGVWQIQMKGVSVGSSTLLCEDGCLALVDTGASYISGSTSSIEKLMEALGAKKRLFDYVVKCNEGPTLPDISFHLGGKEYTLTSADYVFQESYSSKKLCTLAIHAMDIPPPTGPTWALGATFIRKFYTEFDRRNNRIGFALAR

SEQ ID NO: 11897 - DNA, 1221 bp, Artificial Sequence
  derived and/or modified sequence
atggatggatggcgcagaatgccgaggtggggtctgcttctgttgctttggggatcctgtactttcggtctcccgacagacacaaccaccttcaagaggatctttctgaaaagaatgccaagtattcgagaatccctgaaggaaaggggcgtggacatggcccgccttggacctgagtggagccagcctatgaagcggctcacactgggaaacacaacatcgtccgtcatattgactaactatatggatacacagtactacggggagataggaattgggaccccaccacagacattcaaggtcgtgttcgatactgggtctagtaacgtctgggtaccatcctctaagtgttcaaggttgtatactgcttgcgtgtaccacaagctttttgacgcctctgattcaagttcttataaacacaacgggaccgagctgacactacgctacagtactggaaccgtgagcggcttcctgtcacaagatattataacagtgggcggcattactgtgacccaaatgttcggggaagtgacggagatgccagctctgcccttcatgctcgctgaattcgatggggtagtgggtatgggcttcattgagcaggccattggcagagtcacacctatctttgacaacattattagtcaaggggtgctgaaggaggacgtcttcagtttctattataaccgcgattccgagaactctcagtctctcggcggtcagatagtcttgggcggttcagatccacagcactacgagggcaattttcactacatcaatttaattaaaacgggagtctggcagattcagatgaagggagttagtgtaggttctagtactctgttatgtgaggatggctgcctggcccttgtcgatacaggcgcctcatacatcagcggcagcacaagctcaattgaaaagctgatggaagcattgggcgccaagaaaagattgttcgactacgtcgtcaagtgtaacgaagggcccaccctgccagatattagctttcatttgggaggaaaggaatacaccctcacgtcagcggactatgtgtttcaggaaagttatagctccaaaaagttgtgcacgctggctatccatgccatggatatcccccctcccactggccccacatgggcgcttggcgccacatttatccggaagttttatacagagtttgatagacggaataacagaatcggtttcgctcttgcaaggtag

SEQ ID NO: 11898 - DNA, 1212 bp, Artificial Sequence
  derived and/or modified sequence
atggacgggtggcggcgaatgcctaggtgggggctgctgctcttactgtggggtagttgcacattcggcttacccacggacacaacgactttcaagaggatttttcttaagcgcatgccgtctattagagaatctctaaaagagagaggtgttgatatggctcggcttggtcccgaatggtcccagcctatgaagagattgacacttgggaacaccacaagtagcgtgattctgaccaattacatggatactcagtattatggggaaatcggcatcggcacccccccccagacgttcaaggtcgtgtttgatactggctcttcaaacgtttgggtgccaagtagcaagtgcagccgcttgtacactgcttgcgtgtatcacaagctgttcgacgcgtcggactctagcagctataagcacaatggtacagagctgacccttcggtatagcaccggaacagtgtccggttttctttcacaggatatcatcactgtgggtggtattactgtgacacagatgtttggcgaggtaactgaaatgcccgccctgcccttcatgctggctgagttcgacggagtagtgggtatggggttcatcgagcaggctataggaagggtcacccccatatttgataatattatctcccagggggttctcaaggaggacgttttttccttttactacaacaggaattctcaatctctggggggccagatagtgctgggaggaagcgacccccagcattatgagggtaactttcactatattaatctgattaagactggtgtgtggcagatccagatgaaaggcgtgagtgtgggtagttccacgctgctgtgcgaggatgggtgtttagccctggtcgacacaggtgcatcctacattagtggaagtacctcgtcaatagaaaaattgatggaggccctgggcgcaaaaaaaagacttttcgactatgtcgtcaagtgtaacgaaggtccaactctgccagatattagcttccaccttggtggcaaagaatatacactgacgagcgccgattacgtcttccaggaaagctattctagtaaaaaactgtgcacgttagcaatccacgcgatggacataccacctccaaccgggcccacctgggctctcggagccacttttattcgtaaattctacacagagtttgaccggcgaaataatcggatcgggtttgcgctggccagatag

SEQ ID NO: 11899 - DNA, 978 bp, Artificial Sequence
  derived and/or modified sequence
atggacacccagtattatggggagattggaatcggaacccccccgcagactttcaaagtagtcttcgacaccgggagctctaacgtttgggttcccagttcaaaatgttccaggctctatactgcatgcgtgtaccacaaactctttgacgcttctgactcttccagttataagcacaacgggacagagctcactctgagatattcaacagggaccgtgtctggcttcctgtctcaggacatcatcaccgtggggggaatcaccgtaacccaaatgttcggagaggtgactgaaatgcccgccctgccctttatgttggccgaattcgacggcgtggttggcatgggatttatcgaacaggctatcgggagggtgacccccatatttgataatatcattagccagggcgtcctgaaagaggacgtgttcagcttctactataaccgggacggtgagaatagtcagtcacttggaggacagatcgtgctgggaggcagtgacccccaacactatgagggtaacttccactatataaatctgatcaaaactggtgtatggcagatacagatgaagggggtctccgtgggctcctcgactctgctctgcgaagacgggtgcctcgctctcgtggacaccggagcctcctatatttccggaagcacaagctccatcgaaaagctgatggaggcgttaggtgcgaaaaagcggctgtttgactacgtggtcaaatgcaacgaaggtccgacattgcccgacatcagttttcatctaggggggaaggaatacacgcttactagcgcggattatgtgttccaggagagttacagcagcaagaagctgtgtacactggcgattcacgcgatggacattccgccccccaccggcccgacttgggccttgggggcaactttcattcgcaaattttatacagagttcgataggcggaataataggattggatttgctctggccagatag

SEQ ID NO: 11900 - DNA, 1221 bp, Artificial Sequence
  derived and/or modified sequence
atggatggctggaggaggatgccccgctggggcctgctgctgctgctgtggggcagctgcaccttcggcctgcccacagacaccaccaccttcaagaggatcttcctgaagaggatgcccagcatccgggagagcctgaaggagcggggcgtggacatggcccggctgggccctgagtggagccagcccatgaagaggctgaccctgggcaacaccaccagcagcgtcatcctgaccaactacatggacacccagtactatggagagatcggcatcggcaccccaccccagaccttcaaggtggtgtttgacaccggcagcagcaatgtgtgggtgcccagcagcaagtgcagccggctgtacacagcctgtgtgtaccacaagctgtttgatgccagtgacagcagcagctacaagcacaatggaacagagctgaccctgcgctacagcactggaacagtgtctggcttcctgagccaggacatcatcaccgtgggcggcatcaccgtgacccagatgtttggagaggtgacagagatgcctgccctgcccttcatgctggccgagtttgatggagtggtgggcatgggcttcatcgagcaggccatcggccgggtgacccccatctttgacaacatcatcagccagggcgtgctgaaggaggatgtgttctccttctactacaacagagacagcgagaacagccagagcctgggcggccagatcgtgctgggcggcagtgacccccagcactatgagggcaacttccactacatcaacctgatcaagacaggagtgtggcagatccagatgaagggcgtgtctgtgggcagcagcaccctgctgtgtgaagatggctgcctggccctggtggacacaggagccagctacatcagcggcagcaccagcagcattgagaagctgatggaggccctgggcgccaagaagaggctgtttgattatgtggtgaagtgcaatgaaggccccaccctgcctgacatctccttccacctgggcggcaaggagtacaccctgaccagcgctgactatgtgttccaggagagctacagcagcaagaagctgtgcaccctggccatccacgccatggacatccccccacccaccggccccacctgggccctgggcgccaccttcatcaggaagttctacacagaatttgacagaagaaacaaccgcatcggctttgccctggccaggtag

SEQ ID NO: 11901 - DNA, 1212 bp, Artificial Sequence
  derived and/or modified sequence
atggatggctggaggaggatgccccgctggggcctgctgctgctgctgtggggcagctgcaccttcggcctgcccacagacaccaccaccttcaagaggatcttcctgaagaggatgcccagcatccgggagagcctgaaggagcggggcgtggacatggcccggctgggccctgagtggagccagcccatgaagaggctgaccctgggcaacaccaccagcagcgtcatcctgaccaactacatggacacccagtactatggagagatcggcatcggcaccccaccccagaccttcaaggtggtgtttgacaccggcagcagcaatgtgtgggtgcccagcagcaagtgcagccggctgtacacagcctgtgtgtaccacaagctgtttgatgccagtgacagcagcagctacaagcacaatggaacagagctgaccctgcgctacagcactggaacagtgtctggcttcctgagccaggacatcatcaccgtgggcggcatcaccgtgacccagatgtttggagaggtgacagagatgcctgccctgcccttcatgctggccgagtttgatggagtggtgggcatgggcttcatcgagcaggccatcggccgggtgacccccatctttgacaacatcatcagccagggcgtgctgaaggaggatgtgttctccttctactacaacagaaacagccagagcctgggcggccagatcgtgctgggcggcagtgacccccagcactatgagggcaacttccactacatcaacctgatcaagacaggagtgtggcagatccagatgaagggcgtgtctgtgggcagcagcaccctgctgtgtgaagatggctgcctggccctggtggacaccggggccagctacatcagcggcagcaccagcagcattgagaagctgatggaggccctgggcgccaagaagaggctgtttgattatgtggtgaagtgcaatgaaggccccaccctgcctgacatctccttccacctgggcggcaaggagtacaccctgaccagcgctgactatgtgttccaggagagctacagcagcaagaagctgtgcaccctggccatccacgccatggacatccccccacccaccggccccacctgggccctgggcgccaccttcatcaggaagttctacacagaatttgacagaagaaacaacagaattggatttgccctggccaggtag

SEQ ID NO: 11902 - DNA, 978 bp, Artificial Sequence
  derived and/or modified sequence
atggacacccagtactacggggagattggaattggcaccccaccccagaccttcaaggtggtgtttgacaccggcagcagcaatgtgtgggtgcccagcagcaagtgcagccggctgtacacagcctgtgtgtaccacaagctgtttgatgccagtgacagcagcagctacaagcacaacggcacagagctgaccctgcgctacagcacaggcaccgtgtctggcttcctgagccaggacatcatcaccgtgggcggcatcaccgtgacccagatgtttggagaggtgacagagatgcctgccctgcccttcatgctggccgagtttgatggagtggtgggcatgggcttcatcgagcaggccatcggccgggtgacccccatctttgacaacatcatcagccagggcgtgctgaaggaggatgtgttctccttctactacaacagagatggagagaacagccagagcctgggcggccagatcgtgctgggcggcagtgacccccagcactatgagggcaacttccactacatcaacctgatcaagacaggagtgtggcagatccagatgaagggcgtgtctgtgggcagcagcaccctgctgtgtgaagatggctgcctggccctggtggacaccggggccagctacatcagcggcagcaccagcagcattgagaagctgatggaggccctgggcgccaagaagaggctgtttgattatgtggtgaagtgcaatgaaggccccaccctgcctgacatctccttccacctgggcggcaaggagtacaccctgaccagcgctgactatgtgttccaggagagctacagcagcaagaagctgtgcaccctggccatccacgccatggacatccccccacccaccggccccacctgggccctgggcgccaccttcatcaggaagttctacacagaatttgacagaagaaacaacagaattggatttgccctggccaggtag

SEQ ID NO: 11903 - DNA, 1221 bp, Artificial Sequence
  derived and/or modified sequence
atggacggctggcggcggatgccccggtggggcctgctgctgctgttgtgggggagctgcacttttggactgcctacagataccactactttcaagcgtatcttcctcaagcgaatgcctagcattcgggagagcctgaaggaacgcggggtggacatggctcgtttggggcccgaatggagccaaccgatgaagaggctcacgctggggaatactacttcatcagtcatccttactaactacatggatactcagtactatggtgagatcggcatcggaacacccccccagaccttcaaagtggtttttgacaccggcagttcgaatgtttgggtacccagcagtaagtgcagtagactgtacaccgcatgtgtgtatcacaaactcttcgacgctagtgacagcagttcttataagcacaacgggactgagctgacgctgcggtatagcactggaacagtatcgggtttcctttcccaggacattatcactgtgggcggaattacagtgactcaaatgttcggtgaggtgactgagatgcctgccctgccgttcatgctcgcagagttcgatggggtcgtgggaatggggtttattgagcaggccatcggccgggtgaccccgatcttcgacaacattatctcccagggggtgctgaaggaggacgtgttctccttttactacaatagggatagtgagaactctcagtctttggggggacagattgttctgggtggctccgatccccaacactatgaggggaactttcattacatcaacttaatcaagaccggagtatggcagatccaaatgaaaggagtgtccgtggggtcaagcactctcttgtgcgaagacggctgcctagctttagtcgatacaggtgcctcctatatctctggatcaaccagcagcatcgagaaactgatggaagcgctgggagcaaaaaagcgcttattcgattacgtggtaaaatgcaatgagggcccgaccttgccagatatcagtttccacctgggggggaaggagtacactttgacgtcagcagattacgttttccaggaaagttactcctctaagaaactgtgtacgctcgctatacatgccatggacattcctcctcccacaggaccgacttgggcgctgggcgctacgttcattcggaaattttatacagagtttgatcggcgaaataaccgaatcggcttcgctctggcacgatag

SEQ ID NO: 11904 - DNA, 1212 bp, Artificial Sequence
  derived and/or modified sequence
atggacggctggcggcggatgccccggtggggcctgctgctgctgctttggggctcctgcacgttcgggcttcccaccgacaccactacgtttaagaggattttcctcaaacggatgccttctattagggagtctctcaaggaacgcggtgtggatatggccagactgggacctgagtggtctcagcccatgaaaagactaactctgggcaacactacatcttctgtcatcctgaccaactatatggatacacagtactacggtgaaatcgggattggcacaccacctcagaccttcaaagtcgtctttgatactggctcttccaacgtttgggtaccatccagcaagtgctcccgcctttacactgcatgtgtctaccacaagctattcgacgccagtgacagcagcagttacaagcacaacggcaccgagttgacattaagatactctaccgggacagtgagcgggttcttatcccaggatataattacggttggcgggataactgtgactcagatgtttggggaggtgacagaaatgcctgcactcccattcatgctggccgaattcgacggcgtcgtaggtatgggcttcatcgagcaggccatcggccgtgtgaccccaattttcgacaacataattagccagggggtgttaaaggaagacgtattttctttttattacaataggaatagccagtctctggggggtcagatcgtgctgggtggcagtgatccccagcactacgagggaaatttccactacattaatctcatcaagaccggcgtgtggcagattcagatgaagggcgttagtgtgggatcctctacactcctgtgcgaagatggatgcctggctctggtagacacaggggccagttacatttctggctctacgtcatcaattgagaaactaatggaggcattgggggctaaaaagagattgttcgactatgtggttaaatgcaacgagggccccaccctgcccgatatttctttccatcttggagggaaagagtatacacttacatcggccgactacgttttccaggagtcctacagttcaaagaaattatgtacactagccattcatgccatggacataccaccaccgacaggccctacgtgggctttaggcgctacattcattcgcaaattttacaccgaatttgaccgccgcaacaataggataggatttgctttggcccgctag

SEQ ID NO: 11905 - DNA, 978 bp, Artificial Sequence
  derived and/or modified sequence
atggacacccagtactacggcgagatcggcatcggcacccccccccagactttcaaggtggtgttcgacacaggttcttctaatgtttgggtgccaagctcaaagtgcagccgtctatatacggcatgtgtataccacaagctgttcgacgcttccgacagcagcagctataagcacaatggtaccgagctgactctgcgctattccaccggcactgtttcagggtttttaagccaggatatcattaccgtcggcgggataacggtaacgcagatgtttggcgaggttaccgaaatgcctgctcttccttttatgttagcagagttcgatggggtggttggcatgggtttcattgaacaagctatagggcgggtcacccccatctttgataatattattagtcaaggtgtgttgaaggaagacgtgttctctttctattataaccgcgatggggagaatagccaatcactgggcgggcaaattgtgctgggggggtctgacccacagcactacgagggcaattttcactatattaatttgatcaagacaggagtgtggcagatccaaatgaagggagtgtcagtgggctcatcaaccctcctgtgtgaagatggttgcctggcactggtggacaccggggcctcctatattagcgggtctacctcctccatagaaaagcttatggaagcattgggagctaagaagaggctttttgactacgtggtgaagtgtaatgaaggtccaacattacccgatatatcatttcacttggggggcaaggaatacacactgacatcagccgactatgtgtttcaagaatcctatagctctaagaagctgtgcaccctggcaatccacgcgatggacatacctcctcctactggccctacctgggcactcggggccacctttataaggaagttctacacagagttcgacagacggaataataggatcggattcgcactcgctcgttag

SEQ ID NO: 11906 - DNA, 1221 bp, Artificial Sequence
  derived and/or modified sequence
atggacggatggcgaaggatgccaagatggggcctccttctgctgctttggggatcatgtacctttggcttgcctacagatactacaacatttaagcggatctttctcaagagaatgcccagtatccgcgaatcgctgaaagagaggggagtggacatggcacgcctggggcctgagtggagtcagcccatgaagagacttacgttgggaaacacaacttcttctgtaatacttactaattatatggacacccagtactatggagagatcggcatcggcaccccaccacagaccttcaaggtggtgttcgacacggggagctcaaacgtctgggtgccttcaagtaaatgcagccggttgtacacagcttgcgtctatcacaaattatttgacgcctcagactcttcctcatacaagcacaatggtacagagctgaccttacggtactccaccggaaccgtcagcggctttctctcacaagatatcataacagtaggcggaatcaccgttacgcaaatgtttggcgaggttacagaaatgcctgctctacccttcatgctggcagagtttgacggtgttgtcggaatgggtttcattgaacaggctatcggacgggttactcccatattcgataacattattagtcagggtgtgctgaaggaggatgtgttttccttttattataaccgagatagtgagaattcccagtctttaggaggtcagattgtgctgggcggtagcgacccgcaacattacgaggggaactttcactacatcaatctaatcaaaacaggagtgtggcagattcaaatgaaaggtgtttctgttgggtcctccacccttctgtgcgaggacggctgcctggcactcgttgacaccggagctagttacatttctgggtccacatcaagcatcgaaaaattgatggaggctctgggggcaaagaaacgcctctttgactatgtcgttaagtgtaacgagggtcctacacttcctgatatctcttttcaccttggagggaaggagtacacactaacgtccgccgattacgtgtttcaggagtcttactcttcaaaaaaactgtgtacactggccattcatgctatggacatcccaccaccaacagggccaacctgggcactgggggcaaccttcatccgaaaattttacactgagttcgatagacggaacaataggatcgggttcgctctggccagatag

SEQ ID NO: 11907 - DNA, 1212 bp, Artificial Sequence
  derived and/or modified sequence
atggatggttggcggcgtatgcccagatgggggcttctgttgctcctgtggggatcctgtacatttgggctccctactgacacaaccaccttcaaaaggatcttcctgaagaggatgcctagcatccgggagagtcttaaggagcgaggggtcgacatggcccgactcggcccagaatggagccaaccaatgaagcggcttactctggggaacaccacttcttcagttatcttgaccaactatatggatacccagtactatggggaaatcggcatcggcactcccccacaaacatttaaggtggttttcgatacaggctcctccaatgtgtgggtcccatctagtaagtgttcccggctgtataccgcgtgtgtttatcacaaactctttgatgcatcagactcctcctcctataagcacaatggcacggagctgactctgcgatattcgactggcacggtgagcggttttcttagtcaggatatcattaccgtcgggggtataaccgtaacacagatgtttggcgaggtcaccgagatgcctgctctcccattcatgctggccgagtttgacggagttgtcggcatgggattcatcgaacaggcgatcggcagggtcactcccatcttcgataatataatcagtcaaggggtgctaaaggaggatgttttctccttctactacaaccgtaattcccagagcctcggcggacagatagtcctcggcggatcggatccccagcactacgagggcaactttcattacattaatctgatcaagaccggggtctggcagatacaaatgaagggcgtgagtgttggaagcagcaccctgctgtgcgaagacggatgtttagcgctagtggacacgggcgctagctatatatctgggagcacatccagcatcgagaagctcatggaagccttgggggctaaaaaaagacttttcgattatgttgtcaaatgcaacgaaggaccaaccctgccggacatcagcttccacctgggtgggaaggagtacaccttgacttctgctgactacgttttccaggagtcctactcgtctaagaaattatgtaccctagcgattcacgcgatggacatcccacccccaacaggacccacctgggctctgggcgctaccttcattcgcaaattttacaccgagttcgacagacgtaataatcgcatagggttcgctctcgcgagatag

SEQ ID NO: 11908 - DNA, 978 bp, Artificial Sequence
  derived and/or modified sequence
atggatactcaatactacggcgagatcggcatcgggaccccccctcagacattcaaagttgtgtttgatacgggtagttccaatgtatgggtgccttcctctaaatgttcccggctttatactgcctgtgtttatcataaactctttgacgccagcgattccagttcgtataagcataacgggactgaactcactctgcgctattccacaggaactgtcagtggattcctgtcgcaggatatcatcacagtcgggggtatcactgttacacagatgttcggggaagtcaccgagatgcctgccttgccatttatgctggccgaattcgacggggttgtcggcatggggttcattgaacaagctatcggcagagtgactcccatatttgacaatatcatttcgcagggcgtgctgaaggaggacgtcttctctttctactacaaccgcgacggcgaaaactcacaatctcttggcggacagatcgtcctggggggtagcgatcctcagcactatgaaggaaattttcactacatcaatttgattaaaacaggggtgtggcaaatacaaatgaaaggtgtaagcgtcgggtcaagtacgctcctgtgtgaggacggctgcctggcccttgttgacactggagccagctatatctccggtagcacttcaagtattgagaagctgatggaggccctgggtgcaaagaaacgcctgttcgattacgtggttaagtgtaacgagggtcccactctacctgacatttcattccatttgggtgggaaggagtacacactgaccagtgcagattacgtgtttcaggagtcctatagtagcaagaaactttgcacgctggcaatccatgccatggatattccaccacctaccggacccacttgggccctgggagcaaccttcatcagaaagttttataccgagtttgaccgcaggaacaataggattggcttcgctctagcacggtag

SEQ ID NO: 11909 - DNA, 1447 bp, Artificial Sequence
  derived and/or modified sequence
ctcagagagagccccagactgagggaagcatggatggatggagaaggatgcctcgctggggactgctgctgctgctctggggctcctgtacctttggtctcccgacagacaccaccacctttaaacggatcttcctcaagagaatgccctcaatccgagaaagcctgaaggaacgaggtgtggacatggccaggcttggtcccgagtggagccaacccatgaagaggctgacacttggcaacaccacctcctccgtgatcctcaccaactacatggacacccagtactatggcgagattggcatcggcaccccaccccagaccttcaaagtcgtctttgacactggttcgtccaatgtttgggtgccctcctccaagtgcagccgtctctacactgcctgtgtgtatcacaagctcttcgatgcttcggattcctccagctacaagcacaatggaacagaactcaccctccgctattcaacagggacagtcagtggctttctcagccaggacatcatcaccgtgggtggaatcacggtgacacagatgtttggagaggtcacggagatgcccgccttacccttcatgctggccgagtttgatggggttgtgggcatgggcttcattgaacaggccattggcagggtcacccctatcttcgacaacatcatctcccaaggggtgctaaaagaggacgtcttctctttctactacaacagagattccgagaattcccaatcgctgggaggacagattgtgctgggaggcagcgacccccagcattacgaagggaatttccactatatcaacctcatcaagactggtgtctggcagattcaaatgaagggggtgtctgtggggtcatccaccttgctctgtgaagacggctgcctggcattggtagacaccggtgcatcctacatctcaggttctaccagctccatagagaagctcatggaggccttgggagccaagaagaggctgtttgattatgtcgtgaagtgtaacgagggccctacactccccgacatctctttccacctgggaggcaaagaatacacgctcaccagcgcggactatgtatttcaggaatcctacagtagtaaaaagctgtgcacactggccatccacgccatggatatcccgccacccactggacccacctgggccctgggggccaccttcatccgaaagttctacacagagtttgatcggcgtaacaaccgcattggcttcgccttggcccgctgaggccctctgccacccaggcaggccctgccttcagccctggcccagagctggaacactctctgagatgcccctctgcctgggcttatgccctcagatggagacattggatgtggagctcctgctggatgcgtgccctgacccctgcaccagcccttccctgctttgaggacaaagagaataaagacttcatgttcaca

SEQ ID NO: 11910 - DNA, 1456 bp, Artificial Sequence
  derived and/or modified sequence
agaacctcagtggatctcagagagagccccagactgagggaagcatggatggatggagaaggatgcctcgctggggactgctgctgctgctctggggctcctgtacctttggtctcccgacagacaccaccacctttaaacggatcttcctcaagagaatgccctcaatccgagaaagcctgaaggaacgaggtgtggacatggccaggcttggtcccgagtggagccaacccatgaagaggctgacacttggcaacaccacctcctccgtgatcctcaccaactacatggacacccagtactatggcgagattggcatcggcaccccaccccagaccttcaaagtcgtctttgacactggttcgtccaatgtttgggtgccctcctccaagtgcagccgtctctacactgcctgtgtgtatcacaagctcttcgatgcttcggattcctccagctacaagcacaatggaacagaactcaccctccgctattcaacagggacagtcagtggctttctcagccaggacatcatcaccgtgggtggaatcacggtgacacagatgtttggagaggtcacggagatgcccgccttacccttcatgctggccgagtttgatggggttgtgggcatgggcttcattgaacaggccattggcagggtcacccctatcttcgacaacatcatctcccaaggggtgctaaaagaggacgtcttctctttctactacaacaggaattcccaatcgctgggaggacagattgtgctgggaggcagcgacccccagcattacgaagggaatttccactatatcaacctcatcaagactggtgtctggcagattcaaatgaagggggtgtctgtggggtcatccaccttgctctgtgaagacggctgcctggcattggtagacaccggtgcatcctacatctcaggttctaccagctccatagagaagctcatggaggccttgggagccaagaagaggctgtttgattatgtcgtgaagtgtaacgagggccctacactccccgacatctctttccacctgggaggcaaagaatacacgctcaccagcgcggactatgtatttcaggaatcctacagtagtaaaaagctgtgcacactggccatccacgccatggatatcccgccacccactggacccacctgggccctgggggccaccttcatccgaaagttctacacagagtttgatcggcgtaacaaccgcattggcttcgccttggcccgctgaggccctctgccacccaggcaggccctgccttcagccctggcccagagctggaacactctctgagatgcccctctgcctgggcttatgccctcagatggagacattggatgtggagctcctgctggatgcgtgccctgacccctgcaccagcccttccctgctttgaggacaaagagaataaagacttcatgttcacagcc

SEQ ID NO: 11911 - DNA, 1465 bp, Artificial Sequence
  derived and/or modified sequence
agaacctcagtggatctcagagagagccccagactgagggaagcatggatggatggagaaggatgcctcgctggggactgctgctgctgctctggggctcctgtacctttggtctcccgacagacaccaccacctttaaacggatcttcctcaagagaatgccctcaatccgagaaagcctgaaggaacgaggtgtggacatggccaggcttggtcccgagtggagccaacccatgaagaggctgacacttggcaacaccacctcctccgtgatcctcaccaactacatggacacccagtactatggcgagattggcatcggcaccccaccccagaccttcaaagtcgtctttgacactggttcgtccaatgtttgggtgccctcctccaagtgcagccgtctctacactgcctgtgtgtatcacaagctcttcgatgcttcggattcctccagctacaagcacaatggaacagaactcaccctccgctattcaacagggacagtcagtggctttctcagccaggacatcatcaccgtgggtggaatcacggtgacacagatgtttggagaggtcacggagatgcccgccttacccttcatgctggccgagtttgatggggttgtgggcatgggcttcattgaacaggccattggcagggtcacccctatcttcgacaacatcatctcccaaggggtgctaaaagaggacgtcttctctttctactacaacagagatggggagaattcccaatcgctgggaggacagattgtgctgggaggcagcgacccccagcattacgaagggaatttccactatatcaacctcatcaagactggtgtctggcagattcaaatgaagggggtgtctgtggggtcatccaccttgctctgtgaagacggctgcctggcattggtagacaccggtgcatcctacatctcaggttctaccagctccatagagaagctcatggaggccttgggagccaagaagaggctgtttgattatgtcgtgaagtgtaacgagggccctacactccccgacatctctttccacctgggaggcaaagaatacacgctcaccagcgcggactatgtatttcaggaatcctacagtagtaaaaagctgtgcacactggccatccacgccatggatatcccgccacccactggacccacctgggccctgggggccaccttcatccgaaagttctacacagagtttgatcggcgtaacaaccgcattggcttcgccttggcccgctgaggccctctgccacccaggcaggccctgccttcagccctggcccagagctggaacactctctgagatgcccctctgcctgggcttatgccctcagatggagacattggatgtggagctcctgctggatgcgtgccctgacccctgcaccagcccttccctgctttgaggacaaagagaataaagacttcatgttcacagcc

SEQ ID NO: 11912 - DNA, 1221 bp, Artificial Sequence
  derived and/or modified sequence
atggacggctggagaagaatgcccagatggggcctgctgctgctgctgtggggcagctgcaccttcggcctgcccaccgacaccaccaccttcaagagaatcttcctgaagagaatgcccagcatcagagagagcctgaaggagagaggcgtggacatggccagactgggccccgagtggagccagcccatgaagagactgaccctgggcaacaccaccagcagcgtgatcctgaccaactacatggacacccagtactacggcgagatcggcatcggcacccccccccagaccttcaaggtggtgttcgacaccggcagcagcaacgtgtgggtgcccagcagcaagtgcagcagactgtacaccgcctgcgtgtaccacaagctgttcgacgccagcgacagcagcagctacaagcacaacggcaccgagctgaccctgagatacagcaccggcaccgtgagcggcttcctgagccaggacatcatcaccgtgggcggcatcaccgtgacccagatgttcggcgaggtgaccgagatgcccgccctgcccttcatgctggccgagttcgacggcgtggtgggcatgggcttcatcgagcaggccatcggcagagtgacccccatcttcgacaacatcatcagccagggcgtgctgaaggaggacgtgttcagcttctactacaacagagacagcgagaacagccagagcctgggcggccagatcgtgctgggcggcagcgacccccagcactacgagggcaacttccactacatcaacctgatcaagaccggcgtgtggcagatccagatgaagggcgtgagcgtgggcagcagcaccctgctgtgcgaggacggctgcctggccctggtggacaccggcgccagctacatcagcggcagcaccagcagcatcgagaagctgatggaggccctgggcgccaagaagagactgttcgactacgtggtgaagtgcaacgagggccccaccctgcccgacatcagcttccacctgggcggcaaggagtacaccctgaccagcgccgactacgtgttccaggagagctacagcagcaagaagctgtgcaccctggccatccacgccatggacatccccccccccaccggccccacctgggccctgggcgccaccttcatcagaaagttctacaccgagttcgacagaagaaacaacagaatcggcttcgccctggccagatag

SEQ ID NO: 11913 - DNA, 1212 bp, Artificial Sequence
  derived and/or modified sequence
atggacggctggagaagaatgcccagatggggcctgctgctgctgctgtggggcagctgcaccttcggcctgcccaccgacaccaccaccttcaagagaatcttcctgaagagaatgcccagcatcagagagagcctgaaggagagaggcgtggacatggccagactgggccccgagtggagccagcccatgaagagactgaccctgggcaacaccaccagcagcgtgatcctgaccaactacatggacacccagtactacggcgagatcggcatcggcacccccccccagaccttcaaggtggtgttcgacaccggcagcagcaacgtgtgggtgcccagcagcaagtgcagcagactgtacaccgcctgcgtgtaccacaagctgttcgacgccagcgacagcagcagctacaagcacaacggcaccgagctgaccctgagatacagcaccggcaccgtgagcggcttcctgagccaggacatcatcaccgtgggcggcatcaccgtgacccagatgttcggcgaggtgaccgagatgcccgccctgcccttcatgctggccgagttcgacggcgtggtgggcatgggcttcatcgagcaggccatcggcagagtgacccccatcttcgacaacatcatcagccagggcgtgctgaaggaggacgtgttcagcttctactacaacagaaacagccagagcctgggcggccagatcgtgctgggcggcagcgacccccagcactacgagggcaacttccactacatcaacctgatcaagaccggcgtgtggcagatccagatgaagggcgtgagcgtgggcagcagcaccctgctgtgcgaggacggctgcctggccctggtggacaccggcgccagctacatcagcggcagcaccagcagcatcgagaagctgatggaggccctgggcgccaagaagagactgttcgactacgtggtgaagtgcaacgagggccccaccctgcccgacatcagcttccacctgggcggcaaggagtacaccctgaccagcgccgactacgtgttccaggagagctacagcagcaagaagctgtgcaccctggccatccacgccatggacatccccccccccaccggccccacctgggccctgggcgccaccttcatcagaaagttctacaccgagttcgacagaagaaacaacagaatcggcttcgccctggccagatag

SEQ ID NO: 11914 - DNA, 978 bp, Artificial Sequence
  derived and/or modified sequence
atggacacccagtactacggcgagatcggcatcggcacccccccccagaccttcaaggtggtgttcgacaccggcagcagcaacgtgtgggtgcccagcagcaagtgcagcagactgtacaccgcctgcgtgtaccacaagctgttcgacgccagcgacagcagcagctacaagcacaacggcaccgagctgaccctgagatacagcaccggcaccgtgagcggcttcctgagccaggacatcatcaccgtgggcggcatcaccgtgacccagatgttcggcgaggtgaccgagatgcccgccctgcccttcatgctggccgagttcgacggcgtggtgggcatgggcttcatcgagcaggccatcggcagagtgacccccatcttcgacaacatcatcagccagggcgtgctgaaggaggacgtgttcagcttctactacaacagagacggcgagaacagccagagcctgggcggccagatcgtgctgggcggcagcgacccccagcactacgagggcaacttccactacatcaacctgatcaagaccggcgtgtggcagatccagatgaagggcgtgagcgtgggcagcagcaccctgctgtgcgaggacggctgcctggccctggtggacaccggcgccagctacatcagcggcagcaccagcagcatcgagaagctgatggaggccctgggcgccaagaagagactgttcgactacgtggtgaagtgcaacgagggccccaccctgcccgacatcagcttccacctgggcggcaaggagtacaccctgaccagcgccgactacgtgttccaggagagctacagcagcaagaagctgtgcaccctggccatccacgccatggacatccccccccccaccggccccacctgggccctgggcgccaccttcatcagaaagttctacaccgagttcgacagaagaaacaacagaatcggcttcgccctggccagatag

SEQ ID NO: 11915 - protein, 272 aa, Artificial Sequence
  derived and/or modified sequence
MEAQGVAEGAGPGAASGVPHPAALAPAAAPTLAPASVAAAASQFTLLVMQPCAGQDEAAAPGGSVGAGKPVRYLCEGAGDGEEEAGEDEADLLDTSDPPGGGESAASLEDLEDEETHSGGEGSSGGARRRGSGGGSMSKTCTYEGCSETTSQVAKQRKPWMCKKHRNKMYKDKYKKKKSDQALNCGGTASTGSAGNVKLEESADNILSIVKQRTGSFGDRPARPTLLEQVLNQKRLSLLRSPEVVQFLQKQQQLLNQQVLEQRQQQFPGTSM

SEQ ID NO: 11916 - DNA, 417 bp, Artificial Sequence
  derived and/or modified sequence
atggagcgcttcctgaacagcaaggcccggcggctgggcagctgcagccacccagccttctacctgctgtgtgtgcctgatgaggacaccagctgcagcaccatctacctgcccctgaagagaagagctgaccctgaccagctgttcagtgacctgctgggcggcacccagaggctgtggagcaacagatttggaaatgaggagagcttccctggccgggtgcgggccctggtggacaccttctgctggatcgcccgggccccacccctgggcaaccccctgcggctggaggagcgcatcgcctggaggatccagaggctgaagagcggccagacagccctgattgagaagaagaagcagaagattgaggaggatgtgcgccaccagtgccagcagaccacctgtgaccgctgctag

SEQ ID NO: 11917 - DNA, 819 bp, Artificial Sequence
  derived and/or modified sequence
atggaagcccagggcgttgctgagggtgccggtccaggggcggcaagcggagtgccccatcccgccgctttggcccctgccgcggcccctaccctcgccccggctagtgtcgccgccgctgcctcccagttcactctcctggtgatgcagccgtgtgccggccaggacgaggcagcagcgcctggagggagcgtgggggcaggcaaacctgtaaggtatctgtgtgaaggagccggcgatggcgaagaagaagctggcgaggatgaagcggatttgctggatacgtccgaccctccagggggtggcgaatctgccgcctctcttgaagatttggaggacgaggagactcactctgggggcgagggatccagcggtggggcacggaggcgcggatcgggaggggggtcaatgtccaagacgtgtacctacgaagggtgcagcgagaccactagtcaggttgctaagcaacgcaaaccatggatgtgcaagaagcaccgtaacaaaatgtacaaggacaagtataaaaagaagaaatccgatcaggctctaaattgcggcggcactgccagcaccgggtccgcggggaatgtcaagctcgaggaaagcgcagacaacatcttatccatcgtgaagcagaggacagggagcttcggagaccggcctgccaggcccaccctcctcgagcaagtcttgaaccaaaagaggctctctctgcttcgatcccctgaggtggtccagttcctgcagaagcagcagcagctcttgaaccagcaagtactagagcagcggcagcagcagtttcctggaacatcaatgtag

SEQ ID NO: 11918 - DNA, 819 bp, Artificial Sequence
  derived and/or modified sequence
atggaggcccagggcgtggccgagggcgccggccctggggccgccagcggcgtgccccaccctgctgccctggccccagctgctgcccccaccctggccccagcctctgtggccgccgccgccagccagttcaccctgctggtgatgcagccctgtgccggccaggatgaggccgccgcccctgggggctctgtgggcgccggcaagcctgtgcgctacctgtgtgagggcgctggagatggagaggaggaggccggagaagatgaggccgacctgctggacaccagtgaccccccaggcggcggggagagcgctgccagcctggaggacctggaggatgaggagacccacagcggcggggagggcagcagcggcggggccaggagaagaggcagcggcggcggctccatgagcaagacctgcacctatgagggctgcagcgagaccaccagccaggtggccaagcagaggaagccctggatgtgcaagaagcacaggaacaagatgtacaaggacaagtacaagaagaagaagagtgaccaggccctgaactgtggcggcacagccagcactggatctgctggaaatgtgaagctggaggagagcgctgacaacatcctgagcatcgtgaagcagaggacaggcagctttggagacaggcctgcccggcccaccctgctggagcaggtgctgaaccagaagaggctgagcctgctgcggagccctgaggtggtgcagttcctgcagaagcagcagcagctgctgaaccagcaggtgctggagcagaggcagcagcagtttcctggcacctccatgtag

SEQ ID NO: 11919 - DNA, 819 bp, Artificial Sequence
  derived and/or modified sequence
atggaggcccagggcgtggccgagggcgccggccccggcgccgccagcggggtgccgcacccggccgcacttgcgcccgccgccgcccctactttggctcctgccagtgtcgccgccgccgcctcccagtttaccttgctggtcatgcagccatgcgccggtcaggatgaagccgcggctccaggcggtagcgtaggcgctggcaagcctgttcgctacctctgcgagggcgcaggagatggcgaagaggaggccggcgaagatgaggcagacctcctggatacatcggatcctcccgggggtggcgagtcagccgctagtctggaggacctggaggacgaagaaacccatagcggaggggaaggctcatccggaggagcacgtaggagaggaagtggtgggggctctatgtctaaaacatgcacctacgagggctgttctgagacgacatctcaagttgctaaacagcgtaagccttggatgtgcaaaaaacatcggaataagatgtataaggacaaatataagaagaagaaaagtgatcaggccctcaattgcgggggaacggcctctacaggctctgccggaaatgtgaaattagaagagtctgcagataatattctgagtatagtgaagcagaggaccgggtctttcggggatagacccgcccgacccactctgttggagcaggtccttaaccagaaacggctcagtctgctgaggtccccggaagttgtgcagtttctccagaagcagcaacagttgttgaaccagcaggtccttgagcagagacaacaacagttccccggcaccagcatgtag

SEQ ID NO: 11920 - DNA, 819 bp, Artificial Sequence
  derived and/or modified sequence
atggaggctcagggcgtggctgaaggggctggaccgggtgctgcaagtggcgtacctcatcccgcagcattagcaccggcagctgcaccaactcttgcccctgcgtctgtggctgcagccgcttcccagtttactctcctggtcatgcagccatgcgcaggacaggatgaggcagctgctcccggaggcagcgtgggagctggcaagcctgtgcgctacctgtgcgagggcgcaggtgacggtgaggaagaggctggggaggatgaagcggatctgttagataccagcgatcctcccggtggcggagagtctgcggcatctttagaggatctcgaggacgaggagactcattcagggggtgaaggatcttccggcggtgcgcgacgcaggggctccggagggggatccatgagtaagacttgcacatatgagggctgttctgaaaccactagccaagtggctaaacaacgaaaaccatggatgtgcaaaaagcatcggaataagatgtataaggacaagtataagaagaagaaatccgaccaagcactcaattgcggcggaacagcctcgacagggtcagccggtaatgtcaagctcgaggaatccgccgataatatcctcagcatcgtgaaacaacgcactggctcattcggcgatcgtcctgctagacctaccctgctggaacaagtacttaatcagaagaggctatccctgctgaggagccccgaggttgttcaatttctccagaagcagcagcagctgctgaaccagcaggtactggagcaacgccaacagcagtttcctggcacttctatgtag

SEQ ID NO: 11921 - DNA, 2304 bp, Artificial Sequence
  derived and/or modified sequence
gcgcagtcggggcgccttcccggtataggcgccttttaccccagcgtgtcctgagtctttggttcgcgaagtgccgttaggccaagcaggtgctaaaagcccggggtcgtggaccccggccaggtcttagcagcatggaggcgcagggtgtagcggagggcgcggggccgggcgccgccagcggcgtgccccaccccgcggccctagccccggctgcggctcccaccttggcgccagcctcggtggcggccgcggcctctcaattcaccctgctagtgatgcaaccctgtgctgggcaggacgaggctgcggcccccgggggcagcgttggggcgggcaagcccgttaggtacctgtgcgaaggggccggggatggcgaagaggaggctggggaggacgaggcggacctgttagacacttcggaccctccggggggaggcgagagcgcggctagtttggaggatctagaggacgaggagactcactcggggggcgagggcagcagcgggggcgcccggaggcggggcagcggtgggggcagcatgagcaagacctgcacctacgaaggctgcagcgagaccacgagccaggtggccaagcagcgcaaaccgtggatgtgcaagaaacaccgcaacaagatgtacaaggacaagtataaaaagaagaagagcgaccaggccctgaactgcggtgggactgcctcgactggcagcgcgggaaacgtcaaactcgaggaaagtgcagataacatactctccattgttaaacaaagaacaggatcttttggggatcgtcctgcaagacctactcttttagaacaagtgttaaatcaaaaaagactgtcgttactaagaagtccagaagtagtgcaatttttacagaaacagcaacagctattaaatcagcaagttttggagcaaagacaacagcagtttccaggaacatcaatgtgagggaacttaccaagaacatctacatggttttttatcttattgtaatagatgagcatatttttttaccagacataaatggggtaataatctatgcctgtagaacataaacattttcctgtaaatgtatgtgtgcatttggggataagtaagtattgcactttgtgcatctaatctttcagattactgtgagtttgaagaagtcagcttatctttccaaataacatttaattataatgttttttaaaaaatatattcctcttcagtcattgttactgaaggtaatgaagcagttactttctgtggaagtcataaagttaatagatattaatcttgactcatctagctcagtggttctcatcaagggtcaatttgattgtcatagtgaccttgaaaaccactggcttttagtgagtggccaggaatgctaaatgttctgcagtgtcaggggtagtcccacatactaaagattgtctcacccgcagtgccaataacactcctaagaaatgttgatggctattttgtggtgctaacatgtagttggggcacctataattgggttctcttaataacctttctttgcagttaagactgaagctgtcaaagaggtaagcacattttatatagacgtaaggaaagtgattattgtttaatatctgtgaatttaggatgtgcatctcttttcagaggtgtgttagtaaaacctgacggattaactaagcacactgggatgtgtctcctacagttggcttctctctttgatgttacctgttagtgctgatctcttaaagcagacatttcttgtttgttgaatttgtgaacagtatagatctcagcccaccaatgccaagacaaaattatttttcttatacttattttttattaaacaaaatgaaaaagatccttttcaaaaaggtgatcctgaaaataaaactaacactccagtattttgtcattgtttttcgcaattgagctatctgaaaactgttattcctaagtaatgttcaaaaatgataagtaatctggatacctttttcttatactttctcctaggaaaactttaaaactttaaaaaggcaaacctaccaataggaataacaaattaaatgtcaagagagtatatccaatattaggatataaatgtatgtgtctcaagtttaactctacaaaaatttgttacttgttttttaaactctatatataaagttcgacttaatcatggctgttctaagaagtacttatggagagcaagaacgtttttgttcatttcttaatgtgtgtgtttttacttgcatatctgttcaaaacacttttaacaaaattaattcattaaagtccagttgttgacctttga

SEQ ID NO: 11922 - DNA, 819 bp, Artificial Sequence
  derived and/or modified sequence
atggaggcccagggcgtggccgagggcgccggccccggcgccgccagcggcgtgccccaccccgccgccctggcccccgccgccgcccccaccctggcccccgccagcgtggccgccgccgccagccagttcaccctgctggtgatgcagccctgcgccggccaggacgaggccgccgcccccggcggcagcgtgggcgccggcaagcccgtgagatacctgtgcgagggcgccggcgacggcgaggaggaggccggcgaggacgaggccgacctgctggacaccagcgacccccccggcggcggcgagagcgccgccagcctggaggacctggaggacgaggagacccacagcggcggcgagggcagcagcggcggcgccagaagaagaggcagcggcggcggcagcatgagcaagacctgcacctacgagggctgcagcgagaccaccagccaggtggccaagcagagaaagccctggatgtgcaagaagcacagaaacaagatgtacaaggacaagtacaagaagaagaagagcgaccaggccctgaactgcggcggcaccgccagcaccggcagcgccggcaacgtgaagctggaggagagcgccgacaacatcctgagcatcgtgaagcagagaaccggcagcttcggcgacagacccgccagacccaccctgctggagcaggtgctgaaccagaagagactgagcctgctgagaagccccgaggtggtgcagttcctgcagaagcagcagcagctgctgaaccagcaggtgctggagcagagacagcagcagttccccggcaccagcatgtag

SEQ ID NO: 11923 - protein, 348 aa, Artificial Sequence [sequence omitted]

SEQ ID NO: 11924 - DNA, 1044 bp, Artificial Sequence
  derived and/or modified sequence
atgaatggcacagaaggaccaaacttttacgttccattctctaatgcaacgggagtagtgagatccccattcgaatacccacaatactatcttgccgagccgtggcagttttctatgctcgccgcatacatgtttttactgattgtgttgggattcccaattaatttccttacattgtacgtgactgtgcagcacaaaaaacttagaacgccgctcaattatatcttgctgaatctggctgtggcagatttgttcatggttctgggaggttttacaagtaccctctacacttctttgcatgggtacttcgtatttggtcctacgggatgcaatctagagggatttttcgctacacttgggggtgaaatagcattatggtccctcgtagtgctggctatcgaacgatacgttgtggtgtgcaaacccatgtccaatttcaggtttggggaaaaccatgctattatgggagtagctttcacatgggttatggccctagcctgcgcagcccctcccttagcaggttggtcacgttacataccggaaggtttgcaatgttcatgtggaattgattactacacactcaaaccagaggtcaacaacgagagttttgtaatttacatgtttgtggtgcactttactataccgatgatcattattttcttttgctatgggcaattggttttcactgtaaaggaagctgcagcccaacaacaagagtcggctaccacgcaaaaagctgaaaaagaagtcactagaatggtaataattatggtaatcgcttttcttatttgctgggtcccgtacgcatcagtcgctttctatatcttcactcatcaaggttccaatttcggtcctatctttatgacaataccagccttttttgcgaagtcagctgccatctacaatcctgttatttacatcatgatgaataagcagtttcgaaactgcatgcttacgaccatatgctgtggaaaaaacccacttggagacgatgaagcgagcgctacagtgtctaagacagagacgagccaggttgctcccgct

SEQ ID NO: 11925 - DNA, 1044 bp, Artificial Sequence
  derived and/or modified sequence
atgaatggaaccgaaggaccaaacttttacgttcctttttcgaatgcgacgggggtggtgaggtccccatttgaatatccacagtactacctggcagagccttggcagttttcaatgcttgcagcatacatgtttcttcttatagtcctgggattccctattaactttcttaccctgtacgtcactgtccagcataagaagctgagaacccccctgaattacattcttctgaatctggcagttgcagatcttttcatggtcttgggagggtttacctcaacgctctacacctcgcttcatggatacttcgtgtttggaccaaccggatgtaatcttgagggtttctttgctacccttggaggcgaaattgctctgtggtccctcgttgtgcttgcaattgaaaggtacgtggtggtgtgcaaacccatgtccaatttccgattcggagaaaaccacgcgattatgggggtcgcgtttacctgggtgatggcgctggcgtgtgcggcacctccactcgcaggatggagcaggtacatcccagaaggactgcaatgttcctgcggtatcgactattacaccctgaagcccgaggtgaacaacgaatcatttgtgatttacatgtttgtcgtgcactttaccattcccatgatcatcatattcttctgttacggtcagctggtctttaccgtgaaggaagcagcagcccaacaacaagaaagcgctactactcaaaaggcagaaaaggaagtcactcggatggtcatcattatggtgatcgcctttctgatttgttgggtgccatatgcaagtgttgcgttctacattttcactcaccagggttcgaactttgggccgatcttcatgaccattcctgccttctttgcaaagtcagcagcaatttacaaccccgtcatctacattatgatgaacaagcagtttcgcaattgtatgcttactacgatttgctgtggcaagaaccctttgggagatgatgaggcatcggcaaccgtcagcaagactgagacttcccaggtcgcacctgcg

SEQ ID NO: 11926 - DNA, 1044 bp, Artificial Sequence
  derived and/or modified sequence
atgaacggaactgagggacctaacttctacgtcccattcagcaacgcaacgggcgtggtgcggtcaccctttgagtacccgcagtattacctggctgaaccatggcagttctctatgctggcggcatacatgttcttacttatcgtgttgggattcccaattaattttctgactttgtacgttacagtgcaacacaagaagctgcggacacccctgaattatatccttctaaatctggcagtggcggacttgttcatggttctgggaggattcacaagcactttgtataccagcctccacggttacttcgtgtttggtccgaccgggtgcaaccttgagggctttttcgctacactgggaggagagatcgccctatggtccttagtggtactcgccattgagcggtacgtagttgtgtgcaaaccaatgtccaactttcgatttggcgaaaatcacgctattatgggagtcgccttcacatgggtaatggcccttgcatgtgctgcacctccattagcggggtggagcaggtatatccctgaggggctgcagtgtagctgtggaatagattactacaccctgaaaccagaagtcaataatgagtcattcgttatttatatgtttgtcgtgcactttaccatcccaatgattattatttttttttgttacggacaactggtgtttaccgtcaaggaggccgctgcgcaacagcaggaatccgctaccactcagaaggcggagaaagaggtcacaagaatggtgatcatcatggtcatcgccttcctgatatgctgggtaccctacgccagcgtcgccttttatattttcacacaccagggttctaactttgggcctatatttatgacaatccctgcattcttcgcaaagtccgccgccatttataatccagtgatttacattatgatgaacaagcagtttaggaactgcatgctgaccaccatttgttgcgggaagaatcctctgggtgacgacgaagcatccgccacagtgtcaaagacagagacctcgcaggtagccccagct

SEQ ID NO: 11927 - DNA, 1044 bp, Artificial Sequence
  derived and/or modified sequence
atgaatggaacagagggacctaacttctacgtccccttctctaacgctacaggcgtagttcggtctccctttgagtacccacaatactacttggcggagccttggcagttctcaatgttggcagcctatatgttcctgttgattgtcctgggattccctataaatttcctgacgctctacgtcacagtccagcataagaaactccggacccccctgaactatattttgctgaacttggcagtagccgatctatttatggtcctgggtggattcacgtctactctgtacacatctttacatggctacttcgtgttcggtccgaccgggtgtaacctagagggtttcttcgctacactgggcggcgagatagctttgtggtccctcgtggtcctcgctatcgagaggtatgtcgtggtgtgtaagccgatgtccaattttagattcggggaaaaccacgctattatgggggtcgcattcacatgggtaatggcccttgcgtgcgccgccccccccctggcgggctggagccggtacattcccgaggggctacagtgttcgtgcggtatagactactacactctcaaacccgaggtgaacaacgagagctttgtgatctacatgttcgtggtgcactttactattccgatgatcattattttcttttgttacggtcaactagtgtttacagtcaaggaagcggctgctcagcaacaggagtccgccaccacacagaaagctgaaaaagaggtgacaaggatggtcattatcatggtcattgcctttctgatctgctgggtgccttacgcgtcggttgccttctatattttcacccaccaaggctccaatttcgggcccatctttatgacaatcccagccttctttgctaagtccgcggccatttacaatccagtgatatacattatgatgaataaacaattccgaaactgcatgttaaccaccatttgttgtggaaaaaatcctctgggggatgacgaggcatccgctacagtatccaagacggagacttcccaagtggcccctgca

SEQ ID NO: 11928 - DNA, 1044 bp, Artificial Sequence
  derived and/or modified sequence
atgaacggcacggaggggcccaacttttatgttcccttttcaaacgccacaggcgtagtgcggtcaccttttgagtatccacaatactatttggccgagccctggcagttctcgatgcttgccgcttacatgttcttgctaatcgtcctgggattcccaatcaacttcctgactctgtacgtaacagtccagcacaagaaactcagaacccccctaaactacattctcctgaatcttgccgtggccgacctatttatggtgctgggcgggtttacatccaccctgtacacctctctgcatgggtattttgtgttcgggcccactggctgtaacctggaggggttcttcgctactctgggcggcgaaatcgccctgtggagtctggtggtccttgctatcgagcgctacgtggtcgtctgtaaacccatgagtaacttccggttcggcgaaaaccacgccataatgggggtagcatttacatgggtgatggctttggcatgtgccgctcctccgctcgcagggtggtccaggtatatccccgaaggacttcagtgttcatgtgggatcgattactatactctgaagcccgaagtcaacaacgaatcctttgttatttacatgttcgtggtccactttactatccctatgatcattatctttttctgctacggtcagctggttttcacagtcaaggaggccgccgcgcaacagcaggagtctgccacaactcaaaaggccgagaaagaggtcacccgtatggtcattatcatggtaatcgctttcctgatttgttgggtgccatacgccagcgttgcattttatattttcacacaccaaggcagtaatttcggcccaatatttatgacaatccctgctttcttcgccaaaagtgccgcaatttataacccagttatctacatcatgatgaataagcagttccggaactgtatgctcaccaccatatgttgtggcaaaaatcccttgggagatgacgaagccagcgctactgtgagcaagaccgagacttcccaggttgccccagcc

SEQ ID NO: 11929 - DNA, 1044 bp, Artificial Sequence
  derived and/or modified sequence
atgaacggaacagaggggcccaacttttatgtcccttttagcaatgccactggtgtcgtgaggagcccttttgagtatccacaatactacctcgcagaaccatggcagttcagtatgctggcggcctatatgttcctgctgatcgtcttggggttccctatcaactttcttacgctctacgttaccgtgcagcacaaaaagctacggacacctttaaattacattctgttaaatttagccgtggcagacttgtttatggtactagggggctttacttccactctgtatactagccttcatgggtattttgtattcggccccaccggctgtaacctggaaggcttcttcgctacgctgggaggggagatcgccctatggtcactggtagtactggctattgagagatacgtggtggtgtgtaaacctatgagcaacttcagatttggcgaaaatcatgccattatgggcgtagcgttcacatgggtaatggcacttgcgtgcgctgcccccccgctggccggatggagtcgttatatccccgaagggcttcagtgttcctgcggcatcgactattacaccttgaagcccgaggttaataatgaaagcttcgtcatctacatgttcgtggtgcattttaccattccgatgatcattatctttttttgttacgggcagctcgtgttcacagttaaggaggccgcagcacagcaacaagaatccgcaaccactcagaaggcggagaaggaggtaactcggatggtcattatcatggttattgcatttctgatatgctgggttccatatgcaagcgtcgctttctatattttcactcaccaagggtcaaacttcggtcccatctttatgactatccccgcgttttttgcgaagagcgccgctatttacaacccagttatctacatcatgatgaataaacagtttcgtaactgcatgttgaccactatttgttgcgggaaaaaccccctgggcgacgatgaggcgtccgccaccgtgtcaaaaaccgaaacttcccaagtcgcccccgcc

SEQ ID NO: 11930 - DNA, 1044 bp, Artificial Sequence
  derived and/or modified sequence
atgaacggtactgaaggtcctaatttctacgtccctttctcgaacgccactggggtggtgcgctcaccgttcgaataccctcagtattacctggctgagccatggcagttcagcatgcttgcagcgtacatgttcctcctgatcgtgcttggattccccatcaactttctcaccctgtacgtcaccgtgcagcacaagaagctgagaaccccgctgaactacatcctgctgaatcttgcggtggccgacctcttcatggtgctgggaggcttcacctccacgctgtacacttccctgcatggctacttcgttttcggaccaaccgggtgcaatctggaaggattcttcgcaaccctgggaggcgagatcgcactgtggagcctggtggtgttggccatcgagcgctacgtggtggtttgcaagccaatgagcaacttccggtttggggagaaccatgcaatcatgggagtggcatttacctgggtgatggcccttgcgtgcgcggctccgccgctcgcgggttggtcgaggtacatcccagaaggactgcaatgcagctgcggaatcgattactacactctcaagcctgaagtgaacaacgagtccttcgtaatctacatgttcgtggtccacttcaccatcccaatgattatcatctttttctgctatggtcagctggtgtttactgtcaaggaggcggctgcccaacaacaagaatcggccactactcagaaggctgagaaggaagtgacccggatggtgatcatcatggtcattgcctttcttatctgctgggtcccgtacgcctcggtcgccttctacatcttcactcatcaggggtccaactttggcccgatcttcatgaccataccggcgttcttcgcgaagtccgcggctatctacaatcccgtgatctacatcatgatgaataaacagtttcgcaattgcatgctgaccaccatctgttgcggtaagaaccctctcggcgatgacgaggcctcagcaaccgtgagcaagactgaaactagccaggtggcaccagca

SEQ ID NO: 11931 - DNA, 1044 bp, Artificial Sequence
  derived and/or modified sequence
atgaatgggacagaaggcccaaacttttatgtccctttcagtaatgctacaggcgtggttaggagcccatttgaatacccgcagtactacctggccgaaccttggcagtttagcatgctcgcagcctatatgttcctgttgattgtgctcgggtttcctattaatttccttaccctgtacgtcactgtgcaacataaaaaattacgaacaccgctgaattatatcctgctaaatcttgccgtggctgacctgttcatggtgttaggtggattcaccagcaccctgtacacgtctcttcatgggtactttgtgtttggccctaccggctgtaatttagagggattttttgcaacactgggaggagaaatcgccttgtggtcccttgtggtgttggcgatagaacgttacgtcgtcgtttgcaaaccaatgtcaaattttcgctttggagagaaccatgccatcatgggagtcgctttcacctgggtcatggcactggcgtgcgcggctccaccactcgctggatggtccaggtatatcccagaaggcctacagtgtagttgcggaatcgattattacaccctgaagcctgaagtgaacaatgagtcattcgttatctacatgttcgtcgtccattttacgatccccatgattataatcttcttctgctacggacagcttgtatttaccgtaaaagaagccgcagcccagcaacaagagagcgcgaccacacagaaagccgaaaaggaggtcacacgtatggtgattataatggtgatcgccttccttatctgctgggtcccttacgctagcgttgcattctacatctttacccatcaggggagcaactttggacctatctttatgaccattccagctttctttgcgaagtccgctgctatctacaacccggtgatctacataatgatgaataagcagtttaggaactgtatgctgactacaatctgttgcggtaaaaatcccttgggagatgatgaagcgagcgccaccgttagcaaaacagagacttctcaggtcgcccccgcc

SEQ ID NO: 11932 - DNA, 1044 bp, Artificial Sequence
  derived and/or modified sequence
atgaacggtactgaaggacccaacttttacgtccccttttcgaatgcaaccggagtggtgcgttcgccttttgaataccctcaatactacctcgcagaaccttggcaattcagcatgcttgcggcctacatgtttcttctgattgtgctgggatttcctataaactttctcactctctacgtgactgttcaacacaaaaagctgcgaactccacttaactacatccttctcaacctggcggtggctgaccttttcatggtgctggggggcttcacctccaccctttacacctcactgcacggttactttgtctttggaccgactggatgtaaccttgaaggtttctttgcaactctgggaggcgaaattgcactgtggagccttgtggtgcttgcaatcgagagatacgtggtggtgtgcaagccaatgagcaattttcgttttggtgagaatcatgctataatgggtgtggcctttacttgggtgatggcccttgcatgcgcagcaccaccacttgctggttggtcacgatacattccggaggggctgcagtgttcgtgtggtattgactactacaccctgaagcctgaggtgaacaatgaatcctttgtcatttacatgttcgtcgtgcactttacgatcccaatgatcattatcttcttctgttacggtcaattggtgtttaccgtgaaagaagctgccgcccagcaacaagagtctgccactactcaaaaggccgaaaaagaagtgaccaggatggtgatcattatggtaatcgcctttcttatttgttgggtcccctatgcatcagtggccttctacatctttacccatcagggatcgaacttcggccccattttcatgaccataccggcatttttcgccaagtcagcagcgatttacaatcctgtgatctatatcatgatgaataagcaattccggaactgtatgctgactactatatgttgcggaaagaaccccctgggtgacgatgaggcgtccgcgaccgtgagcaaaaccgagactagtcaagtggccccagca

SEQ ID NO: 11933 - DNA, 1044 bp, Artificial Sequence
  derived and/or modified sequence
atgaatggcaccgaaggcccgaatttttacgtgccctttagcaacgcaacaggcgtggtgcgctccccctttgaatatcctcagtactaccttgcagagccatggcagttttctatgctggccgcctatatgtttttgcttatcgtcctgggattcccaattaatttcctgaccttgtacgttacagtgcagcacaagaagttgaggaccccactgaactacatactgctcaaccttgctgtagcggatttgtttatggtgctcggaggatttacatccactctctacacatctctacatgggtactttgtgttcggccctacagggtgtaacctagaaggcttcttcgctaccctcggaggcgaaattgccctctggagcctagtcgtcctggcaatcgaaagatacgtggtggtgtgcaaaccgatgagcaacttccgtttcggcgagaaccacgccatcatgggagttgccttcacatgggttatggctctggcatgtgcagcccccccgctagccggctggtctagatacatacctgagggactgcaatgttcttgtgggatcgactattatacacttaaaccagaggtaaacaacgaatctttcgtcatctatatgttcgtagtgcacttcacaataccaatgataataatctttttctgctatgggcaactggtgttcaccgtaaaggaggcagcggcacagcagcaagaatcggctaccactcagaaggccgagaaggaggtaacccggatggtgattattatggttatcgccttcctgatctgctgggttccctacgcttccgtggccttctacatcttcacacaccagggatccaattttgggcctatcttcatgaccatccccgcgttttttgccaagtctgctgccatttataatcctgtcatctatataatgatgaataaacagtttcggaattgtatgcttactacgatctgctgcggtaagaatccccttggcgacgatgaagcctcagcaaccgtcagcaagaccgagacgagccaggtcgcgccagcc

SEQ ID NO: 11934 - DNA, 1044 bp, Artificial Sequence
  derived and/or modified sequence
atgaatggtaccgaaggacccaacttttacgtgccgttttccaacgccaccggcgtggtccggtcgccctttgaatacccccaatactacctggcagaaccttggcagttctcgatgctggcagcctatatgttcctgcttattgtgctcggttttcccataaactttcttaccctgtacgtgactgtccaacataagaaactcagaacgcctctgaactacatactgttgaacctggccgtcgccgatcttttcatggtcctgggcggctttacttcaactctctacacctccctgcatggatacttcgtgttcggaccaactggctgtaatctggaagggttttttgccacccttgggggtgagattgccctgtggtccctcgtggtccttgcaattgagcgatatgtcgtggtgtgcaagcctatgagcaactttcgcttcggtgaaaaccacgccattatgggtgtcgccttcacgtgggttatggcactcgcatgcgctgccccacctcttgcgggttggtcccgatacatcccggaaggactccagtgttcttgcgggatcgattactataccctgaagccggaagtcaataacgagagctttgtgatttacatgttcgtggttcactttactatcccaatgatcatcatcttcttctgctacggtcagttggtgttcactgttaaggaagcagccgcgcagcaacaagagtcggccactacccagaaggcggaaaaagaggtgaccaggatggtgatcattatggtcattgccttccttatttgttgggtgccatacgcaagcgtcgcattttacatctttacccaccagggaagcaactttggacctatctttatgaccattccagcgtttttcgcaaaatcggccgcgatctacaatccagtgatctacataatgatgaataagcaattcagaaactgtatgctgactactatttgttgcggcaagaacccactcggtgacgacgaggcatcagccaccgtgagcaagactgaaacctcccaagtcgcaccagcc

SEQ ID NO: 11935 - DNA, 1044 bp, Artificial Sequence
  derived and/or modified sequence
atgaatggaacggaaggaccaaatttctacgtacctttttcgaatgccaccggagtcgtcaggagcccgttcgaatacccccaatactacctggcagaaccctggcaattcagtatgctggctgcatacatgttcctgctgattgtcctcggattcccgataaactttctgactctgtacgtcactgtgcaacacaagaagctgcggactcctctcaactacatcctgcttaacttggccgtggcggatttgtttatggtcctggggggtttcacttcgaccctgtacacctcactccatggatacttcgtgtttggaccgaccggctgcaacctcgaaggtttcttcgccacgttggggggcgaaattgctctgtggtccctggtggtcctggccatcgaaagatatgtcgtggtctgcaagccgatgtccaacttccggtttggtgagaatcacgcgatcatgggagtggcattcacctgggtgatggccctggcgtgcgcggcgccgccactggcggggtggtcccggtacatcccggagggactgcaatgctcgtgtggaatcgattactacacccttaagccggaagtcaacaatgagtcgttcgtcatctacatgttcgtggtgcacttcactattccaatgatcatcatcttcttctgttacggacagctggtgtttaccgtgaaagaggcggccgcccagcagcaggagtcagccaccactcaaaaagccgagaaggaggtcacccggatggtgatcatcatggtgatcgccttcctgatctgctgggtgccatacgcgtctgttgccttctacattttcacccatcagggaagcaatttcggcccgatctttatgaccatcccagccttcttcgcgaaatcagccgccatctataacccagtgatctacattatgatgaacaaacaattcaggaattgcatgctcaccaccatctgttgcggaaagaacccgctgggggacgacgaggccagcgccaccgtctcaaagaccgagacttcacaggtggccccagct

SEQ ID NO: 11936 - DNA, 1044 bp, Artificial Sequence
  derived and/or modified sequence
atgaacggcaccgaaggtccaaacttctatgtgccattttctaatgcaacaggcgtcgtccggtcgccatttgagtatccccaatattatcttgcggagccttggcagttctcaatgttggccgcctacatgttcctgctgatcgttctggggtttcctattaactttctcaccctttacgtcacggtccagcacaagaagctgcgtactccactgaactacatccttctcaatcttgcagtggccgatctcttcatggtattaggcggcttcacttctaccttgtatacctcattgcacggctatttcgtcttcgggcctacgggctgcaacctggaaggcttctttgccacactggggggcgagattgctctgtggagcctggttgtgcttgctatcgaacgttacgtcgtagtatgcaaaccaatgagtaactttaggtttggagagaaccatgccatcatgggggttgcctttacctgggtcatggctttggcctgcgccgcaccgccgctggcaggctggagccgttatatacctgaaggcttgcagtgctcgtgcggcatcgattactatacactgaagccggaagtgaacaatgagtcattcgtcatctacatgttcgtggtccactttaccattccaatgattattattttcttctgttacggccagcttgtctttaccgtcaaggaagccgcagcacaacaacaagaaagcgcaacaacccaaaaggcagaaaaagaggttacccgaatggtcattataatggtgattgcatttttgatttgttgggtgccttatgcttctgtggccttctatattttcactcatcaaggaagcaacttcggcccaatcttcatgaccatcccagcatttttcgcaaaaagcgctgctatctataatccggtaatatatatcatgatgaacaagcagtttagaaactgcatgttgactactatctgctgcgggaaaaatccactgggagatgacgaggctagcgccactgtcagtaagactgagacctctcaggttgctcccgca

SEQ ID NO: 11937 - DNA, 1044 bp, Artificial Sequence
  derived and/or modified sequence
atgaacggaaccgagggccccaatttttatgtccctttcagcaacgcaactggcgtggtgaggagtccctttgaatacccgcagtattaccttgcagagccatggcaatttagcatgctggcagcctatatgtttctgctaatcgtcctgggttttccgattaacttcttgacgctgtatgtgactgtgcagcataaaaaattaagaacccccctaaattacatactactcaatttagctgtggcggacctattcatggtcctagggggatttacgtcaaccctgtatacatccctacacggctatttcgtctttgggcctaccgggtgcaacttagagggattttttgccacgctgggcggtgagattgctctgtggtcactggtcgtcttagccattgaaaggtacgtggttgtgtgtaaacccatgtccaattttaggtttggagaaaatcacgctatcatgggggtggctttcacctgggttatggctctagcatgcgccgccccgccgcttgccggatggtcccgctatattcctgagggcttgcagtgctcttgcggaatagactattacactctgaagccagaggtgaacaatgagagtttcgtcatttacatgtttgttgtccacttcaccatccctatgatcatcatatttttctgctacggccagctggtgttcactgtgaaagaagccgccgctcagcaacaggagagtgccactacccagaaggctgagaaggaggtcaccaggatggtcattataatggtcatcgcttttctgatctgttgggtgccgtacgcctcagttgctttttacatatttactcaccagggcagcaacttcggccctatttttatgacaatacccgcttttttcgcaaagtcggcagctatctacaaccccgtaatttacatcatgatgaacaagcagttccgaaattgcatgttaactacgatttgttgtggaaagaaccctctcggagatgatgaagctagcgccaccgtaagtaaaacggagacaagtcaggtcgcgccagcg

SEQ ID NO: 11938 - DNA, 1044 bp, Artificial Sequence
  derived and/or modified sequence
atgaacggaactgaaggcccaaacttttacgtcccattttccaacgctaccggcgtggtcaggagccccttcgaatacccgcaatactacctcgccgaaccgtggcagttctcgatgctggccgcgtacatgtttctgctcatcgtgctggggttcccgatcaactttcttactctttacgtgaccgtgcagcacaaaaagttgcgcactcctttgaactatatcctgctgaatcttgcggttgctgatttgttcatggtcctcggagggttcacctccactctgtacacctcattgcacggatacttcgtgttcggaccgaccggttgcaatctcgaaggattctttgcgactctgggtggagagatcgctctgtggtcgcttgtggtcctggccatcgaacgctacgttgtggtctgtaagccaatgagcaactttcggtttggagaaaatcatgccatcatgggagtggccttcacttgggtcatggcacttgcctgtgcggcacctcctttggctggctggtcgcggtatattccagaagggcttcagtgtagctgcggcatcgactactacaccctgaaaccggaagtcaacaacgagtcattcgtgatctacatgttcgttgtgcacttcaccattcctatgatcataatcttcttctgttacggacagctggtgttcaccgtcaaagaggcagcagcccaacagcaagagtctgctaccacccaaaaggcggagaaggaagtgacgcgcatggtcataatcatggtgatcgccttcctgatctgctgggttccctatgcgtcggtggccttctacatctttactcatcagggctctaacttcggaccgatcttcatgactattcctgccttctttgcgaagagcgctgctatctacaacccggtgatttacatcatgatgaacaagcaattcaggaattgcatgttgactaccatctgctgcggaaagaatccgctgggtgatgatgaggcctcagccactgtgtcaaagaccgaaacgtcccaggtggccccggca

SEQ ID NO: 11939 - DNA, 1044 bp, Artificial Sequence
  derived and/or modified sequence
atgaacggcaccgaaggtccaaatttttacgtgcctttctcaaacgccactggagtcgtccgtagccctttcgagtacccacagtactacttggccgagccttggcaattctctatgctggctgcttacatgttccttctcattgtgctcggtttccctattaactttttgaccctgtacgtcaccgtgcagcacaagaagctccgcacacctctcaactatatcttgctcaacctggctgtcgctgacctgtttatggtcttgggtggttttaccagcactctgtataccagccttcacggttacttcgtgttcggccccactggttgcaacctcgagggtttctttgccacactgggaggtgaaattgctctttggtccctggtggttttggctatcgagcgctacgtcgtcgtttgtaagcccatgagcaatttccgctttggcgaaaaccatgccatcatgggtgtagccttcacttgggtgatggcactcgcttgtgccgccccacctcttgcaggttggtccaggtatattccagagggtctccagtgttcatgcggcatcgactattacaccctgaagccagaggtgaataacgagtccttcgtcatctacatgtttgtggttcacttcactatccccatgatcattatctttttttgctacggacagctcgtcttcactgtgaaggaagccgctgctcagcagcaagagtccgccaccactcagaaggctgagaaggaagtaaccaggatggtaataatcatggtaattgccttcctgatctgctgggtgccttacgcttctgtggctttttatatttttacccaccaaggatctaatttcggtccaatttttatgactattcccgccttcttcgctaagtccgcagccatctataacccagtaatttacattatgatgaacaagcaatttagaaattgcatgttgactactatatgctgcggcaaaaaccccctgggcgacgacgaggcttcagccacagtaagcaaaactgagacaagtcaggtggctcccgct

SEQ ID NO: 11940 - DNA, 1044 bp, Artificial Sequence
  derived and/or modified sequence
atgaacgggaccgagggtcccaatttctacgtgccattctcaaatgcaactggcgtcgtacggagcccctttgagtacccacagtactacctggccgaaccttggcagttctcaatgttggcggcctatatgttcctgctgattgtgctgggatttcctatcaacttccttactttgtatgtgactgtgcagcataagaagctgcggaccccactgaactacatcctccttaacctggcggtggcagaccttttcatggtcctgggaggcttcacctccaccctgtacacctcgctccacggatacttcgtttttggaccgactggttgcaatctggaaggctttttcgccactctggggggtgaaatcgccctctggagcctcgtcgtcttggctatcgagcgctacgtcgtggtctgcaagccgatgtccaactttagattcggagaaaaccacgcgatcatgggggtcgcctttacttgggtgatggcactcgcctgtgcagcaccacccctcgccggatggtcgcgctacattccggaagggctgcagtgttcctgcggaatcgactactacaccctcaaaccggaagtcaacaatgaatcctttgtgatttacatgttcgtggtgcacttcaccattccgatgatcattatcttcttttgttacgggcagttggtgttcaccgtgaaggaggcggccgcacaacaacaggaatcggccactactcagaaggctgaaaaggaggtgactaggatggtcatcatcatggtcatcgctttcctgatctgctgggtgccttacgccagcgttgcgttttacatctttactcaccaggggtcaaactttggtccgattttcatgaccatccctgcattctttgcaaagtccgcagcgatctacaaccctgtgatctacatcatgatgaacaaacagtttagaaattgtatgttgacgacgatctgttgcgggaaaaatcccctcggggatgatgaagcatcagcaactgtgtcaaaaaccgagacttcgcaggtggccccggct

SEQ ID NO: 11941 - DNA, 1044 bp, Artificial Sequence
  derived and/or modified sequence
atgaacggaaccgaaggacctaacttctacgtcccattttccaacgcaacgggggtggtgagatcgccattcgagtaccctcagtattacttggcggagccctggcagttttccatgcttgcggcttacatgttcctgttgattgtgctgggattccccatcaatttcttgactctctacgtaactgttcaacataagaaactgcggactccgctgaactacatcctcctcaaccttgccgttgcagatctgttcatggtgcttggaggattcacctcgaccctttacacttcgctgcatggatactttgtgttcggtccgaccggctgcaacctggaaggatttttcgccaccctcggcggagaaatcgcgctgtggtcgctggtggtcctggctatcgaacgctacgtggtcgtgtgtaaacctatgagcaacttccggttcggagaaaaccatgcgatcatgggtgtggcattcacttgggtgatggcactggcttgcgcagcgccaccgttggcaggatggagccgctacatcccggagggcctccaatgctcgtgcggaatcgactactacactctgaagccggaggtcaacaacgagtcctttgtcatttacatgttcgtcgtgcacttcaccatcccgatgatcatcatcttcttctgttacggccagctggtgttcactgtcaaggaggccgccgcccaacaacaggaatccgccaccacccagaaagccgaaaaggaggtcactagaatggtgattatcatggtcattgcgttcctgatctgctgggtgccttacgcgtcagtcgccttctacatcttcacgcaccaaggatccaacttcggaccgatcttcatgaccatccccgccttttttgccaaatctgccgcaatctacaatccggtgatctacatcatgatgaataaacagttccgcaactgtatgctgactactatctgttgcggaaagaatccgttgggagacgatgaagcatccgccaccgtgtccaaaaccgaaacttcacaggtcgctcctgcc

SEQ ID NO: 11942 - DNA, 1044 bp, Artificial Sequence
  derived and/or modified sequence
atgaacgggactgaagggcctaatttctacgtccctttctccaacgcgaccggcgtggtgcgcagcccattcgaatacccgcaatactaccttgcagaaccgtggcagttcagcatgttggccgcgtacatgttcctgttgatcgtcctgggcttccccatcaactttttgaccctctacgtgacggtccagcacaagaaactgagaaccccgctcaactacatcttgctgaatctggccgtcgcagacctgttcatggtcctgggaggttttacgtcaactctctacacttcgctgcatggttacttcgtgttcggcccgaccggatgcaatctggaaggatttttcgcgactctcggcggagagatcgccctgtggtcgctggtcgtgctggccatcgagcggtacgtcgtggtgtgcaagccaatgtcaaatttcagatttggggagaaccacgctattatgggggtggcgttcacgtgggtgatggcgctggcgtgcgccgcgccacctctggccggatggagccggtacattcccgaaggactccaatgcagctgtggaatcgactactacactctcaagccggaagtgaataacgaatcattcgtcatctacatgtttgtcgtccacttcaccatccctatgatcatcatcttcttttgttacggacaactggtgttcactgtcaaggaggccgcggcgcagcagcaggaatcggcaactacccaaaaagcggagaaggaagtgactagaatggtgataatcatggtcatcgccttcctgatttgttgggttccgtacgcttccgtggccttctacatctttactcaccagggaagcaactttggccccattttcatgaccatcccagcatttttcgccaaatccgccgccatctacaatccagtcatctacatcatgatgaacaagcagtttcgcaactgcatgctgaccactatctgctgcgggaagaacccgctcggtgacgacgaggcatcggccaccgtctccaagaccgaaacctcgcaggtggcgcccgcc

SEQ ID NO: 11943 - DNA, 1044 bp, Artificial Sequence
  derived and/or modified sequence
atgaacggcacagagggacctaacttttacgtgcccttttccaatgctaccggcgtggtgaggtcaccattcgagtaccctcaatattatctcgctgagccttggcagttttccatgctcgccgcttacatgtttctgttaatcgttttggggttccctatcaatttcttgaccctatacgtgactgttcagcacaagaagctgcgaacgcccctgaactacatactgctgaatctcgcggtggccgacctgtttatggtgctaggtgggttcacatccactctgtacacatccctgcacggttactttgtctttggccctacaggttgtaaccttgaaggttttttcgctacgctgggcggagagattgcattatggtccttggttgtactcgctattgaaaggtacgtagtggtgtgtaaaccgatgtctaattttaggtttggtgagaatcatgccattatgggagttgctttcacctgggttatggcactggcttgcgccgctccacccctggctggatggagccgatatattcccgagggcctgcagtgctcatgcggaatagactactacactctgaaacctgaggtcaataacgagagctttgtcatttacatgtttgtggtccacttcaccattccaatgataataatctttttttgctacggccagctcgtcttcactgtgaaggaagctgccgcacagcagcaagagtccgccacgactcagaaggctgaaaaagaggttactagaatggttataatcatggtgatcgcatttcttatctgttgggtgccttatgctagtgtcgctttttatattttcacccaccaggggtccaacttcgggccaatttttatgaccattcctgcctttttcgcaaagtctgctgcaatttacaacccagtgatatacatcatgatgaacaagcagtttcgtaattgcatgcttacaacaatttgctgcggaaaaaacccgctcggggatgacgaagcatctgccacagtgagcaaaacggaaacctcacaggtagcacctgcc

SEQ ID NO: 11944 - DNA, 1044 bp, Artificial Sequence
  derived and/or modified sequence
atgaacggaaccgaaggccctaacttctatgttcccttctcgaatgcaaccggtgtggtgcgatccccgtttgaatacccacaatactacctggcagagccttggcaattttccatgctggcagcatacatgtttctcctgattgtgctcggctttcccataaactttcttaccctttatgtgactgtgcagcacaaaaagttgagaacgcccctcaattacattctgctgaatcttgcagtcgcggatttgttcatggtgctgggtggattcacgagcactctttacacttccctgcacggatacttcgtctttggtcctacgggatgcaatctggagggtttctttgcaaccctggggggtgagatagccctctggtccctggtggtccttgccattgagagatacgtcgtggtttgtaaacctatgtcaaactttaggttcggagagaatcatgccatcatgggtgtggcatttacttgggtcatggcccttgcgtgcgcagcaccccccttggcgggctggtcgagatacattcctgaagggctccagtgtagctgtggtattgattactacacccttaagccagaagtgaacaacgaatccttcgtgatttacatgttcgtggtgcatttcactatccctatgatcattatcttcttttgctacggacagcttgtgtttactgtgaaggaagctgcggcacaacagcaggagagcgctactacccaaaaggctgaaaaggaagtgaccagaatggtcattatcatggtgattgcattccttatctgctgggtcccttacgccagcgtggctttctacatctttactcaccagggatcgaactttggtccaattttcatgactattcccgcctttttcgcaaagtcagcagctatttacaaccccgtgatctacattatgatgaacaagcagtttagaaactgcatgctgacgaccatatgttgtggaaagaacccactcggagatgatgaggcatcggcaaccgtcagcaagaccgaaacctcccaggtggcacctgca

SEQ ID NO: 11945 - DNA, 1044 bp, Artificial Sequence
  derived and/or modified sequence
atgaacgggaccgaaggcccaaatttctacgtgcctttctctaacgccaccggcgttgtcagatcaccgtttgaatacccgcagtactacctggccgaaccttggcagttctcaatgctcgctgcctacatgtttttactgattgtgctcggcttccctatcaactttctgactctgtatgtaacagttcagcacaaaaaattgaggactccgctgaattacatcctgttaaacctagccgttgccgacttgttcatggtactgggcgggtttacttccaccttgtacacaagcctgcacggctactttgtattcggccccacagggtgcaacctggaaggcttctttgccacactcgggggggagatagctttgtggtctctggtggtgctcgcgatcgagcgatatgttgtcgtttgtaagccgatgtcgaactttcgcttcggcgaaaatcacgccataatgggggtggcctttacctgggtgatggcacttgcatgtgccgcaccgcccctagcaggctggtcccgctatattccagagggacttcagtgttcttgtggcatcgattattacaccttgaagcccgaggtaaacaatgaatctttcgtgatttatatgtttgtggtgcatttcacaattcccatgatcattatcttcttttgctacgggcagcttgttttcaccgtgaaagaggcagctgcccagcagcaggagagtgccaccacacagaaggctgagaaagaggtgacccggatggttataataatggtaatcgcgtttctaatttgttgggtgccctatgcttcagtggccttctacattttcacacatcagggcagcaacttcggcccaatcttcatgacaattcccgcctttttcgcaaaatccgccgcgatatacaaccctgttatctatatcatgatgaacaagcagtttaggaactgcatgctgaccacaatctgttgcggaaagaatcccctgggcgacgacgaggcctccgctacagtttcaaagactgaaacctcccaggttgctcctgcc

SEQ ID NO: 11946 - DNA, 1044 bp, Artificial Sequence
  derived and/or modified sequence
atgaacggtaccgaaggaccgaacttctacgtccctttttccaatgctactggtgtggtgagatcgccgttcgaatacccacagtactaccttgcagaaccatggcaattttccatgttggcagcatacatgtttcttctgatcgtgctcgggtttcccattaacttcctcacgttgtacgttaccgtgcaacacaagaagctgcgcaccccccttaactacatcctgcttaaccttgcagtcgccgacctgttcatggtgctgggaggatttaccagcactctgtacacctccctccatggttactttgtattcggtcctactggctgtaacctcgaggggttttttgcaacccttggtggcgaaattgcactgtggtcgctggtggtgctcgcaattgaacgttacgtcgttgtctgcaagcctatgagcaattttcggttcggagagaaccacgccattatgggcgtggcttttacttgggtcatggctctggcttgtgcggcacctcccctggccggttggtcccgttacatccctgaagggctccaatgcagctgcggcatagactactacacccttaagcctgaagtgaacaatgaatcgtttgtgatttacatgtttgtggtgcattttactattccaatgattatcatctttttctgttacggacagctcgtgttcaccgtgaaggaggcagcagcccaacagcaagaatccgccaccacccaaaaggccgaaaaggaagtgactagaatggtgattatcatggtgattgcattccttatctgctgggtcccttacgcatcggtggcattctacatattcactcaccaggggtcgaactttgggccgattttcatgactatacctgcatttttcgctaagtcggccgcaatctacaatccagtcatctacatcatgatgaataagcaattccggaactgtatgctgactactatttgttgtggaaaaaacccgctgggtgatgacgaggcctccgcaactgtgagcaagaccgaaacctctcaggtggcacctgca

SEQ ID NO: 11947 - DNA, 1044 bp, Artificial Sequence
  derived and/or modified sequence
atgaacggcaccgagggaccgaatttctacgtcccttttagcaatgccacgggagtggtccgctcaccatttgaatatccgcaatactacctggcggagccctggcaattctcgatgctggcagcctacatgttcctcctgattgttctgggattcccaatcaacttccttactctgtacgttacggtgcagcataagaagttgcggaccccattgaactatattcttctgaatcttgccgttgcggatctgttcatggtgctgggaggatttaccagcactttgtataccagcctgcacggatacttcgtgttcggaccaaccggctgcaacctggaaggattcttcgcgaccctgggaggagagatcgctctgtggtcgctggttgtgctcgctatcgaaagatacgttgtggtgtgcaaaccgatgagcaatttccgcttcggagagaaccacgcgatcatgggcgtcgcattcacttgggtgatggcgctcgcctgcgcagcaccgcccctggcgggatggagccgctacatcccggaaggactccaatgtagctgcggaatcgactactacaccctcaaacctgaagtgaataacgagtcctttgtgatctacatgttcgtggtccatttcactatccctatgataatcatcttcttttgctacggacagctcgtctttactgtcaaggaagccgccgcacagcagcaggagtccgcgaccactcagaaggctgagaaggaagtcactcgcatggtgatcatcatggtcatcgctttcctcatttgctgggttccttacgcctccgtggccttttacatcttcacccaccagggaagtaatttcggaccgattttcatgaccatccccgctttctttgcgaagtctgcggccatctacaaccccgtgatctacatcatgatgaacaagcaatttcggaactgcatgctcaccactatctgctgtggcaagaaccctctgggcgatgacgaggcttcggcgacggtgtccaagactgaaaccagccaggtggctccggcc

SEQ ID NO: 11948 - DNA, 1044 bp, Artificial Sequence
  derived and/or modified sequence
atgaatgggactgaagggccaaatttctatgtccctttcagtaacgcgacgggagtggtcaggtctcccttcgaatatccgcaatattacctcgctgagccctggcagtttagtatgcttgctgcttatatgtttcttttgatagtcttggggtttcctatcaatttccttacattgtatgttaccgtacaacataaaaaacttagaactccattaaactatattttgcttaatcttgccgttgcagatttgtttatggttcttggtggttttaccagtactttgtatacaagcttgcacgggtatttcgtttttggaccaacgggatgcaacttggaaggattcttcgccactttgggaggcgagatagctttatggtcgttggttgtcctcgccattgaaaggtatgtggttgtctgcaagcctatgtcgaattttcgcttcggagagaaccatgcaattatgggggttgcttttacatgggttatggctttggcttgcgctgcaccaccgcttgctggatggtccagatatattccagagggccttcagtgctcatgcggtattgattattacactctaaaaccggaggttaataatgaatcatttgtcatctatatgttcgtggtacatttcaccatccccatgattattatatttttctgttatggacagctcgtgttcaccgtgaaggaagctgctgcccaacaacaggagtccgcaacaacccagaaagctgagaaagaggttactagaatggtcattataatggtcattgcttttcttatatgctgggtcccatacgcctctgtggctttttacattttcactcaccaaggttctaacttcggtccaatttttatgacaatcccagcttttttcgcaaaatcagctgcaatttataatccagttatttatataatgatgaataagcaattccgtaactgtatgttgactactatatgctgcggaaaaaaccccttgggggatgatgaagcgtccgcaaccgtgtctaagactgaaaccagccaagtcgccccagca

SEQ ID NO: 11949 - DNA, 1044 bp, Artificial Sequence
  derived and/or modified sequence
atgaacggcacggagggtccaaatttttatgtcccgttcagcaacgctaccggggtagtgagatccccgtttgaatacccacagtactatctggcagaaccctggcagttctctatgttggcagcttacatgttcctgctgattgtcttgggctttccaattaatttcctgacgctctatgtcaccgtgcagcacaagaagctgaggacacccttaaattacatccttctaaatttggcagtcgcggatttgtttatggttcttggcggctttacctccactctgtataccagtttgcacgggtatttcgtattcgggccaaccggatgcaatctggaagggttcttcgctaccctcggcggtgagatagctctgtggtccctcgtggtgttggctatagaacggtacgtcgtggtgtgcaagccaatgtccaactttcgatttggagagaaccatgccattatgggggtggccttcacttgggtgatggctctggcctgtgccgctccacccctggccgggtggtccaggtacatacccgaaggattacagtgtagttgtgggatcgactattacactcttaaacctgaggtgaataatgaatcattcgtaatttatatgtttgttgttcattttaccattccaatgataataatcttcttttgctacggacagctagtctttacggtaaaggaggctgcagcccagcaacaggagagcgccacgacacagaaggcagaaaaggaggtcaccagaatggtcatcatcatggtgattgcattcctgatctgctgggtaccatacgcttcagtggcattttacatctttacccaccagggaagcaacttcggccctatattcatgacgattccagcttttttcgcaaaatcggccgcaatctataatcccgtcatatacatcatgatgaacaagcaatttagaaactgtatgctcacaacaatctgctgtggaaagaaccccctgggggacgatgaggcgtcagccacagtcagtaaaactgaaactagccaggtagctccagcg

SEQ ID NO: 11950 - DNA, 1044 bp, Artificial Sequence
  derived and/or modified sequence
atgaacggaaccgaaggacccaatttctacgtaccattcagcaatgcaaccggagtcgtcaggtcgccgtttgaatacccccagtactacctggcggagccatggcagttcagcatgctcgccgcttacatgtttttgctcatcgtcctgggatttccgattaacttcctgactctctacgtgaccgtgcagcataagaagctgcggaccccgttgaattacatcctgttgaacctcgcagtcgcagatctgtttatggtcttggggggatttaccagcactctgtatacttccctgcacggatacttcgtgttcggacccacgggttgcaaccttgaaggtttcttcgcgacgctgggaggcgagattgcgctctggtccctggttgtgctggcgatcgagagatacgtggtggtgtgtaagccgatgtccaacttccggttcggagaaaaccatgccatcatgggcgtggctttcacttgggtgatggccctggcatgtgcggcgcctccacttgcaggatggtcacgctacatcccagagggactccagtgctcctgcggcattgactactacactctgaaaccggaggtgaacaacgaatccttcgtcatctacatgttcgtggtccacttcacgatcccgatgatcatcatcttcttttgttatggacaactcgtctttactgtgaaggaggcagccgcgcagcagcaggagtcggccaccacccaaaaggcggagaaggaggtcactaggatggtgatcatcatggtgatcgcttttctgatctgctgggtgccgtacgcctcggtcgccttctacatcttcactcaccaaggaagcaatttcggaccaattttcatgaccatcccggccttcttcgcgaaatcggcggccatctacaatccggtgatctacataatgatgaacaaacaattccgaaattgcatgctcactaccatctgctgcggcaaaaatcccctcggtgatgacgaggcctcggcaactgtctcgaaaaccgaaaccagtcaggtggctcccgct

SEQ ID NO: 11951 - DNA, 1044 bp, Artificial Sequence
  derived and/or modified sequence
atgaatgggacagagggacctaatttctatgtaccttttagtaatgcaacgggcgtagtgaggtcacccttcgaatatccacagtattacctggcggagccgtggcagttcagtatgctggcagcctatatgttccttctgatcgtactagggtttcctatcaacttcttgacattgtatgtgacagttcagcacaagaagcttaggactcctttgaactatatacttttgaacctcgccgtcgcggacctgttcatggtgctggggggattcacgtcaacactttacacttcgttacacggctacttcgtctttggcccaactggatgcaaccttgaaggcttcttcgctacactgggaggcgagattgcgctatggagtttggtggtgttggccatcgagcggtatgttgtcgtgtgcaaacccatgagcaacttcaggttcggggagaatcacgcgatcatgggcgtcgcctttacatgggttatggctcttgcttgtgcagcaccccccttggccggttggtcgagatatatacctgagggtctgcaatgctcctgcgggattgattactacacacttaaaccagaggtcaataacgagtccttcgtgatctacatgttcgtggttcactttaccattcccatgattatcattttcttctgctatggtcagctcgtgtttacagtgaaagaggccgcagcccaacagcaggaatctgcaacaacgcagaaagcagaaaaggaggtgactaggatggtcattataatggtgatagcctttctgatatgctgggttccctatgcatcagtagctttctacatcttcactcatcaggggagtaatttcggacctatcttcatgacaatccccgctttttttgccaagtcagccgctatctacaacccagtaatttacattatgatgaataaacaatttaggaattgtatgctaactactatttgctgcgggaagaatcctctgggggacgacgaggcctctgcaaccgtgtcaaaaaccgaaacgagtcaggtggctccggcc

SEQ ID NO: 11952 - DNA, 1044 bp, Artificial Sequence
  derived and/or modified sequence
atgaacggtactgaggggcctaatttctacgttccattcagtaatgcaacgggagttgtgcggtcccctttcgagtacccccaatattatttggcagagccttggcagttctctatgcttgccgcctacatgttcctcctaatcgtactgggatttccaatcaacttcctgaccttatatgtcaccgtccaacacaagaaacttcggactcctcttaactatatcctgctgaacttagcggtcgctgatctgtttatggtgttgggcggctttaccagcactctttacacaagcctccatggctactttgttttcgggcctactggctgcaacctggaaggtttctttgctacactggggggcgaaattgcgctgtggtccctcgtggtcctggccatcgaaaggtatgtggtcgtgtgtaaacctatgagtaacttcaggttcggagagaaccatgccataatgggagtcgccttcacttgggtgatggcactggcctgcgccgccccaccactcgccggttggtccaggtacattcctgaaggcctgcagtgttcttgcgggatcgactactacacactgaaacccgaagtcaataatgagtcctttgtgatttatatgttcgtagtccactttacgattcctatgatcatcatctttttctgctatgggcagcttgtgttcaccgtcaaggaggcggctgctcaacaacaagaatccgccacaacacaaaaagccgaaaaggaagtcacaaggatggtgattatcatggttatcgcgttcctaatctgctgggtcccgtacgcctcggtggctttttatatcttcacgcaccaggggagcaacttcgggcccatttttatgacgatacccgctttcttcgcaaagtcagccgccatctacaatcccgtgatttacatcatgatgaataagcagtttagaaactgcatgttaactaccatttgttgtggcaagaatcccttaggggatgatgaagcctccgccaccgtgtccaagaccgagacgagccaggtggcaccagct

SEQ ID NO: 11953 - DNA, 1044 bp, Artificial Sequence
  derived and/or modified sequence
atgaatgggactgaaggtcccaatttctatgtgcctttctccaatgcaactggagtggtgagaagcccgtttgaataccctcaatactaccttgccgagccttggcagttctccatgttggcagcttatatgtttctgcttattgtgctgggttttcctatcaattttctcaccctgtacgtgactgtccaacacaagaaacttcggaccccactgaactacatacttcttaaccttgctgtcgcagatctctttatggtgttgggtggattcacttcaactctgtacacctcgctccatggttacttcgtgtttggtccaaccggctgcaatctcgagggtttcttcgccacccttgggggagaaattgcactgtggagcctggttgttctggcaattgaacgttacgttgtggtgtgtaagccaatgagcaactttcgatttggagaaaatcatgcaattatgggagtggcatttacttgggtgatggcgctggcatgtgcggcaccgcctctggccgggtggtcgagatacatcccggaaggactccaatgttcctgtggaattgactactacactttgaagccagaggtgaataacgagtcctttgtcatctacatgtttgtggtgcatttcaccatccctatgattatcattttcttctgttatgggcagctcgtgtttacggtgaaagaagcagccgcacagcagcaagaatccgcaacgactcaaaaagcagagaaagaagtgactagaatggtgatcatcatggtgatcgcattccttatatgttgggtgccctacgcctcggtggccttctacatattcacgcatcaagggtcgaattttgggccaatctttatgacgatcccagcattcttcgcaaaatccgccgcaatatacaacccagtcatctacattatgatgaataaacaatttaggaattgtatgctgaccaccatttgttgcggcaagaatccactgggtgacgatgaggcatcagccaccgtatcaaagaccgaaacttcgcaggtcgcacctgcc

SEQ ID NO: 11954 - DNA, 1044 bp, Artificial Sequence
  derived and/or modified sequence
atgaacggaactgaaggaccgaacttctacgtgccattctccaatgccaccggtgtggtcagatcaccgtttgagtatcctcagtactacctggcagagccatggcagttctccatgctggcagcatacatgtttctgcttattgtgttggggtttccaattaactttctgactctctacgtgaccgtccaacataagaagctccgcactccgcttaactatattctgcttaatctggcagttgccgatctcttcatggtgcttggaggattcactagcaccctttacacgtcacttcatggctattttgtgtttgggcccaccggatgtaaccttgagggatttttcgccaccctcggtggggaaattgctctgtggtcactggtcgtgctggcgattgaaaggtacgtggtggtgtgtaaaccaatgagcaatttcagatttggtgaaaaccatgctatcatgggagtggcgtttacgtgggtcatggccctcgcatgtgccgcacctcctcttgccggatggtcaagatacatcccagaggggcttcagtgttcgtgcggaattgattactacacgctgaagcctgaagtcaacaacgaatcattcgtgatttacatgtttgtggtgcattttaccattccgatgatcatcattttcttttgttacggacaactggtttttaccgtgaaggaagcagctgctcagcaacaagaaagcgcaaccactcaaaaagcagaaaaggaggtgactcggatggtgatcataatggtcatcgcctttctcatctgttgggtgccatacgccagcgtggcattctacattttcactcatcaagggtcgaacttcggcccaatctttatgaccatacctgcatttttcgcaaaaagcgcagccatctacaatcctgtcatttacattatgatgaataagcaattcaggaactgcatgcttactactatttgttgcggaaagaatccgcttggcgacgatgaagctagcgcaactgtgagcaagactgaaacttcccaagtggcgcctgcc

SEQ ID NO: 11955 - DNA, 1044 bp, Artificial Sequence
  derived and/or modified sequence
atgaacggaacagaagggcccaacttctacgtcccattttccaatgccactggcgtggtgaggagccccttcgaatatccccagtactacttggcagagccttggcagttctcgatgctggcagcgtatatgtttctgttaattgtgttaggtttccctatcaatttccttactctgtatgtcacagtgcaacacaagaagttacggaccccgctgaactatattcttctcaacctagcagtcgccgacttgttcatggtccttggaggcttcacatccactctttacacatctctgcatggttactttgtgtttgggccgaccggttgcaatctagagggcttttttgccacccttggaggtgaaatcgcgctatggtcgttagttgtgttggctatcgaaagatacgtggtcgtgtgtaaaccaatgagtaatttcagatttggcgaaaatcacgccattatgggcgtagcgttcacttgggtgatggcattggcctgcgccgcccccccgctagcaggctggtcccgatacatccctgagggactccagtgtagctgtggcatcgactactatacgctgaagcccgaggttaataacgaatcatttgtaatttatatgttcgtcgttcactttaccatccccatgataatcatctttttttgttacggccagctggtctttacggtaaaagaggccgcagcccaacagcaggaatcagctaccacgcaaaaggcagagaaggaagttacgagaatggttatcataatggtgattgcttttcttatctgttgggtaccgtacgctagcgtggcgttctacatttttacacaccaaggttccaacttcggacccatcttcatgacaattccagccttcttcgcaaaaagcgccgcgatctacaacccagtcatctacattatgatgaacaaacaatttaggaactgcatgttaaccacaatttgctgcgggaagaatccccttggtgacgatgaagcctcggctaccgtgtcaaaaaccgagactagccaggtggcaccagct

SEQ ID NO: 11956 - DNA, 1044 bp, Artificial Sequence
  derived and/or modified sequence
atgaacggaactgagggcccgaatttctacgttccattctcaaacgcgactggagtggtgaggtcccccttcgagtacccgcagtattacctggcagagccttggcagttttccatgctggccgcctacatgtttctgttgatcgtcctcgggtttccaatcaatttcttgaccctgtacgtgaccgtgcaacataagaagctgcggactccgctgaactacattctgctgaatctcgctgttgccgacctgttcatggttctgggaggattcacgagcacgctgtacaccagcctgcatggatactttgttttcggaccaaccggttgcaacctcgaaggattcttcgccacgctgggcggcgaaatcgctctgtggtcgttggtcgtcctcgccatcgagaggtacgtggtcgtgtgtaagcccatgtcgaacttcagatttggtgaaaatcatgccatcatgggagtggcttttacctgggtcatggccctggcatgcgcggccccgccgctggctggatggtcacgctacatcccggagggactgcaatgcagctgcgggatcgactactacactcttaagccagaagtcaataacgaatcgtttgtgatctacatgttcgtggtgcactttacgatcccgatgatcatcatcttcttttgctacggccaactggtctttaccgtgaaggaagccgcagcccaacagcaagaatccgcaacgacccagaaagcagagaaggaggtgacccggatggtcattatcatggtgattgcgttcttgatttgctgggtgccgtacgcttccgtcgctttttacatctttacccaccaggggagcaatttcgggcccatcttcatgactatccccgctttcttcgccaagtcggccgccatctataaccctgtgatttacattatgatgaataaacaattcagaaactgtatgctgactactatctgctgcggaaagaaccctctcggggacgacgaggcctctgcgactgtgtccaagaccgaaacctcccaggtggccccagct

SEQ ID NO: 11957 - DNA, 1044 bp, Artificial Sequence
  derived and/or modified sequence
atgaacggaaccgaaggcccgaatttctatgtcccgttttcgaatgcgactggagttgtgcggtccccatttgaatacccgcagtactacctcgcagagccgtggcagttctccatgttggcagcatacatgtttctgcttattgtgcttggatttcccatcaactttctgaccctgtacgtgaccgtgcaacataagaaactccgtactcccctgaactatatcctgttgaacctggccgtggcggatttgttcatggtgttgggagggtttacctctaccctttacactagtctccatggatacttcgtctttggcccaacgggctgcaatcttgaaggatttttcgccaccctcggaggagaaattgccctctggagcctggtggtgctggctatcgagcgctacgtggtggtctgcaaacctatgtccaacttccgcttcggcgagaaccacgctatcatgggggtggcgttcacctgggtcatggccctggcatgcgccgctcctccccttgctggatggtctaggtacatccctgaagggctgcagtgctcgtgtggcatcgactactacaccctcaagccagaggtcaataacgagtcgttcgttatctacatgttcgtggtccacttcactattccgatgatcatcatattcttctgctacggtcagctggtgttcactgttaaggaagccgccgcccagcaacaagagtcggcaacgacccaaaaggctgaaaaagaagttactagaatggtgatcatcatggttatagctttcctgatctgttgggtgccttatgcgtcggtggcgttctacatcttcacgcaccagggatccaacttcggcccaatcttcatgaccattccggcgttcttcgccaagagcgcggccatctacaacccggtgatttacattatgatgaacaagcagttccgcaattgcatgctgacgactatctgttgcggtaagaatccattgggagacgatgaggcgagcgcaactgtaagtaagaccgaaacttcgcaggtcgctcctgcc

SEQ ID NO: 11958 - DNA, 1044 bp, Artificial Sequence
  derived and/or modified sequence
atgaatggtactgagggcccaaatttttatgttccattcagtaatgccactggcgtggtacgctcaccgtttgaataccctcagtattatctcgcagaaccttggcaattctccatgctggccgcatatatgtttctcctgatagttctaggctttccgattaactttctgacattgtatgttacggtgcagcacaagaagttacggacgcccctgaattatatcctgctgaatctagcagtggctgacctctttatggtactggggggttttacgtctaccctctacacctccttgcacggctatttcgtcttcgggcccaccgggtgcaatctggaaggattctttgccaccctcggaggtgagattgctctgtggagcttagtcgtcctggccatcgaacgatacgttgtggtttgtaagcccatgtctaacttccgttttggcgagaatcacgcaatcatgggcgtcgcctttacttgggtgatggccttggcctgtgctgcaccccctctcgccggatggagcagatacattcctgagggtctgcaatgctcttgcggcattgactactacactctcaagcccgaggtgaacaatgaaagttttgtcatctatatgttcgttgtacacttcactattcctatgatcattatcttcttttgttatggtcagttggttttcactgttaaggaagcagctgcacagcagcaagaatctgccactacccagaaagccgagaaggaagtgacccggatggttatcattatggtcattgccttcctcatctgctgggttccctacgcctctgtagccttttacatttttactcaccagggctccaacttcggaccaattttcatgaccatccccgccttcttcgccaagtctgcagctatttacaatccggtgatctacattatgatgaataagcagtttcgcaattgcatgctgacaaccatctgttgcggcaaaaatccgctcggagacgacgaggcctccgcgaccgtttctaagacagaaacctcacaagtggctcccgcc

SEQ ID NO: 11959 - DNA, 1044 bp, Artificial Sequence
  derived and/or modified sequence
atgaatggaacagagggtcctaacttctacgtgccattctccaacgccacgggcgtggtgaggtccccttttgaatatccacagtattacctagcagaaccttggcagttcagcatgcttgccgcctacatgttcttactcatagtccttgggtttccaatcaatttcctgactctgtatgtgactgtgcagcacaagaaactgcggacccctctcaactacatcctacttaacctggcggtggcggatctgttcatggtactgggtgggttcacgagcactctttataccagccttcacgggtactttgtttttggcccaactgggtgcaacctggaagggttctttgccactcttgggggggaaatagcactttggtcactcgtggtactagcaattgagcgctacgtggtggtttgcaaaccaatgtctaattttcggttcggggagaaccacgcaataatgggggttgccttcacctgggtaatggccctagcctgtgccgcacccccccttgccgggtggagtagatacataccggaaggtctgcagtgttcatgtggtattgactattacaccctcaagcctgaggtcaacaacgaatcttttgtgatttacatgtttgtggtccacttcactattcccatgataataatttttttttgctacggtcagctcgtgtttactgtaaaggaggcagctgctcagcagcaggagagtgctacaacacaaaaagccgagaaagaggtcactcgcatggtgatcattatggtgattgctttcctcatttgctgggtaccctatgcctccgttgcattttatattttcacacaccagggaagcaatttcggaccgatatttatgacgattccagcattcttcgccaaatccgctgcgatctataaccctgttatctatatcatgatgaacaagcagtttcgcaattgcatgctaactactatctgttgcggcaaaaaccctttgggggacgatgaggccagtgctaccgtctccaaaacggagactagccaggtagcacctgca

SEQ ID NO: 11960 - DNA, 1044 bp, Artificial Sequence
  derived and/or modified sequence
atgaacggaacggaggggcccaacttttatgtgcccttctctaatgcaaccggagttgttagaagcccctttgaataccctcaatactatctcgccgagccctggcagttcagtatgcttgcggcatacatgtttctccttatcgtgctagggttcccgattaattttctgacactctacgtcactgtacaacacaagaaactgaggacccccctgaactacatccttctaaatttagcagtcgccgatctctttatggtcttgggcgggttcacctcaactttgtacacatctctgcacggttacttcgtgtttggcccaactggctgtaacttagagggattttttgctacgcttggaggagagattgccctctggagtctggtggtcctggctatcgagagatatgtggtcgtttgcaagccgatgtcgaacttccgctttggagagaatcatgcaatcatgggggtcgcgtttacttgggtcatggcactcgcctgcgccgctccgcctctggctgggtggagccgatacattcctgagggactgcaatgttcctgtggtatcgattactacacattaaagccagaagttaataatgaatcattcgtcatatatatgtttgtggtacatttcactatacctatgatcataatttttttctgctatggccagctggtgtttacagtcaaggaagcggcggcacagcaacaagagagcgccacgacccagaaagccgagaaggaagtcacaagaatggtgattattatggttattgctttcctgatctgttgggttccgtatgcctcagttgctttttatatcttcacccaccaggggtccaactttggacctattttcatgacaatccccgcgttctttgctaaatccgccgcgatatacaatcccgtgatttatatcatgatgaataaacagttccgaaactgcatgcttaccacaatatgctgcggaaagaatcctctgggcgacgacgaagcatctgcaaccgtctctaagacagaaactagccaggttgcccccgcg

SEQ ID NO: 11961 - DNA, 1044 bp, Artificial Sequence
  derived and/or modified sequence
atgaacggaactgaggggcccaatttctacgttcctttctcaaatgcaactggcgtggtgcggtcgccattcgagtacccgcagtactacctggcggaaccttggcagtttagcatgctggccgcgtacatgttcttgctgatcgtgctgggcttcccaatcaatttcctgactctgtacgtcaccgtccagcacaagaaacttcgcacccccctcaactatatacttctgaatctggccgtggcagatctcttcatggttttgggaggctttacctccactctttacacttcactgcatggatacttcgtgtttggtccgactgggtgtaatcttgaaggcttctttgccaccctcggaggagaaatcgccctctggtcactggtggtgctggccatcgagcggtacgtggtggtgtgcaagcccatgtcaaacttccggttcggggagaaccacgcaatcatgggtgtcgctttcacctgggtgatggccctggcttgcgccgctccgccgctggctgggtggtcccgttacatcccggaaggccttcagtgttcgtgcggaatcgactactatacccttaaaccagaagtgaacaacgagtcctttgttatctacatgttcgtggtccatttcaccatcccgatgatcattatcttcttctgctacggccagttggtctttacggtcaaagaagctgccgcgcagcagcaggagtcggccactacccagaaggcggaaaaagaagtcaccagaatggtgatcatcatggtgatcgccttccttatctgctgggtcccgtacgcctctgttgccttctacatcttcacccaccaaggatcgaatttcggacccatcttcatgaccatccctgcgttctttgcaaaatcggcggccatctacaaccctgtgatctacattatgatgaataagcaattcaggaactgcatgctgaccaccatttgctgcggcaagaatccgctcggggacgatgaggcctcggccaccgtgtccaagaccgaaacttcccaagttgcgcctgct

SEQ ID NO: 11962 - DNA, 1044 bp, Artificial Sequence
  derived and/or modified sequence
atgaatggtaccgaaggcccaaacttttacgtgccatttagcaacgcaactggtgtggtgcgctccccatttgaataccctcaatactatctggcagaaccttggcagttttcgatgctggcagcatacatgttcctccttattgtcctgggttttcccatcaatttccttacgctgtacgtgactgtgcagcacaagaagctgcgaactcccctcaattacattctgcttaatctcgccgtggcagacctctttatggtactgggaggttttacttcaactctctacaccagccttcatgggtacttcgtctttggcccaactggttgtaacttggagggattctttgctactcttggtggagaaatcgcgctgtggtcactggtcgtgctggccattgaaaggtacgtggtagtgtgtaagcctatgtcgaacttcagattcggagaaaaccatgcgattatgggtgtcgcatttacttgggtcatggcactggcatgcgccgcaccccctctggccggttggtcaagatacataccggagggcctgcagtgcagctgtggcattgactactacaccctcaagcctgaagtgaataacgaatcattcgtgatttacatgtttgtggtgcactttaccatccctatgataatcatattcttttgttacggccagctcgtttttaccgtcaaagaggcggcggctcagcagcaggaatcggcaaccactcaaaaagcagaaaaggaagtcaccaggatggtgattatcatggtcatagcttttttgatctgctgggtgccttacgcatccgtggcattttacatctttacgcatcagggatccaactttgggcccatattcatgactatacctgcgtttttcgcaaagtcggccgccatatacaaccctgtcatttacatcatgatgaacaagcaatttcgcaattgtatgcttactaccatttgctgtgggaaaaatccactcggagatgatgaggcttctgccaccgtgagcaaaactgagacttcccaggtggcccccgca

SEQ ID NO: 11963 - DNA, 1044 bp, Artificial Sequence
  derived and/or modified sequence
atgaacgggaccgaagggccgaacttttacgtccccttttccaacgccaccggggtcgtgcgatctcccttcgagtatccacagtattatctcgccgaaccatggcagttttcaatgcttgccgcgtacatgttcttgttgatcgtccttggcttccctatcaattttctgaccctgtatgtcactgtgcagcacaaaaaactgagaaccccgctaaattacatactgctcaacttagccgttgccgaccttttcatggttctcgggggctttaccagtactctgtacacttcgctgcatggatatttcgtctttggaccgactggttgcaatctcgaaggctttttcgcaacattggggggagagatcgcattatggagcctggttgtcttggccatcgaacggtatgtcgtggtatgcaagccaatgagcaacttccgcttcggggagaaccacgcgatcatgggggtagcatttacctgggtgatggctttggcctgtgccgccccaccactcgctggctggtcaaggtacatccctgaggggcttcagtgcagttgcgggatcgactactacacactcaagccggaggtcaacaacgagagcttcgtaatttatatgtttgtggttcatttcaccatccccatgatcatcattttcttctgttatggacagttggttttcaccgttaaggaagctgcggcccagcaacaggagtccgcaacaacccagaaggccgagaaagaggttacacgtatggtcatcatcatggtgattgctttcctgatctgctgggtcccctatgcaagcgtagccttctacatcttcacccaccaggggagcaactttggcccgatctttatgacaattcccgcgtttttcgccaagtccgcagcaatttataatcccgtaatctacattatgatgaataaacagtttcgcaactgcatgctcaccaccatatgttgcggcaagaaccccctgggggatgacgaggcgagcgccactgttagcaagactgagacgtcccaggtcgccccagct

SEQ ID NO: 11964 - DNA, 1044 bp, Artificial Sequence
  derived and/or modified sequence
atgaatgggacagaagggcccaacttttatgtgccattcagtaatgccactggggtagtccggtctcccttcgaatacccacaatattatctggctgaaccctggcagttctcaatgctcgccgcttacatgtttttacttatagtgctcgggtttccgataaatttcttgacactgtacgtcactgtgcagcataaaaaattacgcacacctctgaattatatcctcctcaacctggccgtggcggatctttttatggtcctcggagggttcacatcaacactctatacttcattacatggatatttcgtgtttgggcctacaggatgtaatctcgagggattctttgctactctcgggggggaaatcgcactgtggtctctcgtggtcctcgccattgaaagatatgtagtggtgtgtaaacctatgagtaattttcgcttcggagaaaaccacgccataatgggggttgccttcacatgggtgatggccctcgcatgtgcagctcctcctcttgctggatggtcccggtacatcccagaagggctgcagtgctcctgtggaattgattactatacactgaaaccagaggtcaataatgaatcttttgttatatacatgtttgtggttcacttcacaatccccatgataatcatctttttctgttacggacagctcgtgttcacagttaaagaagcagccgctcagcagcaggaatcagccacaactcagaaagctgaaaaagaagttacgcggatggtgataattatggtgatcgctttcctaatctgctgggtgccatacgcctctgtagctttctacattttcactcaccaggggtcaaatttcggacccatcttcatgacaatccccgctttttttgccaagtccgcagccatatataaccccgttatatatattatgatgaacaaacagttcaggaattgcatgctcacaacaatttgttgtggaaaaaaccccctcggagacgatgaagcttccgctacagtgtcaaaaactgaaacatctcaggtcgccccagca

SEQ ID NO: 11965 - DNA, 1044 bp, Artificial Sequence
  derived and/or modified sequence
atgaacggaaccgagggaccgaatttctacgtgcctttcagcaacgcgactggagtcgtgcgctccccattcgaatacccccagtactacctggccgagccatggcaattctcaatgctggcggcatatatgttcctgctgatcgtgttgggattcccgattaactttctgaccctgtacgtgaccgtccaacacaagaagctgagaactccgctgaactacatcctgcttaatctggccgtcgccgacctgttcatggtgctgggagggttcacttcgactctctacacttccctccatggatactttgtgtttggaccaaccggctgtaacctcgaggggttcttcgccactctgggtggagaaatcgctctctggtcgctggtggtcctggccatcgagcgctacgtggtggtgtgcaagccgatgtcgaactttaggttcggcgaaaatcacgcgattatgggcgtggcctttacttgggtgatggctctggcctgcgccgcccctcccttggcgggatggtcgcggtacatcccagaagggctgcaatgttcgtgtggaatcgattactacactctgaagcccgaagtgaacaacgaatccttcgttatctacatgttcgtcgtccattttacgatccctatgatcattatcttcttctgctacggccagcttgtctttactgtgaaagaagccgccgcacaacagcaggaatccgccaccactcagaaagcggaaaaagaggtgaccaggatggtgatcattatggtgattgccttccttatctgctgggtgccttatgcgagcgttgcattttacatcttcacccaccaaggatcaaacttcggcccaatcttcatgaccatacctgctttcttcgccaagtcggccgcgatctacaaccctgtcatctacattatgatgaacaagcagtttcgcaactgtatgctcaccactatatgttgtggcaagaatccgctgggagacgacgaagcatcggccactgtgtcaaaaaccgaaaccagccaagtggctccagcc

SEQ ID NO: 11966 - DNA, 1044 bp, Artificial Sequence
  derived and/or modified sequence
atgaatggaacagagggaccaaacttctatgtacccttctcaaacgctactggtgtcgtaagaagtcccttcgagtatcctcagtattaccttgctgagccctggcaattctccatgctcgccgcatatatgttcttgcttattgttctaggcttccctattaacttcctcaccctgtacgtgacagttcagcataagaagttgagaacccctctgaattatatcctgcttaatctagctgtcgccgatcttttcatggtcctaggtggctttaccagcacgttgtacacgtctttacatggatactttgtgttcgggcctacaggctgtaatctggaggggtttttcgccaccctcggaggtgaaatcgccctctggagcctggtggtcttggccatcgaaagatacgttgtggtgtgtaaacctatgtcgaactttaggtttggcgagaatcacgcgatcatgggtgtcgcatttacctgggtgatggcgctagcgtgtgccgctccccctttggcgggatggtcccggtatatcccggaggggctgcagtgttcttgtggtatagattattacacactgaagccagaagtgaacaacgagtccttcgtgatctacatgtttgtggtccacttcacaataccgatgatcataattttcttttgttacggacaattagtgtttacagtgaaggaggccgctgcacagcagcaggagagtgcaactactcagaaggccgaaaaggaagtgacccgaatggtaataataatggttattgctttcctcatctgctgggtgccctacgcgagcgtcgcgttttatattttcacccaccagggcagtaatttcgggccaatctttatgactatcccggccttcttcgctaagagcgcggccatttataaccctgtgatttatatcatgatgaataaacaatttagaaattgcatgctcacaacaatctgttgtggcaagaatcctttgggagacgatgaagcttcagccactgtgtccaaaacggaaacttcccaagttgcccccgct

SEQ ID NO: 11967 - DNA, 1044 bp, Artificial Sequence
  derived and/or modified sequence
atgaatggtacagaaggccctaatttttacgttccgttctcaaacgcaacaggcgtggtgcgctcaccattcgaatacccccagtattatcttgctgaaccttggcagtttagcatgctggctgcttacatgttcctgttgattgtccttgggtttcctatcaacttcctcactctctatgtgacggtccaacacaaaaagcttagaactcctctcaattatatcctgcttaacttggccgtggctgatctgtttatggtactcgggggctttacctctactctgtacacatctttgcacggatactttgtgtttgggccaactggctgtaacctggaggggttttttgcaaccctcggcggggaaatcgctctgtggtctctagtggtactggctatcgagcgctacgtggtggtatgcaagcctatgagcaacttcaggtttggtgaaaatcatgccatcatgggggtcgcatttacgtgggtaatggctctggcatgcgccgccccacctcttgccggatggtcaaggtacatacccgagggtttgcagtgctcctgtggtattgattactacacgcttaagcccgaggttaacaacgaaagcttcgtgatttacatgttcgtggtgcatttcacaatccccatgatcataatttttttctgttatggccagctggtcttcactgtcaaagaggctgccgcccagcagcaagaatccgctacgacccagaaggcagaaaaggaagtgacaaggatggtcataatcatggtaattgcgtttctcatctgctgggtaccatacgcaagtgtcgcgttctatattttcacccaccagggatcgaattttggtcccatatttatgacaatacctgccttctttgccaaaagcgctgctatttacaacccagtgatttacatcatgatgaacaaacagtttaggaattgcatgctgacgactatctgctgcggaaaaaaccctttgggcgatgatgaggccagcgcgaccgtgtcaaaaaccgagacaagccaggttgcaccggca

SEQ ID NO: 11968 - DNA, 1044 bp, Artificial Sequence
  derived and/or modified sequence
atgaatggaaccgaaggacctaacttctacgtgccattttcaaacgccacgggagtggtgaggagcccgttcgagtacccccaatactacctggccgaaccgtggcagttctcgatgctggcggcttacatgttcctgctgatcgtgctcggattccctatcaacttcttgacgctctacgtcactgtgcagcacaaaaagctgaggacgccgctgaactacatcctgctgaacctggcggtcgccgatctcttcatggtgctgggcggcttcacctcaaccctctacacgtcgctccacggttacttcgtctttggcccgactggatgcaacctggaaggatttttcgcgaccctgggcggagaaatcgcactgtggtcattggtcgtcctcgcgatcgagagatacgttgtggtgtgcaaaccaatgagtaacttccgattcggcgagaaccacgcaattatgggagtcgcatttacctgggtgatggcccttgcatgcgctgctcctccactcgctggatggtcacgctacatcccggaaggactgcaatgcagctgcgggatcgattactataccctcaaacctgaagtcaacaatgaatcgtttgtcatctacatgtttgtggtgcatttcaccatccctatgatcattatctttttctgctacggtcagctcgtgttcaccgtgaaggaggccgcagcgcaacagcaggaatcggcaaccacgcaaaaagccgaaaaggaagtgactagaatggtgattatcatggtgatcgccttcctgatctgctgggtgccgtacgctagcgtcgcattttacatcttcacccaccaagggtcgaactttgggcccattttcatgactatcccggccttctttgcgaaaagcgccgccatctacaatcctgtgatttacatcatgatgaataagcaatttcggaactgtatgttgactaccatttgctgcgggaagaacccgcttggagatgacgaagcgtccgcaaccgtgtccaagaccgaaacttcacaagtggctccggcg

SEQ ID NO: 11969 - DNA, 1044 bp, Artificial Sequence
  derived and/or modified sequence
atgaatggaactgagggacctaatttctacgtaccattctccaacgccaccggggtcgttcgtagcccatttgaatatccgcagtactacctggctgaaccatggcaatttagtatgctggccgcctatatgttcctgctgatagtcctcggttttcctataaacttcttaaccttgtatgttaccgtccagcataagaagttgcggactcctctgaattacatcctgctgaacctggcagtggccgacctattcatggtactgggtggctttaccagtaccctgtatacaagtctgcacgggtactttgtgttcggcccgactggctgcaatctggaaggctttttcgctaccttgggaggagagattgccctgtggtccctcgtcgtgctggccatcgagcgctacgtggtagtatgcaagccaatgtcgaatttcagatttggcgaaaaccatgcaatcatgggcgtggcgtttacttgggtgatggcccttgcctgcgctgctcctcctttagccggctggtcacggtatatccccgaaggactccagtgctcgtgtggtattgattattatacccttaaacccgaagtaaataacgagtccttcgttatatacatgtttgtggtgcatttcaccattcctatgataatcatatttttctgttacgggcagctggtgttcacggtgaaagaagctgctgctcagcagcaggaatctgctaccacacaaaaggctgagaaggaagttactagaatggtcatcatcatggtgatcgcctttttgatttgctgggtgccttatgcatccgtagccttttatatattcacacatcagggttccaatttcggacccattttcatgacaatccccgcctttttcgccaaatcggctgccatatataatcctgtgatctacatcatgatgaacaaacagtttcgcaactgcatgttgaccaccatatgttgcggtaaaaacccccttggagatgatgaggcctccgcaactgtatccaaaacagaaaccagtcaggttgccccagct

SEQ ID NO: 11970 - DNA, 1044 bp, Artificial Sequence
  derived and/or modified sequence
atgaatggtactgagggccccaatttttatgtcccattctccaatgccacgggagtcgtgaggagtccatttgaatacccacaatattacctggcagaaccatggcagttctccatgctggcggcctacatgttcctcttgatcgttctggggttcccgatcaacttcctgacactctatgtaacggtacagcataaaaaattgagaactcctttgaactacattctgttgaatctggcagtcgcagatctgtttatggtcctcggaggatttacctccaccctctacacaagtctgcacgggtatttcgtgttcggtcccaccggctgtaacctggaaggtttcttcgccacgctgggtggggagatcgccctctggagcctggtcgttttggctattgagcggtacgtggtggtgtgtaagccaatgtctaattttcggtttggagagaaccacgccataatgggcgtggcgttcacatgggtaatggctctggcttgtgcagccccacccttggccgggtggagtcgatacatccctgaaggactgcagtgctcttgtggaatcgattattatacacttaagcctgaggtgaacaacgaaagttttgtaatttacatgttcgtggttcacttcaccatacctatgataatcatctttttctgctatggtcagctggtgtttaccgttaaagaggctgctgcacagcagcaggagtcagcgaccacccaaaaagcagagaaggaagtgacaagaatggttatcatcatggtcatcgctttcttgatatgctgggttccctatgccagcgtggcattctatatcttcacccatcaaggcagtaacttcgggccaatctttatgacgatccccgcctttttcgccaagagcgctgcaatttataatcccgttatttatattatgatgaataagcagtttcgaaattgtatgctgaccacgatttgctgtgggaagaaccccctgggcgatgatgaagcgtctgcgacggtgagcaagactgagacaagtcaggtcgcaccagcc

SEQ ID NO: 11971 - DNA, 1044 bp, Artificial Sequence
  derived and/or modified sequence
atgaacggtaccgaaggccctaacttctacgtgcctttttcaaatgctacgggagtcgtgaggtccccattcgagtacccgcaatactacttggccgaaccatggcagttttcaatgcttgcggcctacatgttcctgctgatcgtgctgggctttccgattaacttcctcaccttgtacgttactgtgcaacataagaaacttcggaccccgctcaattacatcctgctgaacctggccgtcgccgatctcttcatggtgctcggcggattcacctcgactctgtatacttccctgcatgggtatttcgtctttgggccgactggctgtaacctggagggattctttgcgaccctgggcggtgaaatcgccctgtggtccctcgtggtcttggccatcgagcgctacgtggtggtttgcaagccgatgtcgaactttagattcggagagaatcacgcgatcatgggggtcgctttcacttgggtcatggcgctcgcatgcgcagcaccgccacttgcaggctggagccgctacataccagaaggactgcagtgctcgtgtggaatcgattactatacccttaaacctgaagtgaacaacgaatcattcgtgatctacatgtttgtagtgcacttcaccatcccaatgatcatcatcttcttctgctacggacagttggtattcactgtgaaagaggccgccgcccaacaacaggagtcagcaaccacgcagaaggcagagaaggaagtgacccgcatggtgattatcatggtgatcgccttccttatatgctgggtgccgtacgccagcgtggccttttacatcttcactcaccaggggagcaatttcggccctatctttatgaccatccctgcctttttcgcgaagagcgcggcgatctacaatccggtgatttacatcatgatgaacaaacaattcagaaactgcatgctgactaccatctgctgtggaaagaatccgctcggagacgacgaggcctctgccaccgtgtcaaagactgaaacctcgcaggtcgcgcctgcg

SEQ ID NO: 11972 - DNA, 1044 bp, Artificial Sequence
  derived and/or modified sequence
atgaacggcaccgagggtcccaatttctatgtaccctttagcaatgcaactggtgtcgtgcggtctccctttgagtacccccagtattaccttgcagagccatggcagttctccatgttagccgcttacatgttcctgctgattgttttggggttcccgatcaactttttgacgttgtacgtcaccgtgcagcataagaagctgcggacgccgctgaactatatccttctcaaccttgccgtagcagatttgttcatggttttaggtggttttacgtccaccttgtacacctcgcttcacggatacttcgttttcggcccgacgggctgcaatctggagggcttttttgccacgctgggtggcgaaatcgcactttggagtttggtcgttttggcgatagaacgctacgtggtggtctgcaagccgatgtccaactttcgctttggcgagaatcatgccattatgggagtcgcgttcacgtgggtgatggcactggcctgcgcagcgccacctctagcaggttggtctcgatacatcccggagggcttgcagtgttcgtgcggtatagattattatacgctgaaacccgaggtgaacaatgagtcgttcgtgatctacatgttcgtggttcacttcactatcccaatgataatcatatttttttgctatggccagctggtgttcacagtgaaagaagccgccgcgcaacagcaggagagcgcaactacccagaaggctgagaaggaggtgacacgaatggtgattataatggttattgcgtttctgatttgctgggtaccctacgcctcggtggccttctatatatttacacaccaaggaagcaatttcgggcctattttcatgacgatcccggccttctttgcgaagagcgccgcgatctacaacccggtgatctatattatgatgaacaagcaattccggaattgtatgctgacgaccatttgctgcggaaagaatcccctgggagacgacgaggccagtgcaacagtttctaagaccgagacatcacaggtggcccccgca

SEQ ID NO: 11973 - DNA, 1044 bp, Artificial Sequence
  derived and/or modified sequence
atgaatgggaccgagggaccaaacttctacgtgccatttagcaatgctaccggggttgtacgttctccatttgaatatccgcaatactacctggccgaaccatggcagttttcaatgttggcggcttatatgttcctgttaatagtgctggggtttccaatcaatttcctgaccctatatgtgacagttcaacacaagaagctccgcactcctttgaactacattctgctcaaccttgctgttgccgacctgttcatggttctgggtggcttcaccagtacactctatacttctctgcatgggtacttcgtcttcggccctacaggctgcaacctggagggatttttcgcgacgctcggcggcgaaatagccctctggagtcttgtggtcctcgccattgaacgctatgtggttgtgtgtaagcctatgagtaacttcagatttggagaaaatcatgccatcatgggagtagcattcacatgggttatggctctggcctgcgccgccccccccctggcaggctggagtcggtacatccccgaaggcttgcagtgttcttgcggcatcgattactacaccttaaaaccagaggtgaacaacgagagctttgtgatctacatgtttgtggtccatttcaccatacccatgataatcatcttcttctgctacggtcaattagtgttcacagtgaaggaggctgcagctcagcagcaggagtccgctacgacccagaaggcggagaaagaagtaacacgtatggtgattatcatggtgatagcttttctgatttgttgggttccctatgctagcgtggccttttacattttcacacatcagggaagtaacttcggccctatttttatgacaattccagcgttttttgctaagtcggcggccatttacaaccccgtgatttatatcatgatgaacaagcagttcagaaattgtatgctgaccacaatctgctgtggaaagaatcctctgggcgacgacgaagcttccgctacagtttccaagaccgagaccagtcaggtggcacctgca

SEQ ID NO: 11974 - DNA, 1044 bp, Artificial Sequence
  derived and/or modified sequence
atgaacggaacagagggacccaacttttacgtgccattttctaatgcgactggggtggtccgttccccgttcgagtacccgcagtactatctggctgagccttggcaattttcaatgctcgcagcctatatgtttctcctcattgtgttgggcttcccaatcaactttctgacattgtatgtaactgtgcagcacaaaaagttgcgcacgccactgaactacatactgctcaacctggctgttgcggatctgttcatggtactgggaggattcactagcaccctgtacacttctctccacggttactttgtatttggtccgaccgggtgcaatctcgagggatttttcgccactttaggtggagaaatcgccctttggtcactggttgtgctggctatcgaaaggtacgtcgtggtctgcaagcctatgtctaattttcgattcggggaaaatcacgccatcatgggagttgcattcacctgggtaatggcccttgcatgtgcagctcctccgctcgcagggtggagcagatatattccagaggggctccagtgcagctgcgggatcgattattacacccttaagccggaagtcaataatgaaagcttcgttatctacatgtttgtggttcacttcaccatcccaatgataatcatctttttttgctacgggcagctggtgttcactgtaaaggaggccgcggcccagcaacaagagagcgccacaacccagaaggccgaaaaggaggtcacacgtatggtgattattatggttatcgcgttcctgatctgctgggtgccctatgcctcagttgcattttacattttcacccatcagggcagcaacttcggtcccatcttcatgacaatccccgcatttttcgctaaaagtgctgcgatttataatcccgttatctatatcatgatgaataaacagtttcggaactgcatgctcacaaccatttgttgcgggaaaaatcccttaggcgatgacgaggcctctgcaacggtttctaagacagaaacctcgcaggtggcccccgct

SEQ ID NO: 11975 - DNA, 1044 bp, Artificial Sequence
  derived and/or modified sequence
atgaatggaaccgaggggcctaatttttatgtgccattctcgaacgcaacaggggtggtaaggagtcctttcgaatatcctcaatattacctggctgagccgtggcagttctctatgttggccgcctatatgttccttttgatcgtgctggggtttccgatcaactttctcactttatacgtaacagtccagcataagaaactcagaactccgttaaactacattcttctgaacctcgctgtcgccgacctttttatggttctgggtgggtttacgagcacgttgtacacgtcacttcatggatactttgtattcggcccaaccggctgtaacctggaaggctttttcgcgacacttggtggcgagatcgccctttggtcactggtcgtgctcgcaatagaaaggtatgtcgttgtttgtaaacctatgtccaattttcggttcggtgagaaccatgctattatgggcgtcgcatttacctgggttatggccttggcctgcgccgcgccaccgttggctggttggagccgctacataccagaaggactgcagtgctcctgtggcattgactactacacattgaagcctgaagtcaacaatgagagcttcgtgatctatatgttcgtggttcactttacaatccctatgatcattattttcttctgttacgggcaactggttttcactgtgaaagaagccgccgcacagcaacaagagagcgcaactacccaaaaagccgagaaagaggtcacacggatggtcataatcatggtcatcgcattccttatatgttgggttccctacgcttccgtggccttttatatattcacgcatcagggatccaacttcgggcctatcttcatgaccatcccagctttcttcgccaagagtgccgccatctataatcctgttatctacattatgatgaacaagcaattccgcaattgcatgcttactacaatttgttgcggcaaaaatccgttgggcgatgatgaggcctctgctaccgtctccaagactgagacctctcaggtcgcaccagcc

SEQ ID NO: 11976 - DNA, 1044 bp, Artificial Sequence
  derived and/or modified sequence
atgaatgggactgaaggacccaatttctacgtgcccttctccaatgcaaccggcgtggtgcgctcccccttcgagtatccccagtattatctggcagagccttggcagttcagcatgctggcagcctacatgtttttacttatagtactgggctttcctataaatttccttaccctgtacgtaacggtgcaacacaaaaagctgaggacaccgctgaactacatactgctgaacctggctgtggcagatcttttcatggtccttggaggtttcacgtctaccttgtacacgagcctgcacggatactttgtgttcggccccaccggctgcaatctggaaggcttctttgctaccctcggaggagagatcgctctgtggtcactcgtagtgttggctatcgagcgatatgttgtagtctgcaaacctatgtctaacttccggtttggtgaaaatcacgccataatgggggtcgctttcacctgggtgatggccctggcatgcgccgcaccccctctggctggttggtcgcgttatatcccggagggccttcagtgtagttgtggaatcgattactacaccctgaagcctgaagtcaacaatgaaagttttgtgatctacatgttcgtcgtccatttcaccatccctatgatcatcatttttttctgttacggacagctggtattcaccgtcaaagaggcggccgctcagcaacaggaatctgccacgacacagaaggctgaaaaggaagtcacccgtatggtgataattatggtgatcgcatttctcatctgttgggtcccctacgcaagcgtcgccttctacatttttactcaccaaggatccaattttggtcccatttttatgaccatccctgcctttttcgccaagtccgcggctatctataaccctgtgatctacattatgatgaataagcagtttaggaactgtatgctgaccactatttgctgcggcaaaaacccactgggagacgacgaggcatcggctactgtgtccaagaccgaaacaagtcaggttgcgcctgca

SEQ ID NO: 11977 - DNA, 1044 bp, Artificial Sequence
  derived and/or modified sequence
atgaatggaactgaaggccctaacttttacgtgcctttttccaacgccaccggagtggtccggtcgccctttgagtatccacaatactacctggctgaaccctggcagttttccatgctcgcagcatacatgtttctgcttatagtgctggggtttccaattaacttcctgactctgtacgtgaccgtgcaacacaaaaagttgagaacccccttgaactatattctgcttaatcttgccgtggcggacctgtttatggttcttggcggttttactagcactctgtacaccagccttcatgggtacttcgtgttcggccccaccggctgcaaccttgagggattctttgctaccctgggtggggaaatcgcattgtggtcgctggtcgtgctcgcaatagagcgctacgttgtggtgtgtaagcctatgtcgaactttaggtttggcgagaaccacgccattatgggggtggctttcacctgggttatggcactggcatgtgcagcccctccgctggcagggtggtcgagatatatccccgagggattgcaatgctcatgtggtattgattactacactcttaagcccgaagtcaataacgaatcgttcgtgatttacatgttcgtcgtccattttacgattcctatgataatcattttcttttgctacggtcaactcgtgttcaccgtgaaagaagcggccgcccaacaacaggagagcgcgactactcagaaggccgaaaaagaggtgactaggatggtcatcatcatggtcatagcgtttctgatttgttgggtgccatacgcaagcgtggccttttacatctttacccaccaaggttctaatttcggacctatattcatgacgatccccgcctttttcgctaagtcggcagcaatttacaatcctgtgatctacatcatgatgaacaaacagtttaggaattgcatgcttaccactatctgctgtggtaagaacccactcggtgatgatgaagcatcagcgaccgtctctaagacggaaaccagccaggtggcaccagcc

SEQ ID NO: 11978 - DNA, 1044 bp, Artificial Sequence
  derived and/or modified sequence
atgaatggaacagagggacccaacttttatgtgcctttcagtaacgcgactggcgtcgttcgttccccgttcgagtacccccagtactacctggctgagccgtggcagttcagtatgttagccgcctacatgttcttgctcatcgtcctgggcttcccaatcaacttcctcactctctacgtcaccgtccagcacaagaagctccgtacccccttgaactacatcctgttgaaccttgctgtggccgacctctttatggttctcggcggcttcacgtccaccttgtacacgtctcttcacggttactttgtgttcggccccaccggctgcaacctggagggtttttttgcaacacttggaggcgagatcgctctatggtccctggtcgtcttggccatcgagcgctacgtcgtggtctgcaagcccatgtctaatttccgttttggtgaaaaccacgcgattatgggtgtcgcgttcacttgggtgatggcgttggcttgtgctgcaccccctctcgccggttggagcaggtacatccctgagggtctgcagtgcagctgtggtatcgactactacacactcaagcccgaggttaacaacgagtctttcgtaatttacatgttcgtggtccatttcaccattcctatgatcatcatctttttctgctacgggcaactcgtcttcaccgtgaaggaggccgctgcacagcaacaagagtccgcaaccacgcagaaggccgaaaaggaggtcactcgcatggtcattattatggtgattgcgttccttatttgctgggtgccgtacgcgtccgtcgctttctacatcttcactcaccaaggctccaacttcggtcccatctttatgactattcccgccttcttcgctaagagcgccgcaatctataaccccgtcatctacatcatgatgaacaagcagttcaggaactgtatgctcacgaccatttgctgtggcaagaaccccttgggcgatgacgaggcctctgccaccgtctccaaaaccgagacgagccaagtcgccccggcg

SEQ ID NO: 11979 - DNA, 1044 bp, Artificial Sequence
  derived and/or modified sequence
atgaacggcaccgagggaccaaatttctacgtgcctttcagcaatgctactggagtggtgaggtccccttttgaataccctcaatactacttggcagaaccctggcaattctccatgcttgcagcatatatgtttcttctgattgtcctgggattcccgatcaacttccttactctttacgtgaccgtccagcataagaagctgcgaacccccctcaactatattctgctgaacctggcagtcgcggaccttttcatggtccttggtggttttacttcgaccctctacacctccctgcacggctactttgtgttcggaccaaccggttgtaaccttgagggtttctttgcaacgttgggaggagagattgcactgtggtcactcgtggtgctggcaattgagcgctacgtggtggtctgtaaacctatgtccaatttccgttttggagaaaaccacgcaataatgggagtggcttttacctgggttatggcactggcgtgtgccgcgccccctcttgcgggttggtcgagatacattccggagggactgcagtgttcatgcggcattgattactatacccttaagcctgaagtcaataatgagagttttgtcatttacatgttcgtcgtgcactttaccattcctatgatcattatctttttctgttacggtcagctcgttttcactgtgaaggaagccgcagcacaacagcaagaaagcgccacgacccagaaggcagagaaggaggtgacccgcatggtcatcattatggtgattgccttccttatttgttgggtgccatacgcttcggtggccttctacatcttcacccaccagggcagcaactttggacccatattcatgactattcctgccttctttgcaaagtcggccgcgatctacaatccagtcatttacattatgatgaacaagcaatttaggaactgcatgcttaccaccatttgctgtggaaagaacccactgggggacgacgaggcatcagcaacggtgagcaagacggaaacctcgcaggtggcacccgcg

SEQ ID NO: 11980 - DNA, 1044 bp, Artificial Sequence
  derived and/or modified sequence
atgaacggtaccgaggggcctaacttctacgtccctttcagcaatgcaaccggtgtggtccgtagcccgttcgaatacccgcagtactacctggcagaaccctggcaattcagcatgcttgcagcgtatatgtttcttctgatcgtcctgggcttcccgattaactttctcactctgtacgtgacggtccaacacaagaagctgcggactcctctgaactacatactcctcaacctggctgtcgcggacctgtttatggtcctcggagggtttacctcgaccttgtacacttcgcttcatggctacttcgtttttggacccaccggttgtaaccttgagggatttttcgccaccctcggaggtgaaattgcactgtggtcactcgtcgtactggcaatcgagcgctatgtcgtggtctgcaagcctatgtccaactttaggttcggcgaaaatcatgccatcatgggagtcgcatttacttgggtgatggcactggcatgcgctgcaccgcctctcgcggggtggtcaaggtatatacccgaaggcctccaatgttcgtgcggaatcgattactacactctgaagcctgaagtgaataacgagtcgtttgtgatttacatgtttgtcgtgcactttaccattccgatgattatcatattcttttgttacggccagctggtgtttaccgtcaaggaagcagcagcccagcagcaagaatccgccactacccaaaaggccgaaaaggaggtgaccagaatggtcattatcatggtcatagcctttctgatttgctgggtgccctacgcttctgtggccttctacattttcactcatcagggatccaactttggccccattttcatgactatccctgcattctttgcaaagtccgccgctatttacaatcctgtgatctacataatgatgaacaagcagttcaggaattgcatgcttacgactatttgttgtgggaaaaatccccttggggatgacgaggcttccgcaactgtgagcaagaccgaaacctcccaagttgccccagcg

SEQ ID NO: 11981 - DNA, 1044 bp, Artificial Sequence
  derived and/or modified sequence
atgaacgggactgagggcccaaatttctacgtcccattctctaacgccaccggcgtggtcaggtcccccttcgaatacccccaatattacctggccgagccttggcagttctcaatgttggctgcctacatgtttctcttgatcgttttggggtttccaataaacttcctcaccttgtacgtgaccgtgcagcataaaaaattgaggacaccactgaattacatacttcttaacttggcggtcgccgatcttttcatggtgttaggggggttcacgagcaccttgtataccagcttgcacggatactttgtatttggccctacaggatgtaatcttgaggggtttttcgcaacgctcggcggcgaaattgccttgtggtcgttagttgtgctggctatcgagcgctacgttgtggtgtgtaagcctatgagcaacttccggtttggcgagaatcacgccattatgggcgtcgcatttacctgggttatggcactggcatgtgccgccccccctctagccggatggagcaggtacatcccagaaggactacagtgctcctgtgggatcgattattatactctcaaacctgaggtgaacaacgaaagttttgtgatttacatgttcgtggtgcactttaccatcccaatgatcatcatctttttttgttatggccagttagtatttactgttaaagaggcggcagcgcagcagcaggagtccgccactacacagaaggcggaaaaagaggtgacacggatggtgattattatggtgatagcatttctgatctgctgggtgccatatgcgagcgtagcattctatattttcacacaccagggcagcaatttcgggccaatctttatgactatacccgccttttttgcgaagtcagccgctatttataaccccgtcatctatatcatgatgaataaacagtttcggaattgcatgcttaccacgatttgttgcggaaagaacccacttggtgatgatgaggcctctgctaccgtttctaagacagagacttctcaggtagctcccgca

SEQ ID NO: 11982 - DNA, 1044 bp, Artificial Sequence
  derived and/or modified sequence
atgaatggaaccgaaggaccgaatttctacgtgccattctccaatgccaccggggtggtcagatccccgttcgagtacccgcagtactacctggcagagccgtggcagttctcgatgcttgcagcgtacatgttcttgctcatcgtgctgggcttcccgatcaatttcctcactctctacgtcaccgtgcaacacaaaaagctccggacgccactgaactacatcctgctgaatctggccgtggccgatttgttcatggtcctcggaggcttcacctcgactctctacacttcccttcacgggtactttgtgtttggacctactggatgtaatctggaaggcttttttgccactctgggaggggaaatcgccctttggtcccttgtcgtgctcgcgatcgagaggtatgtcgtggtttgcaagccgatgtcgaacttccgctttggtgagaaccatgcgatcatgggagtggcctttacctgggtcatggcactggcatgtgctgcccctccgctggctgggtggtcacggtacatcccggaaggactccagtgttcgtgcggaatcgactattacactctcaagccagaggtgaacaacgaatcgttcgtcatttacatgtttgtggtgcatttcaccatcccaatgatcattatcttcttttgctacggccaactggtgttcaccgtgaaagaggccgctgcacagcaacaggagtcggccactactcagaaggccgaaaaggaggtgactcgcatggtgatcatcatggtgatcgcgttcctcatctgctgggtgccgtacgcatcagtcgcgttttacatctttacccatcagggctcaaatttcggacccatctttatgactatcccagcgttcttcgccaagtcggctgctatctacaaccctgtgatctacatcatgatgaataagcagttccggaattgtatgctcaccactatctgctgcggcaagaacccactgggtgatgacgaagcatccgcgactgtgagcaagaccgagacttcccaagtcgcgccggcc

SEQ ID NO: 11983 - DNA, 1044 bp, Artificial Sequence
  derived and/or modified sequence
atgaacgggacggagggacctaatttctacgtccccttcagcaatgcaacaggagtagttcgctcccccttcgaatatccccagtattatctggccgagccatggcagttcagtatgttggcagcttacatgtttctgctgatagttctgggctttccaattaacttcctgacgttgtacgttaccgtccaacacaagaagcttcgtaccccgctgaactacatccttttaaacctagcagtagccgatcttttcatggtcttaggcgggttcacctctactttatatacctcccttcacggctattttgtattcgggcctaccggttgtaatctcgaaggcttcttcgctacgcttgggggagaaatcgcgttgtggtctctcgtggtgctggccatagagcgatacgtcgtcgtttgcaaacccatgtcgaattttcggttcggcgaaaaccatgcaattatgggagttgcctttacatgggttatggccttggcatgcgctgcgccacctttagctggatggtcaagatacattccagagggccttcaatgcagttgcggaatcgactactataccttaaagccagaagtaaacaacgaatcctttgttatctatatgttcgttgtgcacttcactattccgatgataatcatatttttctgctacggccaactggtcttcactgtcaaagaggccgctgcgcagcaacaagagagtgccacgacccaaaaagcggaaaaggaggtcacacgcatggttatcatcatggtcatcgcctttctgatctgctgggtcccatatgcatccgttgcgttctacattttcacccaccaaggatccaatttcgggccaatcttcatgacaattccagcgttcttcgcgaagagcgcggctatttacaatcctgtaatttatatcatgatgaataagcagttccgtaattgcatgcttactaccatctgctgtggtaagaacccgttaggggatgacgaagcgtctgcgactgttagtaagaccgagactagccaggtcgcgccagct

SEQ ID NO: 11984 - DNA, 1044 bp, Artificial Sequence
  derived and/or modified sequence
atgaatggaaccgagggaccaaacttctacgtccctttttcaaacgcaactggggtcgtgaggtccccttttgagtacccgcagtactaccttgcagaaccatggcaattttccatgctcgccgcatacatgtttctcctgatcgtccttgggtttcccattaacttccttaccttgtacgtgaccgtgcaacataagaaattgcgtactccacttaactacatcctgctgaacctcgcagtggcagatcttttcatggtcctgggaggatttacttccaccctctacacctccctgcatggatactttgtgtttggacctaccggatgtaacctggaaggttttttcgcgactctcggtggggaaattgcactttggagcctggttgtccttgccattgagcgctacgtggtggtgtgtaaacccatgtcgaattttcgcttcggagagaaccatgccataatgggcgtggcattcacttgggtgatggcgctggcatgcgcagcacctcctctggcaggatggtcccggtatattcctgaaggactgcaatgctcgtgtggtatagactactatactctgaaaccagaagtgaataacgagtcatttgtgatttacatgttcgttgtgcattttacgatccctatgatcatcattttcttttgctatggtcagctggtgtttaccgttaaggaggcagcggcacaacaacaggaatcggcaactactcaaaaggcagagaaagaagtgactcgcatggtgataatcatggtgattgccttcctgatatgctgggtgccctacgcatcagtggcattctacattttcacccaccagggatcgaactttggccctattttcatgaccattccagcattcttcgctaagagcgcggcgatttacaacccagtgatctacattatgatgaacaaacagtttagaaattgtatgctgactaccatatgttgtggtaagaacccactcggcgacgacgaagcgtcggctaccgtctctaagactgaaacctcgcaagtcgcgccagcc

SEQ ID NO: 11985 - DNA, 1044 bp, Artificial Sequence
  derived and/or modified sequence
atgaatggaacagagggtccaaatttttatgttcctttctccaatgcaacaggagttgtaagatcaccatttgaatatccacaatattatttagctgaaccatggcaattcagtatgttagcagcatacatgtttttacttattgtacttggttttcctataaattttcttactctttatgttactgttcaacataagaaattacgtactcctttgaattatattttacttaaccttgcagttgctgatttgttcatggttcttggaggatttacatctactctttatacaagtttacatgggtatttcgtttttggaccaacaggttgtaatcttgaaggattttttgcaacattaggaggagagattgctttatggagtttagtcgttttggctattgaaagatatgtagtagtatgtaaaccaatgtctaactttcgtttcggagaaaatcacgcaattatgggagttgccttcacttgggtaatggctttagcttgtgctgcacctccacttgcaggatggtcacgatatatcccagaaggacttcaatgttcatgtggaattgattattatacactaaaaccagaagttaataatgaatcattcgttatatatatgtttgtagtacattttacaattccaatgattattattttcttttgttatggtcaattagtttttacagtaaaggaagcagctgctcaacagcaagaatcagctacaacacaaaaagctgaaaaagaagttactagaatggtcataattatggttattgcttttcttatatgttgggttccatatgcttcagtggctttctatatttttacacatcaaggaagtaattttggtcctattttcatgacaattccagccttttttgcaaaatcagctgctatttataatccagttatttatataatgatgaataaacaatttagaaattgtatgttaactactatttgttgtggaaaaaatccattaggagatgatgaagcaagtgcaacagttagtaaaacggagactagtcaagtagctccagct

SEQ ID NO: 11986 - DNA, 1044 bp, Artificial Sequence
  derived and/or modified sequence
atgaacggtaccgagggccctaacttctacgtgccattctccaacgctactggcgtcgtgaggagcccgttcgaatatcctcaatattaccttgccgagccctggcagttttccatgctagcagcatacatgttcctgctgatcgtgcttggattccccattaacttccttacgctctacgtgactgtccaacacaagaaactcaggacccctttaaactacatactgctgaatctcgcagtagccgatcttttcatggtcctcggtggcttcacctccaccctctatactagtctccatggttacttcgtctttgggcctacagggtgtaatctggaggggttcttcgccacactgggcggggaaatcgcgctatggtctctggtggtcctcgctatcgagcgctacgtggttgtgtgcaagccgatgtccaatttcaggtttggggaaaaccacgccataatgggcgtcgccttcacctgggttatggccctggcatgcgctgcacctccacttgctgggtggagtaggtatatccccgaaggtctgcagtgctcttgcggaattgactattatacccttaaacctgaagtgaacaacgaatcattcgtcatatatatgtttgtcgtgcactttacaatacccatgatcataatttttttctgctatgggcaactggtctttacggtgaaagaggccgcagcccagcagcaagagagtgcaaccacccagaaagccgaaaaggaagttactcgaatggttatcatcatggtaatcgcctttctgatctgctgggtgccatatgccagcgtggccttctacattttcactcaccaaggatctaatttcgggcctatttttatgaccattcccgcgttctttgcaaagagcgcagctatttataatccagttatttatataatgatgaacaagcagtttagaaattgcatgttgacaactatctgttgtggcaagaaccctctgggagacgacgaagcatcagctacggtgagcaagacagaaacttcgcaggtggctccagcg

SEQ ID NO: 11987 - DNA, 1044 bp, Artificial Sequence
  derived and/or modified sequence
atgaacggcaccgaaggccccaatttctacgtacctttctccaacgccaccggagtcgtacgctctcctttcgagtatccgcagtactatctggctgagccctggcaattctctatgctggcagcttacatgtttctgttgattgtcctgggattcccaatcaactttctgaccctttatgtgactgtgcagcacaaaaaactccgcacaccgctcaactatatcctgctcaatctggccgtcgcggacttgttcatggtgctcggcggattcacgtcaacattgtacacaagcctgcacggttacttcgtgtttggtccaaccggttgtaacctggagggtttcttcgcaaccctgggcggtgaaatagcgttgtggtcactcgttgtgcttgctatagagagatacgtggtggtgtgcaaacccatgtccaactttaggtttggcgaaaatcacgctatcatgggagtagcattcacctgggtgatggcccttgcttgtgccgcccccccactcgcgggatggagtaggtacattcctgaaggtcttcagtgcagctgcggcatcgactattacactctcaaaccggaagtgaataacgaaagctttgtgatatatatgttcgtggttcattttacaatccctatgatcattatcttcttctgttacggtcaactggtcttcaccgtgaaggaggccgccgcccaacaacaggagagcgcgaccactcaaaaagctgagaaagaggtcactcgcatggtcatcattatggttattgcttttctgatttgctgggtcccatacgcttctgtcgccttctatatcttcactcatcagggctctaattttggccctatctttatgactatccccgcattctttgccaagtccgccgctatatataatcctgtgatttacatcatgatgaataaacagtttagaaactgtatgcttaccactatctgctgcggcaagaatccattgggtgacgatgaagcatccgccaccgtgtctaagacagagacctcccaagttgcgcctgcg

SEQ ID NO: 11988 - DNA, 1044 bp, Artificial Sequence
  derived and/or modified sequence
atgaatgggactgaagggcccaacttttacgtaccgttctctaatgcaactggagtcgtgaggtctccattcgagtaccctcagtactatctcgccgaaccttggcaattttctatgctggccgcatatatgtttttactcatcgtgcttggatttcccatcaattttttaactttatatgtaacagtacagcacaaaaaactgcgaactcctctgaattatatccttctgaacctagcggttgccgacctgtttatggtgttagggggatttactagtactctctacacttcacttcacgggtatttcgtattcggacccacagggtgtaatctggaaggattcttcgctactctggggggggagatcgctttatggtctttagtggtgcttgctatcgaacgttacgtggtagtctgcaagcccatgagtaactttcgattcggagaaaaccatgctattatgggggtagcatttacttgggtaatggcattagcctgtgctgcccctccactggctggatggtctcgctatatccccgaaggactgcagtgctcatgtggaattgattactatacactaaagcccgaagtgaacaacgaatctttcgtgatctacatgtttgtggtgcacttcacaatacccatgattatcatctttttctgctatggacagttagtgttcacagtgaaggaagccgccgctcagcagcaggagtcagctactacacaaaaagccgagaaagaagtcactaggatggtgatcattatggtcatcgctttcctaatttgttgggtaccctatgcctccgtggccttttatatcttcactcaccaggggtccaattttggacccattttcatgactatccccgccttctttgccaaatccgcagccatctataatccagttatatacatcatgatgaacaagcagttccggaactgtatgcttactactatttgttgtgggaagaacccactaggggatgacgaagcatccgcgacagtgagtaaaactgagacaagtcaggtagcaccagct

SEQ ID NO: 11989 - DNA, 1044 bp, Artificial Sequence
  derived and/or modified sequence
atgaatggtacggaaggtccgaatttttatgtaccgttttcgaatgcgacgggtgttgtacgatcgccgtttgaatatccgcaatattatctagcggaaccgtggcaattttcgatgttagcggcgtatatgtttctattaatagtactaggttttccgataaattttctaacgttatatgttacggttcaacataaaaaactacgtacgccgctaaattatatactattaaatttagcggtagcggatttatttatggttctaggtggttttacgtcgacgctatatacgtcgttacatggttattttgtttttggtccgacgggttgtaatttagaaggtttttttgcgacgctaggtggtgaaatagcgctatggtcgctagtagtattagcgatagaacgttatgtagtagtatgtaaaccgatgtcgaattttcgatttggtgaaaatcatgcgataatgggtgtagcgtttacgtgggtaatggcgttagcgtgtgcggcgccgccgttagcgggttggtcgcgttatataccggaaggtttacaatgttcgtgtggtatagattattatacgctaaaaccggaagtaaataatgaatcgtttgtaatatatatgtttgttgtacattttacgataccgatgataataatatttttttgttatggtcaactagtttttacggtaaaagaagcggcggcgcaacaacaagaatcggcgacgacgcaaaaagcggaaaaagaagtaacgcgaatggttataataatggtaatagcgtttctaatatgttgggtaccgtatgcgtcggtagcgttttatatatttacgcatcaaggttcgaattttggtccgatatttatgacgataccggcgttttttgcgaaatcggcggcgatatataatccggtaatatatataatgatgaataaacaatttcgtaattgtatgttaacgacgatatgttgtggtaaaaatccgttaggtgatgatgaagcgtcggcgacggtatcgaaaacggaaacgtcgcaagttgcgccggcg

SEQ ID NO: 11990 - DNA, 1044 bp, Artificial Sequence
  derived and/or modified sequence
atgaacggtaccgaagggcctaacttttacgtccctttttcgaacgcaaccggggttgtcagatccccattcgaatatcctcaatactacctcgcggaaccttggcaattctcgatgctcgcagcctacatgttcctgttgatcgtgcttggttttccaataaacttcctgactctttacgtgactgttcaacacaagaaactgcgcacccccctcaactacattctgttgaatcttgcagtggcagatctgtttatggtccttggtggatttacttcaaccctttatacttcacttcacgggtacttcgtctttgggcccactggttgtaatctggaaggatttttcgccaccctcggaggagaaatagcactttggagcctggtggtgctggccattgagcgctacgtggtggtttgtaagcctatgtcgaactttagatttggagagaatcacgcaattatgggagtggccttcacttgggtgatggccttggcgtgcgccgcacccccgctcgctggctggagccggtacattcctgaaggcctgcaatgtagctgtggtatcgactactacactcttaagccggaggtgaataacgagtcgtttgtgatttacatgtttgtcgtgcactttaccattccaatgataatcatcttcttttgctacggtcagttggtctttactgtgaaagaggccgcggcccaacaacaggaatcggcaacgactcagaaagcagaaaaggaagtgactaggatggtcatcattatggtgatagccttcctgatttgctgggtgccttacgccagcgtggccttttacattttcactcatcagggttcgaacttcggtccaatcttcatgaccattccagccttctttgccaagtcagccgccatctacaatccagtgatttacattatgatgaacaagcagtttcgaaattgcatgctcaccaccatctgttgtggaaaaaacccactcggtgatgatgaagcatccgcgaccgtctcaaagaccgagactagccaggtggctcccgca

SEQ ID NO: 11991 - DNA, 1044 bp, Artificial Sequence
  derived and/or modified sequence
atgaacggaacagaagggcccaacttctatgtaccattctccaacgccaccggggtggtacgttccccattcgaatacccacagtattacttggcggaaccttggcagtttagcatgctggccgcctatatgtttctccttattgtgctgggcttccccattaatttccttacgctctatgtgacagtgcagcacaaaaaattaaggacgcctctgaattacatattgctgaacttagccgttgccgacctgttcatggtcttgggcggctttacatcaactctgtatacgtctctgcatggctacttcgtcttcggacccaccgggtgtaacttagaggggttctttgctaccttggggggagagattgcactgtggagcctagtagttctggctatcgaacgctacgtcgtggtgtgcaagcctatgagcaatttccgattcggagagaaccacgcaatcatgggtgtagccttcacctgggtgatggctctggcctgtgccgcgcctccactcgccggttggagccggtacatccccgagggactgcagtgttcctgtggcattgactactataccctcaagccggaggttaataatgaatccttcgttatctacatgttcgttgtgcatttcacaattccaatgataattatcttcttctgctatggccagctggtttttaccgtgaaagaagctgcagctcagcagcaggagagtgctactactcagaaggccgagaaagaggttactcggatggtgataatcatggtgatcgccttcctcatctgctgggtgccctacgcatctgttgcgttctatatcttcacccatcagggctccaacttcggccctatctttatgacaatacctgcattctttgctaaatccgcagccatctataatcctgtgatatatattatgatgaataaacagtttagaaattgtatgctcaccaccatctgctgcggaaaaaatccccttggtgatgacgaggctagtgctaccgtgtccaaaacagagacatcccaagtcgccccagcc

SEQ ID NO: 11992 - DNA, 1044 bp, Artificial Sequence
  derived and/or modified sequence
atgaacggtaccgaaggaccaaacttttacgtccctttctccaacgcgaccggtgtggtgcgcagtccttttgagtatcctcaatactacttggcagaaccatggcagttttcaatgctggcagcctacatgtttctgctgatcgtgctggggtttccaataaacttcttgacgctgtacgtcactgtccaacataagaagctccgtacccctttgaactacattctgctgaatcttgcagtcgcagatctgtttatggttctgggcggttttacctcaaccctttacacgtcacttcatggatacttcgtgtttggtcccactgggtgcaatctggaaggctttttcgccaccctgggtggggaaattgccttgtggtccttggtagtgctcgcaatcgagcgctacgtggtagtgtgtaagcctatgtccaactttaggttcggcgaaaatcacgcaattatgggagtggcatttacgtgggtgatggccctcgcgtgtgcagctcctccgctcgctggatggtcaagatacattccagagggactccaatgtagctgcggaattgattactacactcttaagcccgaagtcaacaatgagtcgtttgtcatttacatgtttgtggtgcacttcaccatccctatgataatcatctttttctgctacggacagcttgtgtttactgtgaaagaagcagcagcacagcagcaagaatccgccaccactcaaaaagcggaaaaggaggtcactcggatggtgatcataatggtcatcgctttccttatctgttgggtgccctatgcgtcggtggcgttctacattttcactcatcaaggaagcaacttcgggccgatctttatgaccattccagcatttttcgcaaaatcagcagcaatatacaatcccgtcatttacattatgatgaataagcaattcagaaactgtatgcttacgaccatctgttgcggaaagaatcccctcggagacgatgaggcatcagcgacggtgagtaaaaccgaaacttctcaggttgcccccgca

SEQ ID NO: 11993 - DNA, 1044 bp, Artificial Sequence
  derived and/or modified sequence
atgaacgggaccgaaggtccaaatttctacgtgcccttctcaaacgccactggggtggtgcggtcaccattcgagtacccacaatactacttggccgagccatggcagttctccatgctggccgcctatatgttccttctgattgtcctggggttcccaattaacttcttgacgctgtatgtgaccgtgcagcacaaaaaactgcgcacgcctctgaattacatcctcctcaacctcgcggtggcggatctcttcatggtgttgggtggattcacttcgacgctgtacaccagcctgcatggctatttcgtgtttggcccgactggatgcaacctggaagggttcttcgcgacccttggcggcgaaatcgccctgtggtcgctggtggtcctggcaatcgagagatacgtcgtcgtctgcaaacccatgtcaaactttcgctttggagagaaccatgcaattatgggggtggcgtttacttgggtgatggccctggcatgcgcggctccgcctttggcgggatggagtagatacatccctgaaggactgcaatgctcgtgtgggatcgattactacactctgaagccggaagtgaacaacgaatcgttcgtgatctacatgtttgtcgtgcacttcaccatccctatgatcatcatcttcttttgttacgggcaactggtctttaccgtcaaggaagccgccgcacagcaacaagagtcggccactactcagaaggcggagaaagaggtaacccgaatggttatcatcatggtcatagcgttcctgatctgctgggtcccgtacgcttcagtggccttctatatctttacccaccagggaagcaacttcggaccgatcttcatgactatcccagcattcttcgcgaaaagcgccgcaatttacaatccagtgatttacatcatgatgaacaagcagttccgcaattgcatgttgacgacgatctgttgcggcaaaaatccactcggtgacgacgaggcttccgccaccgtttccaagacggaaacctctcaagtagcaccagcg

SEQ ID NO: 11994 - DNA, 1044 bp, Artificial Sequence
  derived and/or modified sequence
atgaacggcaccgaggggcctaatttctacgtgccattctccaatgccaccggcgtcgttaggagccccttcgagtaccctcaatattatcttgctgaaccttggcagttttctatgctggccgcttacatgtttttgctgatagtactggggtttcccatcaatttcctgacgctgtacgtgacagtgcaacataagaagctccgcacgcctctgaactacattctacttaatctcgcagttgctgaccttttcatggtactcgggggctttacatctaccctttacacctcgctgcacggatactttgtgttcggccctactggatgcaatctggaaggattttttgctactctcggaggagaaatcgccttgtggtcactggttgttctggccatagaacggtacgttgtggtttgtaagccaatgtcgaacttccgcttcggtgaaaaccacgcaatcatgggggtggcctttacctgggttatggccctggcctgcgcagcccctccacttgcaggctggtcccggtatatcccagaaggactgcaatgctcgtgtgggatagattattacaccctgaagcctgaagtgaacaacgagagtttcgtaatctacatgtttgtggtgcacttcactattcccatgattataatcttcttttgctacggccagctcgtgttcactgtaaaggaggcagcagcacagcagcaggaatcagccacgacccagaaagccgaaaaggaagtgacacgcatggtgataataatggtgatagcatttctgatttgctgggttccctatgcgtccgtcgcattctacatcttcacacaccaggggagcaatttcggacctatcttcatgaccatccccgcctttttcgctaagagcgccgccatttacaaccctgtgatttacatcatgatgaataagcaattcagaaactgcatgctcacaaccatttgctgcggaaaaaatcctctgggcgacgatgaggcctctgctaccgtgagtaaaactgagacttcacaggtggcaccagct

SEQ ID NO: 11995 - DNA, 1044 bp, Artificial Sequence
  derived and/or modified sequence
atgaatggcactgaaggaccgaacttctatgtgcccttctccaacgccaccggcgtcgtaagatctcctttcgagtatcctcagtactacctggctgaaccatggcaatttagcatgttggccgcctatatgttccttctcattgtgctcggctttccaatcaatttcctgacactgtatgtaacggtgcagcataaaaagctgagaactcctcttaactatattctgcttaatttggccgtggccgatctgttcatggtgctcggggggttcacatcaaccctttacacctccctgcacggatattttgtctttggtcccactggttgtaatttggagggattcttcgctactctgggaggcgaaattgccctgtggtcacttgtggtgcttgccatcgagcgatacgtggtggtgtgcaagccaatgagtaactttaggttcggtgagaaccacgccatcatgggcgtggccttcacgtgggtgatggcccttgcatgtgccgccccacccctggcgggttggagtcgttatatccccgaaggcctgcagtgctcatgtggaatcgactactacactctcaagccagaagtgaacaatgaatctttcgtgatttatatgtttgtagtacatttcacaattcccatgattatcatcttcttttgctatggtcagctcgtctttacagtgaaggaggccgccgcacagcagcaagagagtgcgacaacccagaaagccgagaaggaagtcacccggatggtcatcataatggtcatcgcctttctcatctgttgggtgccatacgcaagtgttgccttttatatttttacccaccagggcagtaactttggccctatttttatgaccattcctgccttctttgctaaaagtgctgccatctacaaccctgtgatttatatcatgatgaacaaacagttccgaaattgtatgttgacaacaatctgttgtggcaaaaaccccctcggagatgatgaagcctcagcaacagtctcaaaaactgaaacctctcaggtggctccagcc

SEQ ID NO: 11996 - DNA, 1044 bp, Artificial Sequence
  derived and/or modified sequence
atgaatgggaccgaaggccccaatttctatgtgccgttttcaaatgcaaccggggtggtgcgctcaccctttgaatatcctcagtattacttggcagagccttggcagttctccatgctcgcggcttatatgtttctactaatcgtgctggggtttcctataaactttctcactctgtacgtaaccgtgcagcacaaaaagctgagaacccctcttaattatatcctgctaaatctcgccgttgctgatctattcatggtgctgggaggctttactagtaccttgtacaccagcttgcacggctatttcgtatttggcccaactgggtgcaatcttgagggattctttgccaccctcgggggtgaaattgccctgtggtccctggtggtgctcgccattgaacggtacgtcgtggtctgtaaacccatgtccaatttccgattcggcgaaaaccacgctattatgggcgtggccttcacatgggtgatggcactagcttgcgctgcccccccgctggccggttggtctagatacattcccgaagggctgcaatgttcctgtggaatagactactacacactcaaacccgaagtgaacaatgagtccttcgtcatctacatgtttgtcgtccacttcacaattcccatgatcattattttcttttgctacgggcaactggtctttactgtgaaagaggccgctgctcagcaacaggaatccgctaccacccaaaaagctgagaaggaggtcacaagaatggtgattataatggtgatcgcattcttaatctgctgggtcccctatgcttctgttgcattctatattttcacacaccaggggtccaactttggacccatctttatgacaattcctgcctttttcgccaagagtgcagcaatttacaaccctgtaatctacataatgatgaacaagcagtttaggaactgcatgttaaccactatttgctgcggaaagaacccccttggcgatgacgaggcctcggccaccgtgtccaaaaccgagacctcccaagtcgcccccgcc

SEQ ID NO: 11997 - DNA, 1044 bp, Artificial Sequence
  derived and/or modified sequence
atgaatggaacagagggcccgaatttttatgttcccttcagtaatgccacaggcgtggttaggtccccatttgagtacccacagtactatctggctgagccctggcaattttcaatgctggccgcatatatgttcctgctgatcgtgttgggctttcccattaacttcttgaccctgtatgtgaccgtgcagcataagaagctgcgtactcccctaaattacatcctgctgaacctggctgtggccgatctctttatggttctaggcggatttaccagcactctgtatacttctctgcatggctacttcgttttcggccctacaggatgcaacctggaaggttttttcgccactctgggcggcgagatagctctgtggtctctcgtggtcctggcaattgaacggtatgttgttgtgtgtaaaccaatgagtaattttcgattcggcgaaaaccacgctatcatgggggtagcttttacctgggtgatggccctggcttgtgccgctcccccactagcaggatggtctaggtacattccagagggcctacagtgctcctgcggcatcgactactataccctgaagcccgaggtgaacaatgagagtttcgtgatctatatgtttgttgtgcacttcaccattcccatgataattatattcttctgctatggacagctggtctttactgtgaaagaagctgctgctcagcagcaggaatccgctacaactcaaaaggccgagaaagaagtgacccgcatggtgataatcatggtgatagccttcctcatatgttgggtcccctacgctagtgttgccttttacattttcacccaccagggaagcaactttggtcctattttcatgaccattcccgcttttttcgccaagagcgccgcaatttataatcccgtgatctacatcatgatgaataagcagttcaggaactgtatgctcacaaccatctgttgcgggaaaaatcctctgggtgacgatgaagcatctgctaccgtgagtaaaacagaaactagccaggtggctcctgcc

SEQ ID NO: 11998 - DNA, 1044 bp, Artificial Sequence
  derived and/or modified sequence
atgaacggaactgagggcccgaatttctacgtgccattctccaatgccacgggagtcgtgcgctcgcccttcgagtaccctcagtactacttggccgaaccttggcaattctcgatgctggctgcgtacatgttcctgctcattgtcctcggtttcccgatcaattttctgaccctctacgtgaccgtgcaacataagaagctgcggacccctctgaactacatcctgctgaacctcgcggtcgcagatctcttcatggtcctcggaggatttacttcaaccctttataccagcctgcacggctacttcgtgttcggtccgacgggctgtaacctggaaggattttttgccaccctgggcggcgagatcgcactttggtcccttgtggtgctggccatcgagcggtacgtggtcgtgtgcaagccgatgtcgaatttcagatttggagaaaaccacgccatcatgggagttgcattcacctgggtcatggcgctggcttgcgcagctccaccattggctgggtggtcccgctacatccctgagggcctccagtgctcatgcggtatagactactacactttgaagcccgaagtgaacaacgagtcattcgtcatctacatgttcgtggtgcacttcaccatcccaatgatcatcatcttcttctgctacgggcagctggttttcactgtgaaagaagcggccgcacaacagcaggaatcggccactactcagaaggccgaaaaggaagtcactcgaatggtgatcattatggtgatcgccttcctgatctgctgggtgccgtacgcctcggtagcgttctacatttttactcatcaggggagcaactttggacccatcttcatgaccattccggcgttctttgccaaatctgcggcaatctataatccggtgatctacattatgatgaacaaacagtttaggaattgtatgctcactacgatctgttgcggaaagaacccactgggagacgatgaggcctccgctaccgtgagcaagaccgaaactagccaagtcgctccggcc

SEQ ID NO: 11999 - DNA, 1044 bp, Artificial Sequence
  derived and/or modified sequence
atgaatggcaccgagggacccaatttttatgtaccctttagcaacgctaccggggtagtgaggagccctttcgagtatccacagtattatctggccgagccatggcagttctcaatgctggctgcctacatgttcctgcttattgtgctgggattcccaatcaattttctcaccctgtacgtgacagtacaacataaaaagctccgcaccccccttaattacatattgttaaacctcgctgtggccgatctattcatggttctgggtggattcacctcaacattgtatacttccctgcacggctactttgtctttggacccactggatgtaacttggaaggattcttcgctaccctgggtggcgaaattgcactttggagcttagttgtgctggcgatagaacggtacgttgtggtttgtaagcctatgagtaattttagattcggcgaaaaccacgcgatcatgggagtagcgttcacctgggttatggccctggcctgcgcggctccccccctggcaggatggtcccggtatatacccgagggactccaatgctcttgtggcatcgattattacaccctgaaaccagaggtgaacaacgagtccttcgttatttatatgttcgtggtgcactttaccataccaatgattatcatatttttctgctatgggcagcttgttttcaccgttaaagaggccgccgcgcagcagcaggagtccgccacaacccagaaggctgagaaggaggtgacgagaatggtcattatcatggtgattgcattcctgatttgctgggttccctacgcatccgtcgcattctatatattcacccatcaaggatctaattttggacccattttcatgaccatacccgcatttttcgcaaaaagcgcggctatttacaacccagtaatctatattatgatgaataagcaattcagaaactgcatgcttactacaatttgctgcggaaaaaatccgctgggcgacgatgaagcaagcgcaaccgtgtctaaaactgagacttcacaggtggcgccagca

SEQ ID NO: 12000 - DNA, 1044 bp, Artificial Sequence
  derived and/or modified sequence
atgaacggaactgaaggccctaacttttacgttcctttttccaacgcaaccggagtggttcggtcaccttttgaatatccccagtactacctcgcggagccttggcaattcagcatgcttgcggcatacatgttcctgttgatagtgctcggcttcccgattaactttcttactttgtacgtgaccgtgcagcataagaaactgcggaccccacttaactacattctgcttaatcttgcagttgcagatctgttcatggtcctcggaggattcaccagcactctctacacgtccctccatggttactttgtgtttgggccaaccggatgcaatcttgaaggattctttgccaccttgggaggagaaattgcactttggagccttgtggtgctggccatcgaacggtacgtcgtggtctgtaaacctatgagcaactttagatttggggaaaatcatgccattatgggtgtggcctttacttgggtgatggcactggcatgtgcagcccctccgctcgctgggtggagcagatacattcctgaaggactgcaatgttcctgcggtatcgactactacacccttaagccggaagtgaataacgagtcctttgtgatatacatgttcgtggtccattttactatccctatgataatcatcttcttttgctacgggcaactggtctttactgtgaaggaagccgccgcacagcagcaggagtcagcaactactcagaaggcagaaaaagaagtgacccggatggtgatcattatggtcattgcattccttatatgttgggtgccatacgcctcagtggccttctacatattcacgcatcaaggatcaaactttggtcctatcttcatgactatccccgcgtttttcgcgaagtcggcggccatatacaacccagtcatttacattatgatgaataagcagttcagaaactgtatgcttaccacgatctgctgtgggaaaaatccactgggagatgatgaggcttccgccactgtgagcaagactgaaacgtctcaagtcgcacccgca

SEQ ID NO: 12001 - DNA, 1044 bp, Artificial Sequence
  derived and/or modified sequence
atgaacggtacagaaggcccaaacttctatgtacctttctccaatgccaccggtgtagtaagatctccgtttgagtaccctcagtattaccttgccgaaccatggcaattctcaatgctggctgcgtatatgttccttcttatcgtcttggggtttcctatcaatttcttgaccttatatgttacagtccaacacaaaaaattacgtaccccgttaaactacattcttttgaatctggcagtggcggacctattcatggtcctcggaggttttacctcaacgttatatacctcacttcatggctattttgtctttggcccaactggatgcaatcttgaaggatttttcgcgacgctaggcggtgaaatagccttgtggtcgttagtagtcctggcaatcgagcggtatgttgtagtatgtaaacctatgtccaacttcaggtttggagagaatcatgcgattatgggtgtggcatttacgtgggtaatggccctggcatgcgccgccccgccactggccggttggagtagatacattcctgaaggcctgcagtgtagctgtggtattgactattacactctgaaacctgaagtcaacaacgaatcatttgtaatttatatgtttgtggttcattttactatcccaatgattattatttttttttgctatggtcaattggtgtttacggtgaaagaagcagctgcgcagcagcaggaatcagcaaccacgcaaaaagccgaaaaggaagttacccgcatggtaatcattatggttattgcttttttgatttgttgggtaccatatgcctctgtcgcattttatatctttactcatcagggatccaattttggtccgatttttatgacgattcctgcattctttgcaaagtcagctgccatatataacccagtaatatacattatgatgaacaaacagtttaggaattgtatgctgacgacgatatgctgtggtaaaaatccgctgggggatgatgaggcgtcggctacagttagtaaaactgaaactagccaagtggcacccgcc

SEQ ID NO: 12002 - DNA, 1044 bp, Artificial Sequence
  derived and/or modified sequence
atgaacggcaccgaaggccccaacttctatgtacccttctcaaacgcaactggggttgtgcgaagccccttcgagtacccccagtactacctggccgaaccatggcagtttagcatgcttgcggcctatatgtttttgcttatagtgctcgggttccccattaatttcctgacactgtatgtgaccgtgcagcacaaaaaactgaggactcccttgaactatattctcctgaacctggctgtggctgatctctttatggtgctggggggatttactagtaccctctacacgtctttgcacggctacttcgtgttcggtcccaccggatgcaacctcgagggattctttgccactctgggtggagaaatagccctctggagcctggttgtgttggctatcgaaagatacgtcgtagtatgcaaaccaatgtcaaactttaggttcggcgagaaccatgcaattatgggagtagcttttacatgggtaatggccctcgcttgtgccgcgcccccccttgcgggctggagtaggtatatccctgaggggctgcaatgcagctgcggtatcgactattatacactcaaaccagaggtcaacaacgagtctttcgtcatctatatgtttgtcgtccacttcaccatccccatgatcataattttcttctgctacggccagctcgtttttaccgtgaaggaagcggcagcccagcagcaggagagcgcaacaacccagaaggcagagaaagaggttaccagaatggtgatcatcatggtcatcgcattcctgatctgttgggtcccctacgccagcgttgcattttatatttttacccatcaaggcagcaactttggtcccatttttatgactatccctgctttctttgccaaatcagccgcaatctataatcccgtgatctacattatgatgaacaaacaatttcgcaactgcatgttgacaacgatctgttgtggtaagaaccctcttggcgacgacgaagcttctgcaacagtcagcaagactgaaactagccaggtggcacctgcg

SEQ ID NO: 12003 - DNA, 1044 bp, Artificial Sequence
  derived and/or modified sequence
atgaacggcaccgaggggcccaatttctacgtgcctttcagcaacgctaccggagtcgtgagatccccattcgaatacccccaatactatctggcggagccgtggcagttcagcatgttggccgcctacatgtttcttcttatagtactcggttttccaataaacttcctgaccctctacgtgacggtccaacataagaaactgcgtactccattgaactacatcttgctcaacctggctgtggcggatctcttcatggtgctcggaggatttacttcgaccctctacacttcgcttcacggttactttgtctttggtccgactgggtgcaatctggagggcttctttgccactctgggcggtgagatcgcactgtggtcactcgtcgtgctggcaatcgaacgctacgtcgttgtgtgcaagccgatgtcaaatttccgcttcggggaaaatcacgccatcatgggagtggcgtttacctgggtgatggcgttggcttgcgcggccccgccgctcgcaggttggtcacggtacatcccggaaggactccagtgttcgtgcggaatcgactactacactctcaaaccagaggtcaacaacgagagcttcgtgatctacatgttcgtagtgcatttcactatcccaatgatcatcatctttttctgctacggacagctggtgttcaccgttaaggaagcagcagcccaacaacaggaaagcgccactacccagaaagccgaaaaggaggtgacccggatggttatcatcatggtgattgccttcctgatctgctgggtgccctacgcctcggtggcattctacattttcacccaccagggcagtaatttcggacctatctttatgacgatccctgcctttttcgcgaagtccgcggcaatctataacccggttatctacatcatgatgaataagcagtttcgtaactgtatgctgactaccatttgctgtggaaagaatccgctgggggatgacgaagcctccgctactgtcagcaagacggaaacgtcacaggtggcgccggcc

SEQ ID NO: 12004 - DNA, 1044 bp, Artificial Sequence
  derived and/or modified sequence
atgaacgggacggaaggacctaacttctacgtcccattcagcaacgcaactggggtggtccgcagccctttcgagtatccgcagtactacctggccgaaccatggcaattctcaatgctcgcggcctatatgtttttgctgatcgtgctgggcttcccaatcaatttcctgaccctctacgtcactgtgcaacataagaagctcagaacgcctctcaactatatcttgctcaacctggctgtggctgacctgtttatggtgcttggtggattcacttccaccttgtacacctcgctgcacggctattttgtgttcggcccgactggatgcaatttggaaggatttttcgcgaccctgggcggagaaatagcgctctggtccctggtggtcttggccattgaaagatacgtggtggtgtgcaagccaatgagcaacttccggttcggggagaatcacgctattatgggcgtggcgttcacctgggtgatggcacttgcgtgcgctgccccgccgcttgccggctggtcgcggtacattcctgaaggactgcagtgctcctgcggaattgattactacaccctcaagcctgaggtcaacaacgagtcgttcgtgatctacatgtttgtggtccattttacgatcccgatgatcatcatcttcttctgctacggacagctggtgttcaccgtcaaggaagccgcggcccagcagcaggaatccgctaccacccagaaggctgagaaagaagtcactcggatggtgattatcatggtgatcgccttccttatctgctgggtcccatacgcctccgtggcattctatatcttcacccatcagggaagcaacttcggaccaatcttcatgactattccggctttcttcgcaaagagcgccgcaatctacaatccggtgatttacatcatgatgaataagcaattcaggaattgcatgctgaccaccatctgctgcggaaagaacccgttgggagatgacgaagcctccgcaactgtttcgaaaactgaaaccagccaggtcgccccagca

SEQ ID NO: 12005 - DNA, 1044 bp, Artificial Sequence
  derived and/or modified sequence
atgaatgggactgaaggacctaacttttacgtgccgttttcaaatgcaactggagtggtgcgctcgccctttgaatacccccagtactaccttgcggaaccttggcagtttagcatgctcgccgcatacatgtttcttcttatagtgcttggttttcccattaacttcctgacgctttacgtgaccgtccagcacaagaaactcagaaccccgctgaactatatcctcctgaacctggccgtcgcagatctgtttatggtgcttggtggctttacctccactctgtacacctcccttcatggttactttgtctttggaccaactggatgcaatctggagggcttttttgctacccttggtggagaaattgcactttggtcactggtggtcctggccattgaacggtacgtggtggtgtgtaagccaatgtcgaatttcagatttggagagaaccacgcgataatgggagtggcgttcacctgggtcatggcgcttgcatgtgccgcaccccctctggccggttggtcacgatacatcccagaaggcctgcaatgtagctgtggcatcgactactacacccttaagccagaagtgaataatgaatcatttgtgatttacatgtttgtggtgcactttactatccctatgattatcattttcttttgttacggccagctggtgtttactgtgaaagaagcagcagctcaacaacaagagtccgcaactacgcaaaaggcagaaaaagaagtgactcggatggtcattatcatggtgattgcatttctcatttgctgggtgccatacgcatccgtggcattttacatctttacccatcaaggctcaaatttcggtcctatctttatgacgatccccgcgtttttcgcaaagtccgcagccatatacaaccctgtcatttacatcatgatgaataagcagttcagaaattgcatgcttactacgatctgttgcgggaagaatcctttgggagatgatgaggcctctgctaccgtgtcaaaaacggaaacgtcgcaagtggcacctgcc

SEQ ID NO: 12006 - DNA, 1044 bp, Artificial Sequence
  derived and/or modified sequence
atgaacgggactgaggggccgaatttctatgtcccgttctctaacgctacaggagtagtccggagccctttcgagtaccctcagtactatctggcagagccatggcaattcagcatgcttgctgcttatatgttcttactcatagtgcttggatttcctattaacttccttactctgtacgtgaccgtccagcacaagaaactaagaacccctttgaactacatattgttaaacctagcagtagctgaccttttcatggtgctgggcggcttcaccagcaccctctacacctccttgcatgggtacttcgtgtttggccctacaggctgtaatttggaagggttcttcgcaactctgggcggcgaaattgcactgtggagtctagtcgtgctggccattgagaggtacgtcgtggtgtgcaaacccatgagcaacttccggttcggcgaaaaccacgcaataatgggcgtagcttttacttgggtgatggctctggcctgtgcggctccccccctggctgggtggtcaaggtacattcccgagggactgcagtgtagctgtggaatagactactatactctgaaacctgaagtgaataacgagagctttgtgatttacatgtttgtagtccacttcacgattcccatgataattatctttttttgctatggccagctggtcttcacggtgaaagaggctgcggctcagcaacaagagagcgccactacacagaaagccgaaaaagaagtgacaagaatggtcatcatcatggtgattgccttcctgatttgttgggtgccatatgcctccgtggccttctacatttttactcatcaaggctccaacttcggtcctatttttatgactatccccgcttttttcgccaaatccgccgccatctacaaccctgtgatttatatcatgatgaataaacaatttagaaattgtatgctgaccacgatttgctgcgggaaaaaccccctgggagatgatgaagcaagcgccacagtgagcaaaactgagaccagtcaggttgcccctgcc

SEQ ID NO: 12007 - DNA, 1044 bp, Artificial Sequence
  derived and/or modified sequence
atgaatgggaccgaagggccaaatttctatgtgcctttttccaacgcaactggtgtcgtccggtcgccattcgaatacccccaatactaccttgcagaaccctggcaattttcaatgctggctgcctacatgttcctgctgatcgtcctcggttttccgatcaattttctgactttgtacgtaactgtgcaacataagaaactcagaactccacttaactatatactccttaatcttgcagtggcggatctgtttatggtactgggtggatttacctcaaccctttacacctcccttcacggctactttgtgttcgggcctacgggatgtaacctcgaggggtttttcgcgacccttggaggagagatagctctctggtcactcgtggtgttggcaatcgaacgctacgtggtggtgtgtaagcctatgtcgaactttcgatttggcgagaatcatgcgattatgggagtggcatttacgtgggtgatggcgctcgcatgcgccgcaccaccattggccggatggtccagatacattccagagggcttgcagtgttcgtgcggaattgattactataccctcaagcctgaggtcaacaacgaatcgtttgtcatttacatgtttgtcgtgcacttcaccatcccgatgattatcattttcttctgttacggacagcttgtattcactgtgaaagaagcagctgcccagcagcaagagagcgcaaccacgcagaaagcagaaaaggaagtgaccaggatggtgataatcatggtgatcgccttcctgatctgttgggtcccctacgcttcagttgccttttacattttcacccatcaaggtagcaattttggccctatctttatgactattcctgcgttctttgctaagtccgcggcaatttacaacccagtgatttacatcatgatgaacaagcagttccgcaactgtatgctgactaccatttgctgcgggaagaaccccctgggagatgacgaagcaagcgcaacggtgtctaagacggaaacttcccaagtggcacctgcg

SEQ ID NO: 12008 - DNA, 1044 bp, Artificial Sequence
  derived and/or modified sequence
atgaatggaaccgagggtcccaatttctatgtcccattttctaacgcgacaggggttgtgagatctcccttcgagtatccacagtattacttggctgagccctggcagttctccatgcttgctgcttatatgttcctcctgatagttcttggctttccaatcaatttcttgaccctctacgtgaccgtgcagcataagaagctccgcactccattgaattatatcctgctgaatctcgccgtggccgatctgtttatggtgctgggagggtttaccagtacactttacacctccctccacggctatttcgttttcggcccaaccggatgcaacctcgaagggttttttgctacacttgggggagaaattgccctctggagccttgtagtgctcgccatagagcgatatgttgtagtgtgcaagcccatgtccaacttccgatttggcgagaaccacgccatcatgggggttgctttcacgtgggtgatggctcttgcttgcgctgctccaccgctggccggctggagcagatatattcctgagggcctccagtgctcttgcgggatcgattactacactctgaagcccgaggtgaataacgaaagttttgtgatttacatgttcgttgttcattttaccatccccatgatcattatctttttttgttatggtcaactggtgttcacagtcaaagaggctgctgcgcagcagcaggagtccgccacaacgcaaaaggcagagaaggaagtgactaggatggtgatcatcatggtgattgctttcctgatttgctgggtcccatatgccagcgtcgcattctacattttcacacaccagggctccaacttcggacccatcttcatgactatccccgccttcttcgctaaaagcgcagccatttacaaccccgtgatatatatcatgatgaataagcagttccgcaactgtatgctcacaactatatgctgtggcaaaaaccctctcggggatgatgaagctagtgcaacggtgagtaaaaccgagacgagccaagtggctcccgcc

SEQ ID NO: 12009 - DNA, 1044 bp, Artificial Sequence
  derived and/or modified sequence
atgaacggaactgaaggtccgaatttttacgttcctttctctaacgccaccggggtggtccgtagccccttcgaatatccgcagtattaccttgcggagccatggcaattctctatgctcgccgcttatatgtttctgctcatcgttctgggtttcccgatcaacttcctgacactgtacgtgactgttcaacataaaaagctgcggaccccgctgaattatattctgttgaacttggccgttgcggacctgttcatggttcttggtggctttacaagcaccttgtacacttctctgcacggctatttcgtgttcggtccaactgggtgtaacctagaaggttttttcgctactctgggaggtgagattgcactgtggagcctggtggtcctggcgatcgaacgctatgttgtggtgtgtaaacccatgagcaactttcgatttggagaaaatcacgcgattatgggcgtggcatttacctgggtgatggctttggcctgtgcagctccgcctctggctggctggtcgaggtatatccctgagggcctgcaatgctcctgcggaattgactactacactctgaaacctgaggtgaacaacgagagcttcgtgatctatatgttcgtcgttcacttcaccattccaatgattatcatctttttctgttacggtcagctggtcttcaccgttaaggaagccgctgcgcagcagcaggagagcgccacgacgcaaaaagccgagaaagaggtgacacgcatggtcatcatcatggtgatcgcttttctcatctgttgggttccttacgcgagcgttgcattctatattttcacccaccagggtagcaattttggtccgatattcatgaccattccagcgttcttcgcgaagtccgctgccatttacaatccggtcatttacatcatgatgaataagcagtttcgcaattgcatgctaaccactatttgctgtggtaaaaatccactgggcgatgacgaagctagcgcgaccgtgtctaaaacggagactagccaggtggctccggct

SEQ ID NO: 12010 - DNA, 1047 bp, Artificial Sequence
  derived and/or modified sequence
atgaacggcaccgagggccccaacttctacgtgcccttcagcaacgccaccggcgtggtgagaagccccttcgagtacccccagtactacctggccgagccctggcagttcagcatgctggccgcctacatgttcctgctgatcgtgctgggcttccccatcaacttcctgaccctgtacgtgaccgtgcagcacaagaagctgagaacccccctgaactacatcctgctgaacctggccgtggccgacctgttcatggtgctgggcggcttcaccagcaccctgtacaccagcctgcacggctacttcgtgttcggccccaccggctgcaacctggagggcttcttcgccaccctgggcggcgagatcgccctgtggagcctggtggtgctggccatcgagagatacgtggtggtgtgcaagcccatgagcaacttcagattcggcgagaaccacgccatcatgggcgtggccttcacctgggtgatggccctggcctgcgccgccccccccctggccggctggagcagatacatccccgagggcctgcagtgcagctgcggcatcgactactacaccctgaagcccgaggtgaacaacgagagcttcgtgatctacatgttcgtggtgcacttcaccatccccatgatcatcatcttcttctgctacggccagctggtgttcaccgtgaaggaggccgccgcccagcagcaggagagcgccaccacccagaaggccgagaaggaggtgaccagaatggtgatcatcatggtgatcgccttcctgatctgctgggtgccctacgccagcgtggccttctacatcttcacccaccagggcagcaacttcggccccatcttcatgaccatccccgccttcttcgccaagagcgccgccatctacaaccccgtgatctacatcatgatgaacaagcagttcagaaactgcatgctgaccaccatctgctgcggcaagaaccccctgggcgacgacgaggccagcgccaccgtgagcaagaccgagaccagccaggtggcccccgcctag

SEQ ID NO: 12011 - DNA, 1215 bp, Artificial Sequence
  derived and/or modified sequence
gggaaataagagagaaaagaagagtaagaagaaatataagagccaccatgaatggaacggaagggccaaacttttatgtgcctttcagcaacgccacgggtgtagtgagatcgccgtttgagtacccccagtattatctggccgagccttggcagttctcgatgctcgccgcctacatgttcctgcttattgtactggggtttccgatcaactttttgaccttgtatgtaacggtgcaacacaagaagttgaggacaccgcttaactatatcctgcttaatctcgccgtcgcggatctgttcatggtgctcggagggtttacctccacactgtatacgtccctccacgggtacttcgtgtttggtcccactgggtgcaacttggaaggattctttgcaacactgggaggggaaattgcgttgtggagcttggtggtgttggcgattgagagatacgtggtcgtatgcaaaccaatgtcaaactttcggtttggagagaaccatgcgattatgggagtcgcgtttacgtgggtcatggccttggcctgcgcagctcctcctctcgcgggctggtcccgctatatccccgagggacttcagtgctcatgcggcatcgactactataccttgaagcccgaggtgaataatgagtcgttcgtaatctacatgtttgtcgtgcatttcacaattcccatgatcattatcttcttctgttacggacagcttgtgttcactgtaaaagaggcagcagcgcagcagcaggaaagcgcgacaacccaaaaggccgagaaagaggtgacgcggatggtcatcatcatggtaatcgcgtttcttatctgttgggtgccctacgcctcggtggcattctacatctttacgcaccagggctcgaactttggaccgatcttcatgactattccagcgttcttcgccaaatcggcagctatctacaatcccgtcatctacattatgatgaacaagcagttccgaaattgtatgctcaccacgatttgctgtgggaagaatcccttgggagatgacgaagcgagcgcgacagtctcaaaaaccgaaacttcacaagtcgcaccggcgtgaagcgctgccttctgcggggcttgccttctggccatgcccttcttctctcccttgcacctgtacctcttggtctttgaataaagcctgagtaggaaggcggccgctcgagcatgcatctaga

SEQ ID NO: 12012 - DNA, 1047 bp, Artificial Sequence
  derived and/or modified sequence
atgaatggaactgaaggcccaaacttttacgttccattcagcaacgctacaggggtggtgcgaagtccattcgagtatccacaatactatcttgctgagccatggcaatttagtatgctcgcagcatacatgttcctcctgattgttctcgggttcccaatcaatttcctgactctctacgtgaccgttcagcacaagaagctgcgaaccccacttaactacattctgttaaatcttgcagtcgctgatctctttatggtgttaggagggtttacttctactctgtacaccagtcttcacgggtattttgtgttcggccctactggctgtaatctggaagggttttttgccaccttgggcggggagattgccttatggtctcttgtcgtcctcgccattgagcgatatgtcgtggtgtgcaagcctatgagtaatttcaggttcggcgagaaccatgctataatgggagtggcattcacctgggttatggcccttgcctgcgcagcgccacccctcgcgggctggtccaggtacatcccagaaggccttcagtgcagttgcggaatcgactactatactttgaagccagaagtcaacaatgagagcttcgtcatctatatgtttgttgttcattttactatacctatgatcattatctttttttgctatgggcagcttgtgttcacagtcaaggaggcagcggcccagcagcaagagagcgcaaccactcagaaggccgagaaggaggtcactcgaatggttataataatggtgatcgccttcttgatatgttgggttccatacgccagtgtggcattctatatctttacacatcaagggtccaactttggccctattttcatgacaatcccagcgttttttgcgaaaagcgccgctatctacaacccagtaatatatatcatgatgaacaaacagttcagaaactgcatgctgacgacaatctgttgcgggaaaaaccctctgggcgatgatgaggcgagcgcgacggtgtccaaaaccgagactagccaggttgcaccggcctag

SEQ ID NO: 12013 - DNA, 1047 bp, Artificial Sequence
  derived and/or modified sequence
atgaatggaacagagggccccaacttctacgtgcccttcagcaatgccactggagtggtgcgcagcccctttgagtacccccagtactacctggccgagccctggcagttctccatgctggccgcctacatgttcctgctgattgtgctgggcttccccatcaacttcctgaccctgtatgtgacagtgcagcacaagaagctgcggacccccctgaactacatcctgctgaacctggccgtggccgacctcttcatggtgctgggcggcttcaccagcaccctgtacaccagcctgcacggctactttgtgtttggccccaccggctgcaacctggagggcttctttgccaccctgggcggggagatcgccctgtggagcctggtggtgctggccatcgagcgctacgtggtggtgtgcaagcccatgagcaacttccgctttggagagaaccacgccatcatgggcgtggccttcacctgggtgatggccctggcctgtgccgccccacccctggccggctggagccgctacatccctgagggcctgcagtgcagctgtggcatcgactactacaccctgaagccagaggtgaacaatgaaagctttgtgatctacatgtttgtggtgcacttcaccatccccatgatcatcatcttcttctgctacggccagctggtgttcaccgtgaaggaggccgccgcccagcagcaggagagcgccaccacccagaaggccgagaaggaggtgaccaggatggtgatcatcatggtgattgccttcctgatctgctgggtgccctatgcctctgtggccttctacatcttcacccaccagggcagcaactttggccccatcttcatgaccatcccagccttctttgccaagtctgctgccatctacaaccctgtgatctacatcatgatgaacaagcagttcaggaactgcatgctgaccaccatctgctgcggcaagaaccccctgggagatgatgaggccagcgccaccgtgtccaagacagagaccagccaggtggccccagcctag

SEQ ID NO: 12014 - DNA, 1047 bp, Artificial Sequence
  derived and/or modified sequence
atgaacggcaccgagggccccaacttctacgtgcccttcagcaacgctaccggggtcgtgaggtcacctttcgagtacccccagtactacctcgccgagccatggcagttctccatgctcgctgcatacatgttcctgctcatcgttcttggattccctataaacttcttgactctgtatgtgaccgttcagcacaaaaagctgagaactcccctcaactacatcctcttgaacctggctgtggccgacctgttcatggtacttggtgggttcaccagcactctgtacacatcgctccatggatatttcgtatttggccccaccggctgtaacctcgaaggcttcttcgcaacgcttgggggcgagatcgccctctggtctctggtagttctcgccatcgagcggtatgtagttgtctgtaagccaatgtcgaactttcgatttggggagaaccacgctattatgggagtagctttcacatgggtcatggcactggcttgcgcggcgcctcctctggctggctggagccggtatattcctgagggcctccagtgttcttgcgggatcgactactacacactgaagccagaagtcaataatgagtcattcgtaatttatatgtttgtggtgcacttcactatccctatgatcataatattcttttgttacggccagctggtcttcaccgtcaaggaggctgctgcccagcagcaggaaagcgccaccacacaaaaagcggagaaagaagtcacacgcatggtgattataatggtgatcgcctttctcatatgctgggttccgtacgcttccgtcgctttttacattttcacgcaccagggttccaacttcggacctattttcatgacaatccccgctttcttcgctaaaagtgctgccatttataaccctgtcatttatatcatgatgaacaaacagtttcgtaactgcatgttgaccacaatctgctgcggaaagaatcctctgggggatgacgaggccagtgccacggtcagcaagactgaaacgtcacaggtggcgccggcatag

SEQ ID NO: 12015 - DNA, 1047 bp, Artificial Sequence
  derived and/or modified sequence
atgaacggaactgagggacctaacttttatgtgcctttcagcaatgccactggcgtggtaagatccccctttgaatatccacagtattacttggcggagccatggcaatttagcatgctcgctgcatacatgttcctgctcatcgtcttgggtttccctatcaacttcttgaccttgtacgtgaccgtacagcataaaaaactcaggactcctctcaactacatcctgctgaaccttgctgtggctgacctattcatggtcctgggcggtttcacaagtacattgtacactagcctgcacggttactttgtgtttggtcccacaggctgcaatttggaaggatttttcgccactctgggaggcgaaattgcgctttggagcctcgttgtgttagcaatcgagaggtacgttgtggtttgcaagccaatgagcaacttccggttcggtgagaaccacgctatcatgggagtcgcatttacttgggtgatggccctcgcttgcgctgcaccccctttggcaggatggtcccggtatattccagaaggtctacagtgttcatgcggaatcgattattataccctgaagccagaagttaacaatgaaagctttgtgatctatatgttcgttgtgcactttaccattcctatgataatcattttcttttgctacggccagctagtcttcactgtgaaagaagcagcagctcagcagcaggaatccgcgactacccagaaagcagagaaggaagttacacgcatggttattattatggtcatcgcctttttaatctgttgggtgccatatgcttcagttgccttttatatttttactcaccaagggagcaactttgggcctatattcatgacaataccagctttcttcgccaagtcagcagccatttacaacccagtaatctacatcatgatgaacaagcaattcaggaactgcatgctgacaaccatttgctgcggtaaaaatcccctcggagacgacgaggcatcagctactgtcagtaagactgagacctctcaagtggccccagcatag

SEQ ID NO: 12016 - DNA, 1047 bp, Artificial Sequence
  derived and/or modified sequence
atgaacggtaccgagggtcccaacttttatgtccctttttccaatgcaacaggagttgtgcgctccccattcgagtatcctcagtattatctcgccgagccttggcagttttctatgttggcagcctacatgttccttctcatcgttctgggatttccgatcaatttcttgactttgtatgttacagtgcagcataagaagctcagaacaccgctaaattatatcctgttgaacctggccgtagccgacctgtttatggttctgggaggctttacctcaaccctgtatactagcctgcatggctactttgtctttggaccaactggctgcaatctcgaaggcttcttcgctaccctcggaggggagattgccctgtggagcctggtcgtcttggccatcgagcgctacgttgttgtgtgcaagccaatgtcaaactttcgtttcggcgagaatcacgcaattatgggagtggcctttacgtgggttatggcccttgcttgtgcagcaccgcccctggcaggttggagcagatatatcccagaaggacttcagtgcagttgtggcatcgactactacacgctgaagcccgaggtcaataacgagtcgtttgttatttacatgttcgtggttcatttcacaatccccatgattattatattcttttgttacggacagctcgtgttcaccgtcaaagaagctgccgcccagcagcaggaatcagccaccactcagaaggccgaaaaggaagtgacccgcatggttataataatggtaattgcctttctgatctgttgggtgccatacgcgtctgttgccttttacatctttacacaccagggatctaacttcggacctatatttatgaccattcccgcgttctttgccaagtccgccgccatctataacccagtaatctacatcatgatgaataaacagtttagaaactgcatgcttaccactatctgttgcggcaagaatcccctgggagatgacgaggcttccgctactgtttctaagactgagacttctcaggtagctccagcttag

SEQ ID NO: 12017 - DNA, 1047 bp, Artificial Sequence
  derived and/or modified sequence
atgaatggcaccgaaggcccgaatttctatgtacccttttccaacgcaaccggcgtggtcagatccccatttgaatatccccaatactaccttgctgaaccttggcagtttagtatgctggcagcttacatgtttttgttgattgtcctgggatttccaataaatttcctaactctatatgtgacagtgcagcataaaaaactgcggacccctctcaattatattcttcttaacttggctgtcgctgacctcttcatggtcctgggaggtttcacttcaacactgtatacaagtttacacggatactttgtctttggccccacaggctgcaacttggaaggattttttgccaccctggggggagaaatcgcactctggtcactcgtggtactggcgatcgaacggtacgtcgtagtgtgtaaaccaatgtccaatttcagatttggcgaaaaccacgcaattatgggagttgccttcacctgggtgatggctcttgcctgtgctgcgccgcctttagccgggtggtccaggtacatccccgaaggcctacaatgcagctgcggaatcgactattacacactgaagcccgaagtaaataacgagtcattcgtcatctatatgttcgtcgtacacttcacaatccccatgatcattattttcttctgttatggtcagctggtctttaccgtcaaagaggccgcagcccagcaacaggagtcagccactacccagaaggccgaaaaagaagtcactaggatggttatcattatggtaatcgcctttctgatctgttgggtaccatatgcttccgttgccttctacatctttacccaccaaggctccaatttcggacctatcttcatgaccatccccgctttctttgcaaaatctgcagcgatctacaaccctgtgatatatattatgatgaataaacaatttcgcaattgcatgctgactacaatttgctgtggaaagaatcctcttggcgacgatgaagcatcagctactgtgagcaagaccgaaacatcccaagtagccccggcctag

SEQ ID NO: 12018 - DNA, 2592 bp, Artificial Sequence
  derived and/or modified sequence
gagtcatccagctggagccctgagtggctgagctcaggccttcgcagcattcttgggtgggagcagccacgggtcagccacaagggccacagccatgaatggcacagaaggccctaacttctacgtgcccttctccaatgcgacgggtgtggtacgcagccccttcgagtacccacagtactacctggctgagccatggcagttctccatgctggccgcctacatgtttctgctgatcgtgctgggcttccccatcaacttcctcacgctctacgtcaccgtccagcacaagaagctgcgcacgcctctcaactacatcctgctcaacctagccgtggctgacctcttcatggtcctaggtggcttcaccagcaccctctacacctctctgcatggatacttcgtcttcgggcccacaggatgcaatttggagggcttctttgccaccctgggcggtgaaattgccctgtggtccttggtggtcctggccatcgagcggtacgtggtggtgtgtaagcccatgagcaacttccgcttcggggagaaccatgccatcatgggcgttgccttcacctgggtcatggcgctggcctgcgccgcacccccactcgccggctggtccaggtacatccccgagggcctgcagtgctcgtgtggaatcgactactacacgctcaagccggaggtcaacaacgagtcttttgtcatctacatgttcgtggtccacttcaccatccccatgattatcatctttttctgctatgggcagctcgtcttcaccgtcaaggaggccgctgcccagcagcaggagtcagccaccacacagaaggcagagaaggaggtcacccgcatggtcatcatcatggtcatcgctttcctgatctgctgggtgccctacgccagcgtggcattctacatcttcacccaccagggctccaacttcggtcccatcttcatgaccatcccagcgttctttgccaagagcgccgccatctacaaccctgtcatctatatcatgatgaacaagcagttccggaactgcatgctcaccaccatctgctgcggcaagaacccactgggtgacgatgaggcctctgctaccgtgtccaagacggagacgagccaggtggccccggcctaagacctgcctaggactctgtggccgactataggcgtctcccatcccctacaccttcccccagccacagccatcccaccaggagcagcgcctgtgcagaatgaacgaagtcacataggctccttaattttttttttttttttaagaaataattaatgaggctcctcactcacctgggacagcctgagaagggacatccaccaagacctactgatctggagtcccacgttccccaaggccagcgggatgtgtgcccctcctcctcccaactcatctttcaggaacacgaggattcttgctttctggaaaagtgtcccagcttagggataagtgtctagcacagaatggggcacacagtaggtgcttaataaatgctggatggatgcaggaaggaatggaggaatgaatgggaagggagaacatatctatcctctcagaccctcgcagcagcagcaactcatacttggctaatgatatggagcagttgtttttccctccctgggcctcactttcttctcctataaaatggaaatcccagatccctggtcctgccgacacgcagctactgagaagaccaaaagaggtgtgtgtgtgtctatgtgtgtgtttcagcactttgtaaatagcaagaagctgtacagattctagttaatgttgtgaataacatcaattaatgtaactagttaattactatgattatcacctcctgatagtgaacattttgagattgggcattcagatgatggggtttcacccaaccttggggcaggtttttaaaaattagctaggcatcaaggccagaccagggctgggggttgggctgtaggcagggacagtcacaggaatgcagaatgcagtcatcagacctgaaaaaacaacactgggggagggggacggtgaaggccaagttcccaatgagggtgagattgggcctggggtctcacccctagtgtggggccccaggtcccgtgcctccccttcccaatgtggcctatggagagacaggcctttctctcagcctctggaagccacctgctcttttgctctagcacctgggtcccagcatctagagcatggagcctctagaagccatgctcacccgcccacatttaattaacagctgagtccctgatgtcatccttatctcgaagagcttagaaacaaagagtgggaaattccactgggcctaccttccttggggatgttcatgggccccagtttccagtttcccttgccagacaagcccatcttcagcagttgctagtccattctccattctggagaatctgctccaaaaagctggccacatctctgaggtgtcagaattaagctgcctcagtaactgctcccccttctccatataagcaaagccagaagctctagctttacccagctctgcctggagactaaggcaaattgggccattaaaagctcagctcctatgttggtattaa

SEQ ID NO: 12019 - RNA, 1215 nt, Artificial Sequence
  derived and/or modified sequence
gggaaauaagagagaaaagaagaguaagaagaaauauaagagccaccaugaauggaacggaagggccaaacuuuuaugugccuuucagcaacgccacggguguagugagaucgccguuugaguacccccaguauuaucuggccgagccuuggcaguucucgaugcucgccgccuacauguuccugcuuauuguacugggguuuccgaucaacuuuuugaccuuguauguaacggugcaacacaagaaguugaggacaccgcuuaacuauauccugcuuaaucucgccgucgcggaucuguucauggugcucggaggguuuaccuccacacuguauacgucccuccacggguacuucguguuuggucccacugggugcaacuuggaaggauucuuugcaacacugggaggggaaauugcguuguggagcuuggugguguuggcgauugagagauacguggucguaugcaaaccaaugucaaacuuucgguuuggagagaaccaugcgauuaugggagucgcguuuacgugggucauggccuuggccugcgcagcuccuccucucgcgggcuggucccgcuauauccccgagggacuucagugcucaugcggcaucgacuacuauaccuugaagcccgaggugaauaaugagucguucguaaucuacauguuugucgugcauuucacaauucccaugaucauuaucuucuucuguuacggacagcuuguguucacuguaaaagaggcagcagcgcagcagcaggaaagcgcgacaacccaaaaggccgagaaagaggugacgcggauggucaucaucaugguaaucgcguuucuuaucuguugggugcccuacgccucgguggcauucuacaucuuuacgcaccagggcucgaacuuuggaccgaucuucaugacuauuccagcguucuucgccaaaucggcagcuaucuacaaucccgucaucuacauuaugaugaacaagcaguuccgaaauuguaugcucaccacgauuugcugugggaagaaucccuugggagaugacgaagcgagcgcgacagucucaaaaaccgaaacuucacaagucgcaccggcgugaagcgcugccuucugcggggcuugccuucuggccaugcccuucuucucucccuugcaccuguaccucuuggucuuugaauaaagccugaguaggaaggcggccgcucgagcaugcaucuaga

SEQ ID NO: 12020 - RNA, 1047 nt, Artificial Sequence
  derived and/or modified sequence
augaacgguaccgagggucccaacuuuuaugucccuuuuuccaaugcaacaggaguugugcgcuccccauucgaguauccucaguauuaucucgccgagccuuggcaguuuucuauguuggcagccuacauguuccuucucaucguucugggauuuccgaucaauuucuugacuuuguauguuacagugcagcauaagaagcucagaacaccgcuaaauuauauccuguugaaccuggccguagccgaccuguuuaugguucugggaggcuuuaccucaacccuguauacuagccugcauggcuacuuugucuuuggaccaacuggcugcaaucucgaaggcuucuucgcuacccucggaggggagauugcccuguggagccuggucgucuuggccaucgagcgcuacguuguugugugcaagccaaugucaaacuuucguuucggcgagaaucacgcaauuaugggaguggccuuuacguggguuauggcccuugcuugugcagcaccgccccuggcagguuggagcagauauaucccagaaggacuucagugcaguuguggcaucgacuacuacacgcugaagcccgaggucaauaacgagucguuuguuauuuacauguucgugguucauuucacaauccccaugauuauuauauucuuuuguuacggacagcucguguucaccgucaaagaagcugccgcccagcagcaggaaucagccaccacucagaaggccgaaaaggaagugacccgcaugguuauaauaaugguaauugccuuucugaucuguugggugccauacgcgucuguugccuuuuacaucuuuacacaccagggaucuaacuucggaccuauauuuaugaccauucccgcguucuuugccaaguccgccgccaucuauaacccaguaaucuacaucaugaugaauaaacaguuuagaaacugcaugcuuaccacuaucuguugcggcaagaauccccugggagaugacgaggcuuccgcuacuguuucuaagacugagacuucucagguagcuccagcuuag

SEQ ID NO: 12021 - RNA, 1047 nt, Artificial Sequence
  derived and/or modified sequence
augaauggcaccgaaggcccgaauuucuauguacccuuuuccaacgcaaccggcguggucagauccccauuugaauauccccaauacuaccuugcugaaccuuggcaguuuaguaugcuggcagcuuacauguuuuuguugauuguccugggauuuccaauaaauuuccuaacucuauaugugacagugcagcauaaaaaacugcggaccccucucaauuauauucuucuuaacuuggcugucgcugaccucuucaugguccugggagguuucacuucaacacuguauacaaguuuacacggauacuuugucuuuggccccacaggcugcaacuuggaaggauuuuuugccacccuggggggagaaaucgcacucuggucacucgugguacuggcgaucgaacgguacgucguaguguguaaaccaauguccaauuucagauuuggcgaaaaccacgcaauuaugggaguugccuucaccugggugauggcucuugccugugcugcgccgccuuuagccgggugguccagguacauccccgaaggccuacaaugcagcugcggaaucgacuauuacacacugaagcccgaaguaaauaacgagucauucgucaucuauauguucgucguacacuucacaauccccaugaucauuauuuucuucuguuauggucagcuggucuuuaccgucaaagaggccgcagcccagcaacaggagucagccacuacccagaaggccgaaaaagaagucacuaggaugguuaucauuaugguaaucgccuuucugaucuguuggguaccauaugcuuccguugccuucuacaucuuuacccaccaaggcuccaauuucggaccuaucuucaugaccauccccgcuuucuuugcaaaaucugcagcgaucuacaacccugugauauauauuaugaugaauaaacaauuucgcaauugcaugcugacuacaauuugcuguggaaagaauccucuuggcgacgaugaagcaucagcuacugugagcaagaccgaaacaucccaaguagccccggccuag

SEQ ID NO: 12022 - protein, 5038 aa, Artificial Sequence
  derived and/or modified sequence
MGDAEGEDEVQFLRTDDEVVLQCSATVLKEQLKLCLAAEGFGNRLCFLEPTSNAQNVPPDLAICCFVLEQSLSVRALQEMLANTVEAGVESSQGGGHRTLLYGHAILLRHAHSRMYLSCLTTSRSMTDKLAFDVGLQEDATGEACWWTMHPASKQRSEGEKVRVGDDIILVSVSSERYLHLSTASGELQVDASFMQTLWNMNPICSRCEEGFVTGGHVLRLFHGHMDECLTISPADSDDQRRLVYYEGGAVCTHARSLWRLEPLRISWSGSHLRWGQPLRVRHVTTGQYLALTEDQGLVVVDASKAHTKATSFCFRISKEKLDVAPKRDVEGMGPPEIKYGESLCFVQHVASGLWLTYAAPDPKALRLGVLKKKAMLHQEGHMDDALSLTRCQQEESQAARMIHSTNGLYNQFIKSLDSFSGKPRGSGPPAGTALPIEGVILSLQDLIIYFEPPSEDLQHEEKQSKLRSLRNRQSLFQEEGMLSMVLNCIDRLNVYTTAAHFAEFAGEEAAESWKEIVNLLYELLASLIRGNRSNCALFSTNLDWLVSKLDRLEASSGILEVLYCVLIESPEVLNIIQENHIKSIISLLDKHGRNHKVLDVLCSLCVCNGVAVRSNQDLITENLLPGRELLLQTNLINYVTSIRPNIFVGRAEGTTQYSKWYFEVMVDEVTPFLTAQATHLRVGWALTEGYTPYPGAGEGWGGNGVGDDLYSYGFDGLHLWTGHVARPVTSPGQHLLAPEDVISCCLDLSVPSISFRINGCPVQGVFESFNLDGLFFPVVSFSAGVKVRFLLGGRHGEFKFLPPPGYAPCHEAVLPRERLHLEPIKEYRREGPRGPHLVGPSRCLSHTDFVPCPVDTVQIVLPPHLERIREKLAENIHELWALTRIEQGWTYGPVRDDNKRLHPCLVDFHSLPEPERNYNLQMSGETLKTLLALGCHVGMADEKAEDNLKKTKLPKTYMMSNGYKPAPLDLSHVRLTPAQTTLVDRLAENGHNVWARDRVGQGWSYSAVQDIPARRNPRLVPYRLLDEATKRSNRDSLCQAVRTLLGYGYNIEPPDQEPSQVENQSRCDRVRIFRAEKSYTVQSGRWYFEFEAVTTGEMRVGWARPELRPDVELGADELAYVFNGHRGQRWHLGSEPFGRPWQPGDVVGCMIDLTENTIIFTLNGEVLMSDSGSETAFREIEIGDGFLPVCSLGPGQVGHLNLGQDVSSLRFFAICGLQEGFEPFAINMQRPVTTWFSKGLPQFEPVPLEHPHYEVSRVDGTVDTPPCLRLTHRTWGSQNSLVEMLFLRLSLPVQFHQHFRCTAGATPLAPPGLQPPAEDEARAAEPDPDYENLRRSAGGWSEAENGKEGTAKEGAPGGTPQAGGEAQPARAENEKDATTEKNKKRGFLFKAKKVAMMTQPPATPTLPRLPHDVVPADNRDDPEIILNTTTYYYSVRVFAGQEPSCVWAGWVTPDYHQHDMSFDLSKVRVVTVTMGDEQGNVHSSLKCSNCYMVWGGDFVSPGQQGRISHTDLVIGCLVDLATGLMTFTANGKESNTFFQVEPNTKLFPAVFVLPTHQNVIQFELGKQKNIMPLSAAMFQSERKNPAPQCPPRLEMQMLMPVSWSRMPNHFLQVETRRAGERLGWAVQCQEPLTMMALHIPEENRCMDILELSERLDLQRFHSHTLRLYRAVCALGNNRVAHALCSHVDQAQLLHALEDAHLPGPLRAGYYDLLISIHLESACRSRRSMLSEYIVPLTPETRAITLFPPGRSTENGHPRHGLPGVGVTTSLRPPHHFSPPCFVAALPAAGAAEAPARLSPAIPLEALRDKALRMLGEAVRDGGQHARDPVGGSVEFQFVPVLKLVSTLLVMGIFGDEDVKQILKMIEPEVFTEEEEEEDEEEEGEEEDEEEKEEDEEETAQEKEDEEKEEEEAAEGEKEEGLEEGLLQMKLPESVKLQMCHLLEYFCDQELQHRVESLAAFAERYVDKLQANQRSRYGLLIKAFSMTAAETARRTREFRSPPQEQINMLLQFKDGTDEEDCPLPEEIRQDLLDFHQDLLAHCGIQLDGEEEEPEEETTLGSRLMSLLEKVRLVKKKEEKPEEERSAEESKPRSLQELVSHMVVRWAQEDFVQSPELVRAMFSLLHRQYDGLGELLRALPRAYTISPSSVEDTMSLLECLGQIRSLLIVQMGPQEENLMIQSIGNIMNNKVFYQHPNLMRALGMHETVMEVMVNVLGGGESKEIRFPKMVTSCCRFLCYFCRISRQNQRSMFDHLSYLLENSGIGLGMQGSTPLDVAAASVIDNNELALALQEQDLEKVVSYLAGCGLQSCPMLVAKGYPDIGWNPCGGERYLDFLRFAVFVNGESVEENANVVVRLLIRKPECFGPALRGEGGSGLLAAIEEAIRISEDPARDGPGIRRDRRREHFGEEPPEENRVHLGHAIMSFYAALIDLLGRCAPEMHLIQAGKGEALRIRAILRSLVPLEDLVGIISLPLQIPTLGKDGALVQPKMSASFVPDHKASMVLFLDRVYGIENQDFLLHVLDVGFLPDMRAAASLDTATFSTTEMALALNRYLCLAVLPLITKCAPLFAGTEHRAIMVDSMLHTVYRLSRGRSLTKAQRDVIEDCLMSLCRYIRPSMLQHLLRRLVFDVPILNEFAKMPLKLLTNHYERCWKYYCLPTGWANFGVTSEEELHLTRKLFWGIFDSLAHKKYDPELYRMAMPCLCAIAGALPPDYVDASYSSKAEKKATVDAEGNFDPRPVETLNVIIPEKLDSFINKFAEYTHEKWAFDKIQNNWSYGENIDEELKTHPMLRPYKTFSEKDKEIYRWPIKESLKAMIAWEWTIEKAREGEEEKTEKKKTRKISQSAQTYDPREGYNPQPPDLSAVTLSRELQAMAEQLAENYHNTWGRKKKQELEAKGGGTHPLLVPYDTLTAKEKARDREKAQELLKFLQMNGYAVTRGLKDMELDSSSIEKRFAFGFLQQLLRWMDISQEFIAHLEAVVSSGRVEKSPHEQEIKFFAKILLPLINQYFTNHCLYFLSTPAKVLGSGGHASNKEKEMITSLFCKLAALVRHRVSLFGTDAPAVVNCLHILARSLDARTVMKSGPEIVKAGLRSFFESASEDIEKMVENLRLGKVSQARTQVKGVGQNLTYTTVALLPVLTTLFQHIAQHQFGDDVILDDVQVSCYRTLCSIYSLGTTKNTYVEKLRPALGECLARLAAAMPVAFLEPQLNEYNACSVYTTKSPRERAILGLPNSVEEMCPDIPVLERLMADIGGLAESGARYTEMPHVIEITLPMLCSYLPRWWERGPEAPPSALPAGAPPPCTAVTSDHLNSLLGNILRIIVNNLGIDEASWMKRLAVFAQPIVSRARPELLQSHFIPTIGRLRKRAGKVVSEEEQLRLEAKAEAQEGELLVRDEFSVLCRDLYALYPLLIRYVDNNRAQWLTEPNPSAEELFRMVGEIFIYWSKSHNFKREEQNFVVQNEINNMSFLTADNKSKMAKAGDIQSGGSDQERTKKKRRGDRYSVQTSLIVATLKKMLPIGLNMCAPTDQDLITLAKTRYALKDTDEEVREFLHNNLHLQGKVEGSPSLRWQMALYRGVPGREEDADDPEKIVRRVQEVSAVLYYLDQTEHPYKSKKAVWHKLLSKQRRRAVVACFRMTPLYNLPTHRACNMFLESYKAAWILTEDHSFEDRMIDDLSKAGEQEEEEEEVEEKKPDPLHQLVLHFSRTALTEKSKLDEDYLYMAYADIMAKSCHLEEGGENGEAEEEVEVSFEEKQMEKQRLLYQQARLHTRGAAEMVLQMISACKGETGAMVSSTLKLGISILNGGNAEVQQKMLDYLKDKKEVGFFQSIQALMQTCSVLDLNAFERQNKAEGLGMVNEDGTVINRQNGEKVMADDEFTQDLFRFLQLLCEGHNNDFQNYLRTQTGNTTTINIIICTVDYLLRLQESISDFYWYYSGKDVIEEQGKRNFSKAMSVAKQVFNSLTEYIQGPCTGNQQSLAHSRLWDAVVGFLHVFAHMMMKLAQDSSQIELLKELLDLQKDMVVMLLSLLEGNVVNGMIARQMVDMLVESSSNVEMILKFFDMFLKLKDIVGSEAFQDYVTDPRGLISKKDFQKAMDSQKQFSGPEIQFLLSCSEADENEMINCEEFANRFQEPARDIGFNVAVLLTNLSEHVPHDPRLHNFLELAESILEYFRPYLGRIEIMGASRRIERIYFEISETNRAQWEMPQVKESKRQFIFDVVNEGGEAEKMELFVSFCEDTIFEMQIAAQISEPEGEPETDEDEGAGAAEAGAEGAEEGAAGLEGTAATAAAGATARVVAAAGRALRGLSYRSLRRRVRRLRRLTAREAATAVAALLWAAVTRAGAAGAGAAAGALGLLWGSLFGGGLVEGAKKVTVTELLAGMPDPTSDEVHGEQPAGPGGDADGEGASEGAGDAAEGAGDEEEAVHEAGPGGADGAVAVTDGGPFRPEGAGGLGDMGDTTPAEPPTPEGSPILKRKLGVDGVEEELPPEPEPEPEPELEPEKADAENGEKEEVPEPTPEPPKKQAPPSPPPKKEEAGGEFWGELEVQRVKFLNYLSRNFYTLRFLALFLAFAINFILLFYKVSDSPPGEDDMEGSAAGDVSGAGSGGSSGWGLGAGEEAEGDEDENMVYYFLEESTGYMEPALRCLSLLHTLVAFLCIIGYNCLKVPLVIFKREKELARKLEFDGLYITEQPEDDDVKGQWDRLVLNTPSFPSNYWDKFVKRKVLDKHGDIYGRERIAELLGMDLATLEITAHNERKPNPPPGLLTWLMSIDVKYQIWKFGVIFTDNSFLYLGWYMVMSLLGHYNNFFFAAHLLDIAMGVKTLRTILSSVTHNGKQLVMTVGLLAVVVYLYTVVAFNFFRKFYNKSEDEDEPDMKCDDMMTCYLFHMYVGVRAGGGIGDEIEDPAGDEYELYRVVFDITFFFFVIVILLAIIQGLIIDAFGELRDQQEQVKEDMETKCFICGIGSDYFDTTPHGFETHTLEEHNLANYMFFLMYLINKDETEHTGQESYVWKMYQERCWDFFPAGDCFRKQYEDQLS

SEQ ID NO: 12023 - DNA, 15117 bp, Artificial Sequence
  derived and/or modified sequence
atgggtgacgctgaaggcgaggacgaagtgcaatttctgagaactgacgacgaggtggtccttcaatgcagcgctacagtgttaaaagaacagcttaaactgtgcctcgctgccgaaggtttcggaaatagactgtgcttcttggagcctacaagcaacgctcagaatgtcccacctgatctcgctatatgttgcttcgtgttagaacagagtttgagcgtgcgggccctccaggagatgttagcaaatactgtagaggctggggttgaatcctcacagggaggcgggcatagaacgttgttgtacgggcacgccatccttctgcggcatgcacatagccgcatgtacttgagttgtctgacaacaagtagatctatgaccgacaagctcgccttcgatgtcggattacaggaagacgcaacaggtgaagcttgctggtggacaatgcatcctgcgtctaagcagaggtctgagggtgaaaaagtacgggtgggcgacgacatcattctcgtgagcgtgagttccgagagatacctgcacctttccaccgcttccggggagttacaggtggatgcgtctttcatgcagacgctgtggaatatgaaccccatctgttcacgatgtgaggagggcttcgtgacaggcggccatgtgcttaggctattccacggccatatggacgaatgcctgacgataagtcctgctgactcagatgaccagcgccgacttgtctactatgagggcggcgcggtttgtacccacgcccgaagtctctggcgtcttgagcctctgcggatatcttggtccggctcgcatctgagatggggacagccgctacgggttaggcacgtgacaactggacagtacctcgctctgaccgaagaccagggactggttgtcgtggacgcttccaaagcccacacaaaagccacatcattctgcttccggatatccaaggagaaactcgatgtggctcccaagcgtgacgttgaggggatgggaccccccgagatcaaatacggggagtccctttgtttcgtccagcacgtagcaagcgggctctggctgacatatgccgccccggaccctaaagccttgaggctcggggttctcaagaagaaggcaatgttacaccaggagggacacatggatgacgctctcagtcttacgaggtgtcagcaagaggagtcccaggctgcaaggatgatccacagcactaacggcctgtataatcagttcattaaaagtctggatagctttagtggaaagccccgaggaagcggtccaccagcgggtaccgctttgccaatcgagggcgtgattctatccctccaggacctcattatatatttcgagccaccttccgaagatctgcagcacgaagagaagcagtcaaagcttaggtctctgcgaaacaggcagtcactgttccaggaggagggtatgctctcaatggtgctgaactgcatcgaccggctcaatgtgtacacaacagccgcacactttgctgaattcgccggagaagaagccgccgaatcctggaaagaaattgttaacctcctgtatgaactgctggcctccctcatcagaggcaataggagtaattgcgccctgttcagcactaatctggattggctcgtttctaagctcgatcgtttagaagcaagctcaggcatcctagaggtcctgtattgtgtcctgatcgagtctccagaggttctcaacatcatacaggaaaatcatatcaaatccatcatcagcctattggataagcacggacgcaaccacaaagttctcgacgtgttatgctcactgtgcgtatgtaatggcgtcgcagttcgctccaaccaggatctgatcacagagaatctgttacccgggagagagctgctgctgcaaaccaatttgataaactatgtgacatccatccgcccgaacatcttcgtcggcagggcagagggtacaactcagtattccaaatggtatttcgaggtgatggtggatgaagtaactccattcctaacagctcaggcaacccatctgagagtgggatgggcccttacggaagggtatactccatatcccggagctggagagggatggggtggcaatggggtgggggatgacctgtattcctacggatttgacgggctgcacctgtggacagggcacgtggctagacccgtgacgagtccaggacagcatctcctggcgcctgaggatgtgatttcatgctgcctcgacctgtccgtaccttcgataagtttcaggatcaacggatgtcctgtgcagggggtgtttgagtcctttaacctcgatgggctgttcttccccgtggtcagcttcagtgctggagttaaggtaaggtttctcctcggcggtcgacacggagaattcaagttccttccaccgccagggtacgccccatgccacgaggccgtgctgccccgagaacggctccacctggaacctatcaaggagtatcgtagggaaggcccccgcgggccacacttagttggtccatccaggtgtttgtctcacacagacttcgtcccctgccctgttgatacagtacaaatcgtgcttccaccacatctggagcggatccgggaaaagctggccgagaatatccacgagctgtgggccctgacgaggattgaacagggatggacctacggccccgtgagagatgataataagcgattacatccatgtcttgtggacttccactccctgccagaacccgaacgaaattacaacctgcagatgagcggagagaccctgaaaacactgttggccttgggctgccatgtcggcatggctgatgagaaggctgaggacaatctgaaaaagaccaaactccctaagacctacatgatgtcaaacggatacaaaccagccccccttgatttatctcatgttcgactgacaccagcccaaactaccctggtagatcgactggctgagaatggacacaacgtatgggcccgggacagggtgggccagggttggtcatactctgcagtgcaagacattccggcccggcgtaacccacgcctggttccatatcgactcctcgacgaagccacaaagagaagcaaccgtgacagcttgtgtcaggctgtccgaactcttctggggtacggttataatatcgaacccccagaccaggagccaagtcaggtcgagaatcaatcccggtgtgacagggtgcgcatattccgcgccgagaaaagttataccgtgcaatccggtaggtggtactttgagttcgaagccgtgacaacaggcgagatgcgggtggggtgggcacggcctgagctgcggcctgacgtggagctgggggccgatgaactggcctacgtgttcaacggccaccgcggccagcgctggcacctggggagcgaaccttttggaagaccttggcagcccggcgatgtggtagggtgcatgattgacctgactgagaataccattatatttaccctgaacggcgaagttcttatgagtgacagcgggagcgaaaccgccttcagggaaatcgaaatcggggatgggtttctgccagtgtgcagcctgggtccaggccaggttggccatctcaacctggggcaagacgtgagctctctgaggttttttgcaatctgcggcctccaggaggggttcgaaccattcgccatcaacatgcaaagacccgtcaccacctggttcagcaagggcttgcctcagttcgaacctgtgccgctggagcaccctcactacgaagtaagccgagtggatggcacagtggacactcccccatgtctccgcctcacccatcggacatggggctcacagaactctctggtagaaatgcttttcctaagactatccctgcccgtgcagtttcaccagcacttccggtgcaccgcaggagcaactccgcttgctccccccggactccagcctccggctgaggacgaggccagggccgccgaaccagaccccgattatgaaaacttaaggaggtccgctggtggttggagcgaggctgagaacggcaaagaggggactgctaaagaaggcgctccggggggcacacctcaggccgggggagaagcacaacccgccagggcggagaatgaaaaagatgcaactaccgagaagaataagaagcgcggattcctgttcaaagcaaaaaaggtggcaatgatgactcaaccccccgctactcctaccctgccccgcctgccgcacgacgtcgtgcctgccgacaatcgggatgaccccgagataattctaaacactacgacctactattacagcgtgagagtttttgccggacaggagcctagctgcgtctgggctgggtgggttactccagattatcaccaacacgacatgtcttttgatctgagcaaagttagagtggtgacagttactatgggagacgagcagggcaatgttcactcatccctgaaatgctcaaattgctatatggtctggggtggcgattttgtctcaccgggacagcaggggagaatctcccacacagacctggttatagggtgtctcgtggacctggctacaggcctcatgaccttcacagcgaatgggaaagagagcaatacgttttttcaggtcgaacccaacaccaagctgtttcctgctgtgtttgtactgcctacacatcagaatgttatacagttcgagctgggaaagcagaaaaacattatgcctctgtctgccgcaatgttccagtcagagcggaaaaaccccgcaccccagtgtccccccagacttgaaatgcagatgttaatgccggtgagttggtcccggatgccaaaccatttcttgcaggtggagaccagacgagccggcgagcggcttggatgggccgtgcagtgtcaagaaccacttaccatgatggccctgcacatccccgaggaaaaccgctgcatggatattctggagcttagcgagagattggaccttcagcgcttccacagtcacaccctgcgcctctaccgagctgtttgcgctctcgggaataacagggtggcccacgccctgtgttctcacgtggatcaggcccagctgctgcatgccctcgaagacgcccacttgccagggccattgagagccggatattatgaccttctgatttcaattcaccttgaatctgcctgtagatcacggaggagcatgctctcagagtatatcgttcccttaaccccagagactagggccattacgctgttccccccaggaagatccaccgaaaacggacatcccaggcacgggctcccaggggtcggcgtaacaacctcccttcgccctccccatcatttttccccgccctgttttgtggctgcccttcccgctgctggtgccgctgaggcccctgcgcgtctctctccggctatccccctcgaggcactgagagataaagcattgcggatgctaggggaggccgtgcgggacggagggcaacacgctcgagacccagtgggtggatccgtggagttccagttcgtccctgttctgaaactggtttccacactgctggtcatggggattttcggcgatgaagatgtgaaacaaatcctgaaaatgattgagcctgaggtgttcacagaggaagaggaggaggaagacgaagaagaagagggcgaagaggaggacgaggaagagaaggaagaagacgaagaggagacagcacaggagaaggaggatgaagaaaaggaggaggaggaagctgccgagggtgagaaggaagagggcctagaagaaggcctgttacagatgaagttgcccgaaagcgtaaaactgcagatgtgccacctgctggaatatttttgcgaccaggagctgcagcaccgcgtagaaagtctggctgcctttgccgaaaggtatgtcgacaagctgcaggccaatcagcgcagtcggtacggcctcctgatcaaagcattcagtatgacagccgcagaaaccgcacggaggacacgtgagttccgaagccctccccaggaacagatcaacatgctgttgcagtttaaagatggtacggatgaggaagattgcccgcttcccgaggagattcgccaggatctgttggattttcaccaggacctgctcgcccattgcggtatacaacttgacggcgaggaggaggagcccgaggaggaaacgacattgggttctcgtctgatgagtctcttggagaaggttagactcgtcaaaaagaaggaggaaaaacctgaggaagagcggagcgcggaggagagtaagcctagaagcctccaggaactcgtatcccacatggtcgtacggtgggcccaagaagactttgtccagagtcctgaattggtgcgcgccatgttttctctcctgcaccggcagtacgacgggctgggcgaactcctgcgggcgttaccccgagcgtatactatcagcccctcctcagtcgaagatacaatgagtctgctggagtgcctgggacagattagaagtctactcatcgttcagatgggaccacaggaagagaacctgatgattcagtcaatcggaaacatcatgaacaataaggtattttaccagcatccgaacctcatgcgagccctggggatgcatgagacagtgatggaggtgatggtgaatgtattgggcgggggggagtctaaagagatacggttcccaaaaatggttacatcctgctgtcgatttttgtgttatttctgcaggatctcacggcagaaccagcggtcaatgttcgaccatctgagttacctgttagaaaactccggcataggcttggggatgcaagggtctacccctctcgacgtagcagccgcttccgtcatagataataacgagctcgcactcgctctgcaggaacaggacctagaaaaggtcgtctcttacctggcaggctgcgggcttcagtcttgtccaatgctggtggccaaaggataccctgacatcggctggaatccctgcggcggagagaggtatctggactttctgcggtttgccgttttcgttaacggggagtctgttgaggaaaacgctaacgtggtcgtgcgactgctgatccgtaagcccgaatgtttcggacctgccctgaggggagaaggcgggtcaggactgctggctgcaattgaagaggctatccgcatcagtgaggaccccgccagggatggccctggtattcggcgagacagacgaagagagcattttggggaggagcctcccgaagagaaccgagttcacctgggacatgctatcatgtcattttacgctgccctgatcgacctgctcggccggtgcgcccctgagatgcatttgatacaggccggcaaaggcgaagccctcaggattcgcgcgatcctgcgtagtcttgtcccactagaggacctagtgggcatcatttctcttcccctgcagataccgactctggggaaggatggagccctagtgcagcctaagatgagtgcttcctttgtcccagaccacaaagccagcatggtgttgttcctcgatcgcgtctatgggattgaaaatcaggattttctcctgcacgtgctggacgttggatttcttcccgacatgagagcagcggccagcctggatactgccaccttcagtactaccgagatggctcttgccctgaatcggtatctctgtcttgccgtcctgcctctgatcaccaaatgtgccccactattcgcaggcaccgaacatagggcaatcatggttgactcaatgcttcatacagtgtaccgtttatctcggggcaggagcctcaccaaagctcaacgagatgtgatcgaagattgcctgatgtctttgtgtcgatacatccgaccatctatgcttcaacacctgcttcggaggttagttttcgacgtacctatacttaacgaatttgcaaagatgcccctgaaattactcacaaaccattacgagaggtgctggaaatactactgtcttcccaccggttgggctaatttcggcgtcacctctgaggaggagctgcacctcacccgaaaactgttttgggggatatttgactccttagctcataagaagtacgatcccgagctttacagaatggctatgccctgcctgtgtgcgatcgccggggcactgccgccagactacgtggacgcttcatacagttcgaaagccgaaaagaaagcaaccgtggatgctgaagggaacttcgatccaaggcctgtggagaccctcaacgtgatcataccagagaagctggatagctttatcaacaagttcgctgagtacacccatgagaagtgggccttcgacaaaatacagaataactggtcttacggtgagaatattgacgaggagttgaaaacccatccaatgctcaggccctacaaaacattttccgagaaggacaaagaaatctataggtggcccattaaggagtctttaaaagcgatgatagcttgggaatggacaatcgagaaggctcgcgaaggcgaagaggaaaagacggagaagaagaaaacgaggaaaataagtcagtctgcacaaacttatgatccccgcgaggggtataacccccagccccccgacctcagcgcagtgacactgtcccgggagctacaggcaatggcggagcagctggccgagaactaccacaatacctggggtcggaaaaagaagcaggaactagaggccaaaggcggaggcacccatccattactcgtcccatatgatactctgaccgcaaaagagaaggcaagagaccgagaaaaggcgcaagagttactgaagttcttacaaatgaacggctacgccgtgacaaggggattgaaggacatggagctggattcatccagtattgaaaaacgttttgctttcgggtttctgcagcagctcctaaggtggatggatataagccaggagttcatcgctcacctcgaagccgtagtgtcgagtgggcgggtcgaaaaatctcctcacgagcaggagatcaagtttttcgctaagatcctgcttcctttgatcaatcagtattttaccaaccattgcctgtactttctttctactcctgctaaggtcctcgggtccggaggacatgcttccaacaaagagaaggagatgattactagccttttctgtaagctagccgctctggtgaggcatcgggtgagcttattcgggacggacgctcccgctgtagttaattgtctgcatatccttgcgcgcagtctcgatgcacggacagtgatgaagagcggccccgagatagttaaagccggactacggagcttttttgaatctgcctctgaagacatagaaaaaatggtggaaaacctacgactcgggaaagtgtcccaggcacgaacccaggtaaaaggcgtgggacagaatctcacttacaccactgtggcgctgctacctgtgctaacaacgctgttccagcacatcgcccagcaccaattcggcgacgatgtaatcctggatgatgtccaggtgagctgctatcgtaccctgtgctctatctactctttgggcaccactaagaacacgtacgtggagaaactgagacccgccctgggcgaatgcctcgcccggctcgcggccgcaatgccagtggccttcctggaacctcaacttaatgaatataacgcatgttcagtgtacaccacgaagagtcccagggaacgtgccattctgggtttacctaattccgttgaggaaatgtgtccagatattcccgtgctcgagaggcttatggcagacattgggggtctcgccgagtcgggagcgcgttacaccgaaatgccccatgtcattgagatcactctccctatgctgtgtagctatctcccgaggtggtgggagagagggccggaagcccccccgtccgccctgcctgcaggcgccccccccccctgcacagcagtgacatccgatcacctaaacagcctgcttggcaacatacttagaattattgtgaacaacttgggtatcgatgaagcgagctggatgaagcgcctagctgtctttgcccagccgatcgtgagccgcgccagacccgagctgttgcagtcacattttatcccaacaataggacggctccgcaaaagagcaggaaaggtcgtgtctgaagaggaacagctcagactcgaagcaaaagccgaagctcaagaaggagagcttcttgttcgggatgagttttctgttttgtgtcgtgacctgtacgcactgtatcctctgcttataagatacgtggacaataacagagctcaatggctcaccgaacccaaccctagcgctgaggagttatttcgaatggtcggcgaaatattcatttattggtccaagagccacaatttcaaaagggaggagcaaaactttgtagttcagaacgagatcaataacatgtcttttttgaccgccgacaataagtcaaagatggcaaaagctggcgatatacagagcggtggaagcgatcaagaacgcacgaaaaaaaagcggcggggagacagatactctgtacagacaagtttaattgtcgccaccttgaagaaaatgttgcccatcggattgaacatgtgcgcaccaaccgatcaagacctgattaccctggcgaaaacaagatatgcgctgaaagataccgacgaagaggttcgagagtttctgcacaacaacttgcacctgcagggaaaggttgaagggtcacccagcttgcgttggcagatggctctatatcggggggttccaggacgtgaggaggatgctgatgatcccgaaaaaatcgtaaggcgggtgcaggaagtgagcgccgttctctattacctcgatcagaccgagcacccctacaagtccaaaaaagcagtttggcacaagctgttaagcaaacaacgaaggagggccgtggtggcatgttttcgtatgacccctctatacaacctgcctacccacagggcctgcaacatgtttctggaatcttataaggccgcctggatactaacagaagaccactccttcgaggaccgtatgatcgacgatctctcaaaagccggcgagcaggaggaagaagaagaagaggtggaggagaaaaagcccgatcctttgcatcagttggtacttcacttttccagaacagctctcacggagaaatcaaagctggatgaggattatctgtatatggcttacgctgacatcatggccaaaagttgccatctagaggaggggggcgaaaatggtgaggcggaggaggaggtcgaggtaagcttcgaggagaagcagatggaaaaacaacggctgctataccagcaggctcggctccatacaaggggagcagccgagatggtgctgcaaatgatctctgcatgcaaaggggaaactggggccatggtgtcctctaccctgaaactcggcatctctattctcaatggcggaaacgccgaggttcagcagaagatgctagactatctaaaggataagaaagaagtggggtttttccagagcatacaagccctcatgcaaacctgttcagtgttggacctgaacgcttttgagagacagaacaaggccgagggacttggcatggttaatgaggatggaactgttatcaacagacagaacggtgagaaggtgatggccgacgacgagttcacacaggacttgttccgatttctccaacttttgtgtgaagggcataacaacgactttcagaactatctccgtacccagactggaaatacaactacaattaacattataatctgtacagtggattacctgttgaggctccaggaaagtatttcagatttctattggtattactctgggaaggacgtgattgaggagcagggaaaacggaatttttcaaaggcaatgtctgtggcaaagcaagtcttcaactcactgacagagtatatacaaggtccctgtaccggcaaccagcagtccttagcacactcgagactttgggacgcagtggtcggatttctgcacgtcttcgcccatatgatgatgaaactcgcccaggattcctctcagatcgagctgctcaaagagttattggatctgcagaaggacatggtcgtcatgctgctgtcattactggagggcaatgttgtgaacggcatgatagctcgacagatggtcgatatgcttgtggaatcatcgtccaacgtggagatgatactcaagttcttcgacatgttcctaaaattgaaagacatagtagggtctgaagcattccaagactacgtgaccgaccccagagggcttatttctaagaaagacttccaaaaggcaatggactcccagaaacaattctccgggcctgagattcagttcttgctctcatgtagcgaggctgatgagaatgagatgattaactgtgaggaattcgctaatcgctttcaggagcctgcaagggatatcggtttcaatgtggccgtgctgctgactaacctctcggaacacgtgccacatgacccccgcctgcacaacttccttgaattggccgaatccatcctggaatactttaggccttatctcggtcggatcgagataatgggcgcctctaggagaatagagaggatatactttgagataagtgagaccaatagagcccagtgggaaatgcctcaagtgaaggaatctaagcggcagttcatcttcgacgtcgtgaatgaaggaggtgaggcagagaaaatggagcttttcgtttcattctgtgaagatacaattttcgagatgcagattgcagcacagatttccgagcctgaaggggagccagaaaccgatgaggacgagggcgcgggcgctgctgaggctggagcagaaggggcagaagagggagcggctggattagagggcactgccgctacagcagctgcaggagcgactgctagagtggtggccgccgccggccgagcactcagaggtctctcctaccgcagtctgagaaggagagtcagacgcttgcgtaggctaacggccagggaggcagcaacagccgttgctgcactgctgtgggccgctgtgactagagcaggggccgccggagccggagcagccgccggggccctgggacttctgtggggtagcttgttcgggggtggcctggttgagggggccaaaaaggtgaccgtgacagagttgctggctggcatgccagaccccacttctgatgaggttcatggcgaacagccggctgggcctggcggcgacgcagatggtgagggagcctcagagggggcgggcgatgccgctgaaggagccggtgatgaagaagaggctgtccacgaggcggggcccggcggagccgacggggcagttgccgtgacagacggtggcccttttagacctgagggcgcgggtggactgggcgacatgggcgataccactccagccgaacctcctaccccggagggatccccaattttaaagaggaaactgggcgtcgatggagtcgaagaagagttgccgccagaacctgaacccgaacccgaacccgagctcgagcccgagaaagctgatgcagagaacggcgaaaaggaggaggtgcctgagcctacaccagagccgccgaagaagcaagccccaccaagccctcccccaaagaaggaggaggcagggggcgagttctggggagagctcgaggtgcagagggtgaaatttctgaactatctgtcacgtaacttctacactctgcggtttttggccctcttcctggctttcgcaattaattttatcctgctgttctataaggtttctgacagcccccccggtgaggacgacatggaaggctctgctgctggtgacgtaagcggggcaggttcagggggatcttcaggctggggactgggcgctggggaggaagccgaaggtgacgaagacgagaacatggtgtactactttctggaagaaagtaccggatacatggaacccgccctgcgatgtcttagtctgctgcataccttagtagcattcttgtgcatcattggatacaattgccttaaagtgccactggttatttttaaacgtgagaaagagctcgctcgaaagctagaattcgacggtctgtacatcactgagcagcccgaggacgatgatgtcaaaggccagtgggaccggctggtgctgaacactccaagctttccaagcaattactgggacaagtttgtgaaaaggaaagtgttagacaagcacggtgacatttacggccgtgaacgtatcgcagagctgttgggcatggatctcgcaaccttggagatcaccgctcacaacgaacggaagcctaaccctccaccaggccttttgacctggttaatgtccatcgacgtcaagtaccaaatttggaagttcggggtaattttcactgataatagtttcctgtatctgggctggtatatggtgatgagcctgttaggtcactacaacaatttcttctttgcggctcacctgctggatatcgccatgggcgtcaagaccctccgcacaatactgagtagcgtgactcataatgggaagcagttggtgatgacagtggggctccttgcggtagtcgtgtatctctacacagtggttgcttttaatttcttccgcaaattctataataagtcagaggatgaggacgagcctgatatgaagtgcgacgatatgatgacgtgttatcttttccacatgtatgtgggggtgagggctgggggcgggattggagatgagatagaggaccccgctggagatgaatacgagctttatagggtggtcttcgatatcaccttttttttcttcgtgatcgtgatcttactcgcaatcattcagggcctcatcatcgatgcttttggggaactgagggaccaacaggaacaggtgaaggaagatatggagactaagtgtttcatatgtggaatcgggtctgactactttgacaccacaccacacggcttcgaaacgcacactctcgaggaacacaatctcgcaaactatatgtttttcctaatgtacctgattaacaaagacgagaccgaacacactggccaagagtcttacgtgtggaaaatgtatcaagagagatgctgggacttctttcccgccggcgactgctttcgcaagcagtacgaggaccagctgagctag

SEQ ID NO: 12024 - DNA, 15102 bp, Artificial Sequence
  derived and/or modified sequence
atgggggacgccgagggagaggatgaggtgcagttcctgcgcacagatgacgaggtagtgctgcagtgttcggctactgtgctgaaggagcagctcaaactctgtcttgctgccgaaggtttcgggaaccggctgtgtttccttgaaccaactagcaatgcccagaatgtccctcccgatctagcaatctgctgttttgtcctggaacagagcctttcggttcgagccctgcaggaaatgctcgccaacaccgtagaagccggggtcgaatctagtcagggcggagggcaccggacactcttgtacgggcacgccatcctcctgcggcacgcccattcgagaatgtatcttagttgtctgacgacctcgaggagcatgacagacaagctggcctttgatgtgggattgcaggaagatgccacaggtgaggcctgctggtggactatgcatccggccagcaaacagcggagcgagggagagaaggtcagagtaggagatgacataatcttagtgtctgtgagctccgagcgctacctgcacctgtccaccgcctccggcgaactgcaagtggacgcctcattcatgcagaccctctggaatatgaaccctatctgcagccgctgcgaggaggggttcgtgacaggaggccatgtcctacggcttttccacggccatatggatgagtgcttgaccatttctcccgccgatagcgatgaccagcggcggttggtgtattacgaaggtggcgccgtctgcactcatgctcgatccttatggcgtctggaaccattgaggatctcatggagtggaagtcatctccgatggggacaaccgcttagggtcaggcacgtgaccactggccagtatctcgcccttacagaggaccagggactggtggtagtcgacgccagcaaagcacacacgaaggcgacctctttctgcttcagaattagcaaggagaaactggacgtggctccaaagcgtgacgttgaaggtatgggacctcccgagatcaaatacggggagagtctgtgtttcgtgcagcatgtcgcatctggattgtggctgacctatgctgctcccgatccgaaggccctgagactgggggtgttaaaaaaaaaggcgatgctgcaccaggaggggcacatggatgatgctctgtctttgactcgttgccaacaggaagaatctcaggcagcacgcatgatccactccacgaacggactgtataatcaattcatcaagagcctcgactcgttttccggtaagcctcgaggaagtgggcccccagcgggaacagccttgcctattgagggagtaatcctcagcttgcaggaccttattatctactttgaacccccaagcgaagatttacaacacgaggagaaacagtcgaaactgcgatcactgcgtaaccgtcagagtctgttccaggaagagggcatgctgtccatggtgctcaattgtattgaccgcctgaatgtctacactacggcagcacacttcgccgaattcgcaggcgaagaggcagctgagtcctggaaagagatcgtcaatctgctatatgaactcttagcctcactcattagagggaatcggtccaactgtgccctgtttagtacaaacctggactggctggtgagcaaactagaccgtctggaagcatcatccgggattctggaggtactttactgcgtgctgatagagtcccctgaggtgttgaatatcatccaagaaaatcatataaaaagtatcatctccctgctggacaagcatggccggaaccataaggtattggacgtgctgtgcagcctctgcgtttgtaacggtgttgccgtgagatccaatcaggacctgattaccgaaaacctgttacccggacgggagctattactccagaccaacttgatcaattacgttacatctattcgacccaatatatttgtcggacgagccgagggtaccactcagtattcgaagtggtacttcgaagtgatggtggacgaagtgacaccctttctgaccgcccaagcaactcacctgcgtgtgggatgggccctgactgaggggtacacaccttatcctggggccggggagggatggggcggcaacggagtgggagatgatctttattcttatggctttgacgggctccacttatggacaggacatgtggcccgcccagtgacttctcctggtcagcacctgctggcaccagaggatgtaataagctgctgcctggatctcagcgttccctcaatcagttttaggattaatggttgccccgttcagggcgtgttcgagtccttcaacttggatggtctgttctttccagtggtaagctttagcgcgggcgtcaaagtccgctttctgcttggagggaggcacggcgagtttaagtttctgccccctcctggctacgccccatgccacgaggccgtgctcccgagggagaggctgcacctcgaacctattaaagagtatcgcagagaggggccccgcggcccccaccttgtgggcccctccaggtgtctgagtcacacggattttgttccctgcccagtggataccgttcagatcgtgctgcccccccatctggaacgtatccgcgagaaattagccgagaacattcatgaactgtgggcgctgactaggattgagcaggggtggacatacgggcccgtgagggacgataataaacgcctgcacccttgtcttgtggacttccacagtttgcctgagccggagcggaattacaacttgcagatgtctggcgaaacactcaagacattactagcactaggatgtcacgtgggaatggcggacgaaaaggcggaagacaatctgaaaaagacaaaattgcctaagacttatatgatgagcaacggctacaagcccgcaccactggatttatctcacgtaaggctgacacctgcccagaccactctcgtggatcggctcgccgagaacggacacaatgtgtgggcaagggatcgagttggtcagggctggtcatacagcgccgtgcaggatattcctgctaggaggaatccgcggctcgttccgtatcgccttctggatgaggcaacgaagaggtccaaccgggactccttatgccaggcggtgagaacactgctgggctatggctacaatattgagccaccagaccaagagccttctcaggtagaaaatcagtctcgctgtgatcgcgtcaggatatttcgtgctgagaagtcgtataccgtgcagtctggcaggtggtatttcgagtttgaagccgtgactacaggagaaatgcgcgtcggctgggctcgccctgaactgcgccctgatgtcgagctaggcgccgatgagttggcatatgtgtttaatgggcatcgtggccagaggtggcatctgggatcagaaccttttgggaggccttggcagcccggggacgtggtggggtgtatgatcgacttaaccgagaatactattattttcacactgaacggcgaggtgctcatgagcgacagcgggtctgagaccgccttcagggaaattgaaataggagacggatttctgcctgtgtgctccctgggccctggccaggtcgggcatctgaatctggggcaggatgtcagctctctgagattttttgcaatatgcggcttgcaggaaggcttcgagccgtttgccatcaacatgcagcggcctgtcacaacatggttctcaaaagggctcccgcagttcgagcctgtccctttagaacacccccactacgaagttagcagagttgacggaaccgtagataccccgccctgcctacgattgacccatagaacctggggatcacagaactctctggtcgagatgctgttcctgaggctctcactgcccgtccaattccatcagcacttccggtgcaccgcgggagctacacccttggctccaccgggactgcaaccccctgccgaagacgaggccagagccgcagaacctgatccagactatgagaacctgcggagaagtgctggcggatggtcagaagctgaaaacggcaaagaagggacagctaaggaaggggcacccggggggaccccccaggcgggaggtgaagcccagcccgctagagccgaaaatgaaaaagacgctaccacggagaagaataagaagcgtggcttcttgtttaaggctaagaaggtggcaatgatgacacaaccacctgcaaccccgactctgccccgactaccgcacgatgtagtccccgcagataaccgggacgatcccgaaatcattttgaatacaacaacctattactactcagtgagagtgttcgctggccaagaacctagctgcgtgtgggctggctgggttaccccagactatcatcagcatgatatgtcttttgatctcagcaaagtccgggtcgttacggtaactatgggcgacgaacagggaaatgtgcactccagcctgaagtgtagcaactgttacatggtttggggcggagacttcgtttcaccagggcagcaggggcgtatctcacataccgaccttgtaatcggatgcctggtggatcttgcaactggtctgatgacattcaccgctaatggaaaggagagtaatacattcttccaggttgagcccaacactaagctctttccggcggtttttgtgctcccgacacatcaaaacgtgattcagttcgagttaggcaagcagaagaatattatgcccttgtctgcagccatgttccagtccgaacgcaaaaatccagcgccccagtgccctcctaggctggagatgcagatgctgatgcctgttagctggtctaggatgcctaaccattttctgcaggtagagactcggagggccggggaacggctcggatgggccgtgcagtgccaagaaccactaacgatgatggccctgcatatcccagaggaaaataggtgcatggacatcctggagctcagtgaacggcttgatctgcagagatttcactcacacacccttcgcctgtatcgggctgtttgcgccctcggaaataacagagtggcccacgccttatgctcccacgtcgaccaggctcaactgttgcatgctctggaagatgctcatctccctgggccactgagagccggttactatgatctgttaatcagcatccacctcgagtccgcttgtcggtcccgccgcagcatgctatcagagtacatcgtcccactcacacccgagacgcgggccataacactgtttccacccggtcgctcaaccgaaaacggccaccctcgccacggactgcccggtgtgggagttaccacgtccctccgaccccctcatcatttttctcctccctgcttcgtggccgccctcccagccgccggcgcggctgaagcaccggcgcggttgagccctgcaattcctctggaggcgttaagagacaaagcacttcgcatgctgggggaggccgtacgagacggcggacaacacgctcgagaccctgtgggtggctccgtcgagtttcagttcgtgccggtgttaaaacttgtgtcaactcttttggtgatggggatatttggcgacgaagacgtgaagcagattctcaagatgattgagcctgaggtgttcacagaagaggaagaagaagaagacgaagaggaggagggggaagaggaggatgaagaggagaaggaagaagatgaagaggagactgctcaagaaaaggaagatgaagagaaagaggaggaggaggcggctgagggggagaaggaggaaggtctcgaggagggcctcctgcagatgaagttgcccgaatcagtcaagctgcagatgtgccatcttctggagtacttttgtgatcaagaactgcagcaccgggtggagtccctggccgcttttgctgagcgatacgtagataagctgcaggcaaaccagaggagccggtatggcttgttgataaaagccttctcaatgaccgcagccgagacggctagacggactagagagttcagaagtccccctcaggaacagattaacatgttgctccagttcaaggatgggacagacgaagaggactgcccgctgccagaggaaatccggcaggatctgctcgatttccaccaggacttgctggctcactgcggaatccagttggacggggaagaggaggaacctgaggaagagacgaccctggggagcaggctcatgtccctgctcgagaaggtccgccttgtcaaaaaaaaagaagagaaacctgaagaagaaagatccgcagaagaatcaaaaccacggagtttgcaggagttagtttctcacatggtggtaaggtgggcacaggaggactttgtgcagtctccagagctcgtgcgggcaatgttctcactgctgcataggcagtacgacggtctcggtgagctgcttcgggccctgccccgggcctatacgatcagtcccagcagtgtagaggacacaatgagcctgctagagtgccttggtcaaatacgatcacttctgattgttcagatgggtcctcaggaagaaaatctcatgattcagtctatcggaaatattatgaataacaaggtgttctaccaacaccccaatctgatgcgggctttaggcatgcatgaaactgtgatggaggttatggttaatgtgcttgggggcggcgagtcaaaagaaattcggttcccaaagatggtaacctcttgctgtcgcttcctttgctatttctgtcgcatcagccggcagaatcagagatcaatgttcgaccacctttcatatctgctggaaaactccgggatcggactcggtatgcagggttcaacacccctggacgtggcggccgcctctgtgatcgacaacaatgagctggcgctggctttgcaggagcaggacttagaaaaagtggtgtcctatctggcaggctgcggattgcaatcatgtcctatgctggttgccaaaggctatcctgatatcggatggaatccttgtggcggggaacggtatttagatttcctccgcttcgcagtgttcgtgaatggggagtcagttgaagaaaacgcaaatgtggtcgtgagactgctcatacgaaagcctgagtgcttcggtccagccctgaggggggaaggagggtcgggcctcctcgccgccatcgaggaagcgatcaggatctcggaggaccctgctcgggatggcccaggcattcgtagggaccggaggagggagcatttcggagaagaaccgccagaagagaacagggtgcatctcggccatgccattatgtccttttatgctgccttgattgacctgttaggcaggtgtgcgccagagatgcaccttattcaagcagggaaaggagaggcattaaggatacgtgctattctccgttcactggtccccctggaagacctagtgggtatcatttcgcttcctctgcaaataccaactctcggcaaggatggggctctcgtgcagcctaaaatgtccgcttcttttgtgcctgaccataaggcatctatggttctcttcctggacagggtgtatggcatcgaaaaccaggatttcctgcttcacgttctggatgttggatttctccccgacatgcgagcagccgccagccttgacacggccaccttttcaactaccgaaatggcactagctctgaatcgatatctgtgcctggctgtgttaccgctgatcacgaaatgtgcccccctcttcgccggcaccgagcaccgtgccatcatggtggactccatgcttcatactgtctacagactgtcacgcggtcgtagcctgacaaaggctcaacgggacgtgatagaagattgcctcatgtcgttgtgtcggtacatacggccttctatgctgcagcatctcttgcggcgtctggtttttgacgtacccattcttaacgaattcgctaagatgccactcaaactcttaactaatcattatgaaagatgctggaaatattactgcctccctactggctgggctaacttcggcgtgactagtgaagaggagctccacctgacaagaaagctgttctgggggattttcgacagcctggcccataaaaagtatgaccccgagctgtaccgaatggccatgccttgtctgtgcgccattgccggagccctgcctcctgactatgtggacgctagctattcctctaaggcagagaaaaaggccacagtcgacgcagaaggcaactttgacccaagacccgttgagacccttaatgtgataattcctgaaaagctggacagtttcataaataagtttgcagagtatactcacgagaagtgggcatttgataagattcagaataattggtcgtatggcgaaaatatagacgaggagttgaagacccaccctatgctgaggccttacaaaacttttagcgagaaggataaggaaatttaccgatggcctattaaagaaagcctcaaagctatgatcgcctgggagtggactattgaaaaagcacgcgaaggagaagaggagaagaccgaaaaaaagaagactaggaagatctcccagagcgcccagacatacgacccaagagagggatacaatccacaaccccccgacctttccgccgtaacactctccagggagctgcaggctatggcagagcagctcgccgagaattaccataacacgtgggggcgcaagaaaaagcaggagctggaagccaaaggaggtggaactcatcctctgctcgttccttacgatacactcactgcaaaagaaaaagctagagacagagagaaagcccaggaactgttgaaattcctgcaaatgaatgggtatgcggtaacccggggactgaaggacatggagcttgacagcagcagtatagagaaaaggttcgccttcggtttcctccaacagcttttaagatggatggatatcagtcaagaatttatcgctcacttagaggccgtcgtcagttcagggcgcgtggagaagagtccacatgagcaggaaatcaagttcttcgctaaaatactgctgcctctgatcaatcagtactttactaaccactgcctatactttctgtccacccctgctaaagtcctcggctccggcgggcacgcctcgaacaaagagaaggagatgataacgagcctgttttgcaagttagccgccctggtccgtcaccgtgtgagtttatttgggaccgacgcaccagctgtcgtaaattgcctccatatactggccagaagtttggatgcccgaaccgtgatgaagtccgggccagagatcgtgaaggccgggctacgctcattctttgaaagcgccagcgaagatattgaaaaaatggttgagaacctgaggttaggtaaggtgtcccaagcaagaacacaagtgaagggagtgggacaaaacctcacttacaccacggtcgctctccttcctgtcctgactacactgttccagcatattgcccaacaccagtttggcgatgatgtaattctggacgacgtccaggtgagttgttatagaacactgtgtagtatttattcactcggaacaacaaaaaatacgtatgtagaaaaattgcgtcctgcgctgggggaatgtctcgcaaggctcgcagccgccatgccagttgcttttcttgaaccacagctgaatgaatataatgcttgctcggtgtataccactaagtccccaagggagcgagcaatcctggggttgcctaattccgttgaggagatgtgccccgatatccctgtgctggagcgcctcatggcagatattggcggcctggctgaaagtggcgcccggtacacagagatgccacatgtgatcgagattactctgcccatgttgtgctcctatctgccaaggtggtgggaaaggggaccggaggctcctccctctgctctgcccgccggcgcacccccgccctgtacagcggtgacatcagaccacctgaactccttacttggtaacattctgcggattatcgtgaataatcttggcatcgacgaggcgagctggatgaagcggcttgctgtctttgcccagcctatcgtgagcagggcccggcccgaattgctgcagtcccactttatacctaccattggccgcctgcggaagcgcgcagggaaggtggtgagcgaggaagaacagctccgtctcgaagccaaagcagaagctcaggaaggagagctgctggttagggacgaattctcagttctgtgtagggacttatacgccctgtacccactattgatacgctacgtggacaataatcgggctcagtggctgaccgagcccaatccttccgctgaggaactcttccgaatggtgggcgagatcttcatctactggagcaagtcacacaatttcaagcgcgaggaacaaaatttcgtcgtgcagaatgagattaataatatgtctttcctgaccgctgataacaaatccaaaatggctaaagccggggacatccagtccggcggatctgatcaggagaggacgaagaagaagaggagaggggatagatactcagtgcagaccagcctgattgtggccacccttaagaaaatgctgcccattgggcttaatatgtgcgccccaactgaccaggacctgattacattagccaaaacaagatacgccctgaaggataccgacgaagaggtacgggagtttctccacaataacctgcatttgcaaggcaaagtcgaggggtctccatcgcttagatggcaaatggcattgtaccgaggcgtgcccggtcgcgaggaggacgcggatgatcctgagaagattgtaagaagggtgcaggaggtgtccgccgttctgtactatctggatcagaccgagcacccatacaagtccaagaaagctgtgtggcacaagctgctatctaaacagaggcgccgggccgttgtcgcatgtttcagaatgacgcccttatacaacctgcccacacatcgcgcttgtaacatgttccttgagtcatataaagccgcttggatcctgactgaggatcactcttttgaggacaggatgattgatgacctgtccaaggcaggagagcaagaggaggaagaagaagaggtcgaggaaaaaaagccagaccccttgcatcaactggttctgcatttttcaagaactgccctgacagaaaaatctaaactggacgaagactatctgtacatggcctatgcggatattatggcgaagagttgtcatctggaagagggtggcgaaaatggcgaggctgaggaggaggtagaggtgtcctttgaggagaagcagatggaaaaacaacggctgctatatcagcaggcccgcctccacacacgcggtgccgctgaaatggtcctgcagatgattagtgcctgcaaaggcgaaacaggagccatggtatcttccaccttaaaattgggtataagtattctcaatggtggaaacgctgaagtgcaacaaaagatgctagattatcttaaggataagaaggaggtaggattctttcagagtatccaggccttgatgcagacttgcagcgtattagacttaaacgctttcgagcgccagaataaagctgaagggctgggaatggtcaatgaggatggcaccgtgggcgagaaagtgatggcggacgatgagttcacccaggacctgttccggtttctccagctgctatgcgagggccataacaacgactttcagaactacctgcgcacccaaaccgggaatacaacaaccatcaacatcattatctgcaccgtcgattatctcctcaggctgcaagagtcaatttcagatttctactggtactattcaggtaaggacgtcatcgaagagcagggcaaaaggaacttcagtaaagcgatgagtgtcgctaagcaagtttttaactctttaaccgagtatattcaaggcccgtgtacagggaaccagcagtccctggcacactcgcgactctgggatgccgtggtgggtttcctgcacgtgtttgctcacatgatgatgaagctcgcccaagactcttcacagatcgagttgttgaaagagttgttggacctccagaaggacatggtggtgatgctcctgtccttgttagaaggtaatgttgtcaatggcatgattgcacgccagatggttgatatgctggtggaaagtagtagtaacgtggagatgattctgaagttcttcgatatgtttcttaaacttaaagacattgtagggagtgaggcgtttcaggactacgtgactgatccgcgggggctcatcagtaaaaaggacttccagaaagccatggatagccaaaaacagttttcggggcccgaaattcagttcttgctgtcctgctcagaagccgacgagaatgagatgattaattgtgaagaattcgccaacagattccaggagccggcgcgggatataggctttaacgtcgcggtactactgacaaacctgagtgagcatgtacctcatgatcccagacttcacaactttctagagctcgccgaaagcatccttgaatacttccgcccttatttgggacggatcgaaatcatgggggcatctcgacggattgaaagaatttactttgagatttccgagaccaaccgggcccagtgggaaatgcctcaggtaaaagaatccaagcggcagtttatcttcgacgtggttaatgagggcggggaggccgaaaaaatggaactcttcgtcagtttttgcgaggacaccatattcgagatgcagatcgctgcgcagatatctgagcctgaaggagaacccgagaccgacgaggacgagggtgccggcgctgctgaggccggagctgaaggtgcagaggaaggagccgcaggcctggaggggacagccgccacagctgccgcaggagccacagcccgcgtggtcgctgctgccgggcgcgctctgcgggggctctcataccggagcctgaggcggcgggtccgcagactgcgcaggcttaccgccagagaggctgccaccgctgttgctgccttgctttgggctgctgtcacccgcgcaggagctgctggtgccggtgcagcggccggcgctttgggattactgtgggggtcactcttcggaggaggactggtagaaggtgccaaaaaggttaccgtcaccgagctgctcgccggcatgcccgatcccactagcgatgaagtgcatggcgaacagcccgcaggacccggtggggacgccgacggggaaggagcctctgagggagctggggatgctgctgagggagctggcgacgaagaggaggccgtgcatgaggcagggcctggcggggccgatggggcggtcgccgttaccgacggaggcccatttcggccagaaggagctggcgggctcggcgatatgggcgatactacgcctgccgagccgcctacaccagaaggcagtcccattcttaagcgtaaacttggcgtagacggggtggaagaggagcttcccccggagccagagccagagccagaacccgagctggagccagaaaaggcggacgctgagaacggcgagaaagaggaagttcccgagccaacacctgaacctcccaagaagcaagccccgcccagtccccctccaaagaaggaggaagctggaggtgagttttggggcgaacttgaggtgcagagggttaagtttctgaattatttgtcaagaaacttttacacacttcgatttctggccctatttctggccttcgccatcaacttcatcttgctattttacaaagtgagcgactcaccacccggcgaggacgacatggagggctccgccgcaggcgacgtgagtggtgcaggatcaggtggatcatcagggtgggggttgggcgccggcgaggaggctgagggggacgaggacgaaaacatggtttattattttctggaggagtcaactggttacatggaacctgcactgagatgcctgtccctgctccatactttggttgcttttctctgcataataggctataactgtctcaaggtgcctctcgtgattttcaagcgcgaaaaagagttggctagaaaactggagttcgatggactgtacatcaccgagcaacccgaggacgatgatgtgaagggccagtgggatcgactggtgcttaacaccccttctttcccgagcaactactgggacaagttcgtgaagaggaaggtgcttgataagcatggagacatttatggacgcgagcgcattgctgaattattgggcatggacctcgctacgctggagattaccgcacacaacgagcggaaacccaaccccccacctggcctgctcacctggctgatgtccatcgatgtcaaataccagatctggaagttcggcgtaattttcacagataactcatttctgtatctcggctggtacatggtgatgtccctgttgggacactataataattttttcttcgccgcacatctgttggatatcgcgatgggcgtcaagacactgcgcacaatccttagctctgtgacccataacggcaagcagctggttatgacggtggggctgcttgcagtggtggtgtacctttataccgtggtggctttcaacttctttagaaaattttacaataaaagtgaggatgaggatgagcccgacatgaaatgtgacgatatgatgacctgctacctgtttcacatgtatgttggggttcgcgccggcggtgggattggtgatgagattgaggatcccgccggagatgaatacgagctgtatagagtcgtatttgacatcacattctttttcttcgtcatcgtgatcctgctcgccatcatccaggggctcattatagatgcatttggggagctgagagatcagcaggaacaggtgaaagaggatatggagaccaagtgtttcatctgtggcatcgggtctgactatttcgatactactccccacggattcgaaacccatacactggaggaacacaacctggctaactacatgttcttcctaatgtacctgattaacaaagatgaaaccgaacatactggccaagaatcttacgtatggaagatgtaccaggaacgttgctgggacttttttcccgcaggggattgcttcagaaaacaatacgaagatcagctgtcttag

SEQ ID NO: 12025 - DNA, 2031 bp, Artificial Sequence
  derived and/or modified sequence
atgaaatcaggcccggagattgtaaaggccggccttaggtctttctttgagagtgcatccgaggacatcgagaagatggtcgagaacctgcgcttgggaaaggtctcccaggcccggacccaggttaaaggagtgggtcaaaatctgacgtatactacagtcgcacttttgccggtcctcaccacactcttccagcacattgcgcagcatcagttcggtgacgacgtaatcttggacgacgtgcaagtgagctgctacaggacactgtgttctatatacagtctgggaaccaccaagaacacctatgtggagaagctgagaccagcgctcggagagtgcctcgcccgcctggcagccgccatgcctgtagccttcctggagccccagctgaacgagtacaacgcctgttcagtttatacgacaaagagtcctagggaaagggccatactggggcttcccaactctgttgaggagatgtgcccagacattcctgttctcgagagactaatggccgatatagggggactggctgagtccggcgctaggtacaccgaaatgccccatgtgatcgagataaccctgcctatgctgtgtagttacctgcctagatggtgggagcgcgggccagaggcacctccctccgccctgcccgccggtgcgccccctccatgtacggctgtgacgagcgatcatctgaatagtttactcggaaacattctgaggattattgtcaataacttgggtatcgacgaagcgtcatggatgaagcggctggccgtgttcgcccagccgatcgtgtcgcgtgcccggcctgaattgctccagtctcacttcattcccactatcggaaggttgaggaagcgagcaggtaaggttgtgtcagaagaagagcaactgagactcgaggctaaggccgaggctcaggaaggcgagttgctggtgcgcgacgagtttagcgtgctgtgccgagacctatatgccttgtatcctcttctgatccgctatgtcgataataaccgcgctcagtggttgacagagccaaatccgagtgccgaagaactgttccgcatggtcggcgagattttcatttattggtctaaatctcataattttaaacgggaagagcagaatttcgtggtacaaaatgaaatcaataatatgtcctttctcacggctgacaataagtctaagatggccaaagcaggcgacatacagagcggagggtccgaccaagaacgaactaaaaaaaagaggcgcggtgatagatacagtgtccagacttcattgattgtcgccacgcttaagaaaatgttacccattgggttgaacatgtgtgccccaacggaccaagacttgatcacattagcaaaaacccgttacgcactgaaggacactgatgaggaggtgcgggagttcctgcataacaacctgcacctgcagggcaaagttgagggcagtccttctttacgctggcaaatggccctgtacagaggggtgcccggaagagaagaggacgcagatgatccagaaaaaatcgttcggcgggtgcaggaggtgtccgcagtcctatactacctcgaccagaccgaacatccgtacaagtctaagaaggccgtctggcataagctattatcgaaacagaggagacgggccgtggtggcctgcttccgtatgacgcctctgtacaatctccccactcaccgggcatgtaatatgtttctggaaagctataaggcggcatggattctgactgaagaccatagttttgaggacagaatgatagacgatctaagtaaagctggagagcaagaggaagaagaagaggaagtggaagagaaaaagcccgatcctctgcatcaacttgtgttgcacttctccaggactgccctgacagagaaatccaaactggacgaggactacttatacatggcgtatgccgacatcatggccaagtcatgccacctggaggagggtggggagaacggggaagcagaagaggaagtcgaggtgagttttgaggaaaagcaatag

SEQ ID NO: 12026 - DNA, 15117 bp, Artificial Sequence
  derived and/or modified sequence
atgggagatgctgaaggagaagatgaggtgcagttcctgaggacagatgatgaggtggtgctgcagtgcagcgccaccgtgctgaaggagcagctgaagctgtgcctggccgctgagggctttggaaaccggctgtgcttcctggagcccaccagcaatgcccagaatgtgcccccagacctggccatctgctgctttgtgctggagcagagcctgtctgtgcgggccctgcaggagatgctggccaacacagtggaggccggcgtggagagcagccagggcggcggccacaggaccctgctgtatggccacgccatcctgctgcggcatgcccacagcaggatgtacctgagctgcctgaccaccagccgctccatgacagacaagctggcctttgatgtgggcctgcaggaggatgccactggagaggcctgctggtggaccatgcacccagccagcaagcagaggtctgagggggagaaggtgcgggtgggagatgacatcatcctggtgtctgtgtcctctgagcgctacctgcacctgagcacagccagcggggagctgcaggtggatgccagcttcatgcagaccctgtggaacatgaaccccatctgcagccgctgtgaggagggctttgtgactggaggccacgtgctgcggctcttccacggccacatggatgagtgcctgaccatcagccctgctgacagtgatgaccagaggcggctggtgtactatgagggcggcgctgtgtgcacccacgcccggagcctgtggaggctggagcccctgcgcatctcctggagcggcagccacctgcgctggggccagcccctgcgggtgagacatgtgaccaccggccagtacctggccctgacagaggaccagggcctggtggtggtggatgccagcaaggcccacaccaaggccaccagcttctgcttccgcatcagcaaggagaagctggatgtggcccccaagagagatgtggagggcatgggccccccagagatcaagtacggggagagcctgtgctttgtgcagcacgtggccagcggcctgtggctgacctatgctgccccagaccccaaggccctgcggctgggcgtgctgaagaagaaggccatgctgcaccaggagggccacatggatgatgccctgagcctgacccgctgccagcaggaggagagccaggccgccaggatgatccacagcaccaacggcctgtacaaccagttcatcaagagcctggacagcttcagcggcaagccccggggcagcggccccccagctggaacagccctgcccattgaaggagtcatcctgagcctgcaggacctgatcatctactttgagcccccatctgaggacctgcagcacgaggagaagcagagcaagctgcggagcctgaggaaccggcagagcctcttccaggaggagggcatgctgtccatggtgctgaactgcatcgaccggctgaatgtgtacaccacagctgcccactttgctgagtttgctggggaggaggccgctgagagctggaaggagatcgtgaacctgctgtatgagctgctggccagcctcatccggggcaacagaagcaactgtgccctcttcagcaccaacctggactggctggtgtccaagctggaccggctggaggccagcagcggcatcctggaggtgctgtactgtgtgctgattgagagccctgaggtgctgaacatcatccaggagaaccacatcaagagcatcatcagcctgctggacaagcacggcaggaaccacaaggtgctggatgtgctgtgcagcctgtgtgtgtgcaatggagtggccgtgcgcagcaaccaggacctgatcacagagaacctgctgcccggccgggagctgctgctgcagaccaacctgatcaactacgtgaccagcatccggcccaacatctttgtgggccgggcagagggcaccacccagtacagcaagtggtactttgaggtgatggtggatgaggtgacccccttcctgacagcccaggccacccacctgcgggtgggctgggccctgacagagggctacaccccctacccaggagctggggagggctggggcggcaatggagtgggagatgacctgtacagctatggctttgatggcctgcacctgtggacaggccacgtggcccggcctgtgaccagccctggccagcacctgctggccccagaagatgtgatcagctgctgcctggacctgtctgtgcccagcatctccttccgcatcaatggctgccctgtgcagggcgtgtttgagagcttcaacctggatggcctcttcttccctgtggtgtccttctctgctggggtgaaggtgcgcttcctgctgggcggccgccacggggagttcaagttcctgcccccacctggctacgccccctgccatgaagctgtgctgccccgggagcggctgcacctggagcccatcaaggagtacagaagagagggcccccggggcccccacctggtgggccccagccgctgcctgagccacacagactttgtgccctgccctgtggacacagtgcagatcgtgctgcccccccacctggagcgcatccgggagaagctggccgagaacatccacgagctgtgggccctgacccgcatcgagcagggctggacctacggccctgtgagagatgacaacaagaggctgcacccctgcctggtggacttccacagcctgcctgagcctgagaggaactacaacctgcagatgtctggagagaccctgaagaccctgctggccctgggctgccacgtgggcatggctgatgagaaggccgaggacaacctgaagaagaccaagctgcccaagacctacatgatgagcaatggctacaagccagcccccctggacctgagccacgtgcggctgaccccagcccagaccaccctggtggaccggctggctgaaaatggccacaacgtgtgggcccgggacagagtgggccagggctggagctacagcgctgtgcaggacatcccagcccggaggaacccccggctggtgccctaccgcctgctggatgaggccaccaagaggagcaacagagacagcctgtgccaggccgtgaggaccctgctgggctacggctacaacatcgagcccccagaccaggagcccagccaggtggagaaccagagccgctgtgacagagtgcgcatcttccgggcagagaagagctacacagtgcagagcggccgctggtactttgaatttgaagctgtgaccaccggggagatgagggtgggctgggcccggcctgagctgcggccagatgtggagctgggcgcagatgagctggcctacgtgttcaacggccaccggggccagcgctggcacctgggcagcgagcccttcggccggccctggcagcctggagatgtggtgggctgcatgattgacctgacagagaacaccatcatcttcaccctgaatggagaggtgctgatgtctgacagcggcagcgagacagccttccgggagattgaaattggagatggcttcctgcctgtgtgcagcctgggccctggccaggtgggccacctgaacctgggccaggatgtgagcagcctgcgcttctttgccatctgtggcctgcaggagggctttgagccctttgccatcaacatgcagaggcctgtgaccacctggttcagcaagggcctgccccagtttgagcctgtgcccctggagcacccccactatgaggtgtcccgggtggatggcaccgtggacaccccaccctgcctgcggctgacccacaggacctggggcagccagaacagcctggtggagatgctgttcctgcggctgagcctgcctgtgcagttccaccagcacttccgctgcacagctggggccacccccctggcccctcctggcctgcagcccccagcagaagatgaggcccgggctgctgagccagaccctgactatgagaacctgcggcgctctgctgggggctggagcgaggctgaaaatggcaaggagggcacagccaaggagggcgcccctgggggcaccccccaggccggcggggaggcccagcctgcccgggcagaaaatgagaaggatgccaccacagagaagaacaagaagaggggcttcctgttcaaggccaagaaggtggccatgatgacccagcccccagccacccccaccctgccccggctgccccatgatgtggtgcctgctgacaacagagatgatcctgagatcatcctgaacaccaccacctactactacagcgtgcgggtgtttgctggccaggagcccagctgtgtgtgggccggctgggtgaccccagactaccaccagcacgacatgagctttgacctgagcaaggtgcgggtggtgacagtgaccatgggagatgagcagggcaatgtgcacagcagcctgaagtgcagcaactgctacatggtgtggggcggggactttgtgtccccaggccagcagggccgcatcagccacacagacctggtgattggctgcctggtggacctggccaccggcctgatgaccttcaccgccaacgggaaggagagcaacaccttcttccaggtggagcccaacaccaagctgtttcctgctgtgtttgtgctgcccacccaccagaatgtcatccagtttgagctgggcaagcagaagaacatcatgcccctgtctgctgccatgttccagagcgagaggaagaacccagccccccagtgccccccccggctggagatgcagatgctgatgcctgtgtcctggagcaggatgcccaaccacttcctgcaggtggagaccaggagagctggggagcggctgggctgggccgtgcagtgccaggagcccctgaccatgatggccctgcacatcccagaagaaaatcgctgcatggacatcctggagctgtctgagcggctggacctgcagcgcttccacagccacaccctgcggctgtacagagctgtgtgtgccctgggcaacaacagagtggcccacgccctgtgcagccacgtggaccaggcccagctgctgcacgccctggaggatgcccacctgcccggccccctgcgggccggctactatgacctgctgatcagcatccacctggagagcgcctgccgcagccgccgctccatgctgtctgagtacatcgtgcccctgaccccagagacccgggccatcaccctcttccccccaggccgcagcacagaaaatggccaccccaggcatggcctgcccggggtgggcgtgaccaccagcctgcggcccccccaccacttcagccccccctgctttgtggccgccctgcctgctgctggagctgctgaggccccagcccggctgagccctgccatccccctggaggccctgcgggacaaggccctgaggatgctgggggaggccgtgagagatggcggccagcacgcccgggaccctgtgggcggctctgtggagttccagtttgtgcctgtgctgaagctggtgtccaccctgctggtgatgggcatctttggagatgaagatgtgaagcagatcctgaagatgattgagcctgaggtgttcacagaggaggaggaggaggaggatgaggaggaggagggggaggaggaggatgaggaggagaaggaggaggatgaggaggagacagcccaggagaaggaggatgaggagaaggaggaggaggaggccgctgagggggagaaggaggagggcctggaggagggcctgctgcagatgaagctgcctgagagcgtgaagctgcagatgtgccacctgctggagtacttctgtgaccaggagctgcagcaccgggtggagagcctggccgcctttgctgagagatatgtggacaagctgcaggccaaccagaggagccgctatggcctgctgatcaaggccttctccatgacagctgctgagacagcccggaggacccgggagttccgcagccccccccaggagcagatcaacatgctgctgcagttcaaggatggaacagatgaggaggactgccccctgcctgaggagatccggcaggacctgctggacttccaccaggacctgctggcccactgcggcatccagctggatggagaggaggaggagcctgaggaggagaccaccctgggcagccggctgatgagcctgctggagaaggtgcggctggtgaagaagaaggaggagaagccagaggaggagaggtctgctgaggagagcaagcccaggagcctgcaggagctggtgagccacatggtggtgcgctgggcccaggaggactttgtgcagagccctgagctggtgcgggccatgttcagcctgctgcaccggcagtatgatggcctgggggagctgctgcgggccctgccccgggcctacaccatcagccccagctctgtggaggacaccatgagcctgctggagtgcctgggccagatccgcagcctgctgattgtgcagatgggcccccaggaggagaacctgatgatccagagcatcggcaacatcatgaacaacaaggtgttctaccagcaccccaacctgatgagggccctgggcatgcatgagaccgtgatggaggtgatggtgaatgtgctgggcggcggggagagcaaggagatccgcttccccaagatggtgaccagctgctgccgcttcctgtgctacttctgccgcatcagccggcagaaccagaggtccatgtttgaccacctgagctacctgctggagaacagcggcatcggcctgggcatgcagggcagcacccccctggatgtggccgccgcctctgtgattgacaacaatgagctggccctggccctgcaggagcaggacctggagaaggtggtgtcctacctggccggctgcggcctgcagagctgccccatgctggtggccaagggctacccagacatcggctggaacccctgtggcggggagcgctacctggacttcctgcgctttgctgtgtttgtgaatggagagagcgtggaggagaatgccaacgtggtggtgcggctgctgatcaggaagccagagtgcttcggccctgccctgcggggggagggcggcagcggcctgctggccgccatcgaggaggccatccgcatcagcgaggaccctgccagagatggccctggcatccggcgggacagaagaagagagcactttggagaggagcccccagaagaaaatagagtgcacctgggccacgccatcatgtccttctatgctgccctgattgacctgctgggccgctgtgcccctgagatgcacctgatccaggccgggaaaggagaggccctgcgcatccgggccatcctgcggagcctggtgcccctggaggacctggtgggcatcatcagcctgcccctgcagatccccaccctgggcaaggatggagccctggtgcagcccaagatgtctgccagctttgtgcctgaccacaaggcctccatggtgctcttcctggacagagtgtatggaattgagaaccaggacttcctgctgcacgtgctggatgtgggcttcctgcctgacatgagagctgctgccagcctggacacagccaccttcagcaccacagagatggccctggccctgaaccgctacctgtgcctggccgtgctgcccctcatcaccaagtgtgcccccctgtttgctggaacagagcaccgggccatcatggtggacagcatgctgcacacagtgtaccgcctgagccggggccgcagcctgaccaaggcccagagagatgtgattgaggactgcctgatgagcctgtgccgctacatccggcccagcatgctgcagcacctgctgcggcggctggtgtttgatgtgcccatcctgaatgaatttgccaagatgcccctgaagctgctgaccaaccactatgagcgctgctggaagtactactgcctgcccaccggctgggccaactttggagtgaccagcgaggaggagctgcacctgaccaggaagctgttctggggcatctttgacagcctggcccacaagaagtatgaccctgagctgtacaggatggccatgccctgcctgtgtgccatcgccggggccctgcccccagactatgtggatgccagctacagcagcaaggccgagaagaaggccaccgtggatgctgagggcaactttgaccccaggcctgtggagaccctgaatgtcatcatccctgagaagctggacagcttcatcaacaagtttgctgagtacacccatgagaagtgggcctttgacaagatccagaacaactggagctatggagaaaatattgatgaggagctgaagacccaccccatgctgcggccctacaagaccttcagcgagaaggacaaggagatctaccgctggcccatcaaggagagcctgaaggccatgattgcctgggagtggaccatcgagaaggcccgggagggggaggaggagaagacagagaagaagaagaccaggaagatcagccagagcgcccagacctatgacccccgggagggctacaacccccagcccccagacctgtctgctgtgaccctgagccgggagctgcaggccatggccgagcagctggccgagaactaccacaacacctggggcaggaagaagaagcaggagctggaggccaagggcggcggcacccaccccctgctggtgccctatgacaccctgacagccaaggagaaggcccgggaccgggagaaggcccaggagctgctgaagttcctgcagatgaatggctatgctgtgacccggggcctgaaggacatggagctggacagcagcagcattgagaagagatttgccttcggcttcctgcagcagctgctgcgctggatggacatcagccaggagttcatcgcccacctggaggccgtggtgagcagcggccgggtggagaagagcccccatgagcaggagatcaagttctttgccaagatcctgctgcccctcatcaaccagtacttcaccaaccactgcctgtacttcctgagcaccccagccaaggtgctgggcagcggcggccacgccagcaacaaggagaaggagatgatcaccagcctcttctgcaagctggccgccctggtgcgccaccgggtgtccctgtttggaacagatgccccagctgtggtgaactgcctgcacatcctggcccggagcctggatgccaggacagtgatgaagagcggccctgagatcgtgaaggccggcctgcggagcttctttgagagcgcctctgaagatattgagaagatggtggagaacctgcggctgggcaaggtgtcccaggcccggacccaggtgaagggcgtgggccagaacctgacctacaccaccgtggccctgctgcctgtgctgaccaccctcttccagcacatcgcccagcaccagtttggagatgatgtgatcctggatgatgtgcaggtgtcctgctaccgcaccctgtgcagcatctacagcctgggcaccaccaagaacacctacgtggagaagctgcggcctgccctgggggagtgcctggcccggctggccgccgccatgcctgtggccttcctggagccccagctgaatgagtacaatgcctgcagcgtgtacaccaccaagagcccccgggagcgggccatcctgggcctgcccaacagcgtggaggagatgtgcccagacatccctgtgctggagcggctgatggctgacattggaggcctggccgagagcggggcccgctacacagagatgccccacgtgattgagatcaccctgcccatgctgtgcagctacctgccccgctggtgggagcggggccctgaggccccacccagcgccctgcctgctggggcccccccaccctgcacagctgtgaccagtgaccacctgaacagcctgctgggcaacatcctgcgcatcatcgtgaacaacctgggcattgatgaggcctcctggatgaagaggctggccgtgtttgcccagcccatcgtgtcccgggcccggcctgagctgctgcagagccacttcatccccaccatcggccgcctgaggaagagagctgggaaggtggtgtctgaggaggagcagctgcggctggaggccaaggccgaggcccaggagggggagctgctggtgagagatgagttctctgtgctgtgccgggacctgtatgccctgtaccccctgctgatccgctacgtggacaacaacagagcccagtggctgacagagcccaaccccagcgctgaggagctgttcaggatggtgggggagatcttcatctactggagcaagagccacaacttcaagcgggaggagcagaactttgtggtgcagaatgagatcaacaacatgtccttcctgacagctgacaacaagagcaagatggccaaggccggggacatccagagcggcggcagtgaccaggagaggaccaagaagaagagaagaggagaccgctacagcgtgcagaccagcctcatcgtggccaccctgaagaagatgctgcccatcggcctgaacatgtgtgcccccacagaccaggacctgatcaccctggccaagaccaggtatgccctgaaggacacagatgaggaggtgcgggagttcctgcacaacaacctgcacctgcagggcaaggtggagggcagccccagcctgcgctggcagatggccctgtaccggggcgtgcccggccgggaggaggatgctgatgatcctgagaagatcgtgcggcgggtgcaggaggtgtctgctgtgctgtactacctggaccagacagagcacccctacaagagcaagaaggctgtgtggcacaagctgctgagcaagcagaggagaagagctgtggtggcctgcttcaggatgacccccctgtacaacctgcccacccaccgggcctgcaacatgttcctggagagctacaaggccgcctggatcctgacagaggaccacagctttgaggacaggatgattgatgacctgagcaaggccggggagcaggaggaggaggaggaggaggtggaggagaagaagccagaccccctgcaccagctggtgctgcacttcagcaggacagccctgacagagaagagcaagctggatgaggactacctgtacatggcctatgctgacatcatggccaagagctgccacctggaggagggcggggagaatggagaggccgaggaggaggtggaggtgtcctttgaggagaagcagatggagaagcagaggctgctgtaccagcaggcccggctgcacaccagaggagctgctgagatggtgctgcagatgatcagcgcctgcaagggggagactggagccatggtgagcagcaccctgaagctgggcatcagcatcctgaatggaggaaatgctgaggtgcagcagaagatgctggactacctgaaggacaagaaggaggtgggcttcttccagagcatccaggccctgatgcagacctgcagcgtgctggacctgaatgcctttgagcggcagaacaaggccgagggcctgggcatggtgaatgaagatggcaccgtcatcaaccggcagaatggagagaaggtgatggctgatgatgagttcacccaggacctcttccgcttcctgcagctgctgtgtgagggccacaacaatgacttccagaactacctgcggacccagacaggcaacaccaccaccatcaacatcatcatctgcaccgtggactacctgctgcggctgcaggagagcatcagtgacttctactggtactacagcggcaaggatgtgattgaggagcagggcaagaggaacttcagcaaggccatgtctgtggccaagcaggtgttcaacagcctgacagagtacatccagggcccctgcaccggcaaccagcagagcctggcccacagccggctgtgggatgctgtggtgggcttcctgcacgtgtttgcccacatgatgatgaagctggcccaggacagcagccagatcgagctgctgaaggagctgctggacctgcagaaggacatggtggtgatgctgctgagcctgctggagggcaatgtggtgaatggcatgattgcccggcagatggtggacatgctggtggagagcagcagcaatgtggagatgatcctgaagttctttgacatgttcctgaagctgaaggacatcgtgggcagcgaggccttccaggactatgtgacagacccccggggcctcatcagcaagaaggacttccagaaggccatggacagccagaagcagttcagcggccctgagatccagttcctgctgagctgcagcgaggctgatgaaaatgagatgatcaactgtgaggagtttgccaaccgcttccaggagcccgcccgggacatcggcttcaacgtggccgtgctgctgaccaacctgtctgagcacgtgccccatgacccccggctgcacaacttcctggagctggccgagagcatcctggagtacttccggccctacctgggccgcatcgagatcatgggcgccagcagaagaattgagcgcatctactttgagatcagcgagaccaacagagcccagtgggagatgccccaggtgaaggagagcaagaggcagttcatctttgatgtggtgaatgaaggaggagaggccgagaagatggagctgtttgtgtccttctgtgaggacaccatctttgagatgcagattgctgcccagatcagcgagcctgagggggagcctgagacagatgaagatgagggcgctggagctgctgaggccggggctgagggcgctgaggagggcgccgccggcctggagggcacagctgccacagctgctgctggggccacagcccgggtggtggccgctgctggccgggccctgcggggcctgagctaccgcagcctgcggaggagagtgcggcggctgcggcggctgacagcccgggaggccgccacagctgtggccgccctgctgtgggccgctgtgaccagggctggagctgctggggccggggctgctgctggggccctgggcctgctgtggggcagcctgtttggaggcggcctggtggagggcgccaagaaggtgacagtgacagagctgctggccggcatgccagaccccaccagtgatgaggtgcacggggagcagcctgctggccctggaggagatgctgatggagagggcgccagcgagggcgctggagatgctgctgagggcgctggagatgaggaggaggccgtgcatgaagctggccctggaggagcagatggagctgtggccgtgacagatggcggccccttccggcctgagggcgccggcggcctgggggacatgggagacaccaccccagctgagccccccaccccagagggcagccccatcctgaagaggaagctgggcgtggatggagtggaggaggagctgcccccagagcctgagcctgagcctgagcctgagctggagcctgagaaggcagatgctgaaaatggagagaaggaggaggtgcctgagcccaccccagagccccccaagaagcaggccccacccagccccccacccaagaaggaggaggccggcggggagttctggggcgagctggaggtgcagagggtgaagttcctgaactacctgagcaggaacttctacaccctgcgcttcctggccctcttcctggcctttgccatcaacttcatcctgctcttctacaaggtgtctgacagccccccaggagaagatgacatggagggcagcgctgctggagatgtgtctggggccggcagcggcggcagcagcggctggggcctgggcgctggggaggaggccgagggagatgaagatgagaacatggtgtactacttcctggaggagagcacaggctacatggagcccgccctgcgctgcctgagcctgctgcacaccctggtggccttcctgtgcatcatcggctacaactgcctgaaggtgcccctggtgatcttcaagcgggagaaggagctggccaggaagctggagtttgatggcctgtacatcacagagcagccagaagatgatgatgtgaagggccagtgggaccggctggtgctgaacacccccagcttccccagcaactactgggacaagtttgtgaagaggaaggtgctggacaagcatggagacatctacggccgggagagaattgctgagctgctgggcatggacctggccaccctggagatcacagcccacaatgaaaggaagcccaaccccccacctggcctgctgacctggctgatgagcattgatgtgaagtaccagatctggaagtttggagtcatcttcacagacaacagcttcctgtacctgggctggtacatggtgatgagcctgctgggccactacaacaacttcttctttgctgcccacctgctggacatcgccatgggcgtgaagaccctgcggaccatcctgagctctgtgacccacaacgggaagcagctggtgatgacagtgggcctgctggccgtggtggtgtacctgtacacagtggtggccttcaacttcttcaggaagttctacaacaagtcagaagatgaagatgagccagacatgaagtgtgatgacatgatgacctgctacctgttccacatgtatgtgggcgtgcgggccggcggcggcattggagatgaaattgaagatcctgctggagatgaatatgagctgtacagagtggtgtttgacatcaccttcttcttcttcgtcatcgtcatcctgctggccatcatccagggcctcatcattgatgcctttggagagctgcgggaccagcaggagcaggtgaaggaggacatggagaccaagtgcttcatctgtggcatcggcagtgactactttgacaccaccccccacggctttgagacccacaccctggaggagcacaacctggccaactacatgttcttcctgatgtacctgatcaacaaggatgaaacagagcacacaggccaggagagctatgtgtggaagatgtaccaggagcgctgctgggacttcttccctgctggggactgcttcaggaagcagtatgaggaccagctgtcctag

SEQ ID NO: 12027 - DNA, 15102 bp, Artificial Sequence
  derived and/or modified sequence
atgggagatgctgaaggagaagatgaggtgcagttcctgaggacagatgatgaggtggtgctgcagtgcagcgccaccgtgctgaaggagcagctgaagctgtgcctggccgctgagggctttggaaaccggctgtgcttcctggagcccaccagcaatgcccagaatgtgcccccagacctggccatctgctgctttgtgctggagcagagcctgtctgtgcgggccctgcaggagatgctggccaacacagtggaggccggcgtggagagcagccagggcggcggccacaggaccctgctgtatggccacgccatcctgctgcggcatgcccacagcaggatgtacctgagctgcctgaccaccagccgctccatgacagacaagctggcctttgatgtgggcctgcaggaggatgccactggagaggcctgctggtggaccatgcacccagccagcaagcagaggtctgagggggagaaggtgcgggtgggagatgacatcatcctggtgtctgtgtcctctgagcgctacctgcacctgagcacagccagcggggagctgcaggtggatgccagcttcatgcagaccctgtggaacatgaaccccatctgcagccgctgtgaggagggctttgtgactggaggccacgtgctgcggctcttccacggccacatggatgagtgcctgaccatcagccctgctgacagtgatgaccagaggcggctggtgtactatgagggcggcgctgtgtgcacccacgcccggagcctgtggaggctggagcccctgcgcatctcctggagcggcagccacctgcgctggggccagcccctgcgggtgagacatgtgaccaccggccagtacctggccctgacagaggaccagggcctggtggtggtggatgccagcaaggcccacaccaaggccaccagcttctgcttccgcatcagcaaggagaagctggatgtggcccccaagagagatgtggagggcatgggccccccagagatcaagtacggggagagcctgtgctttgtgcagcacgtggccagcggcctgtggctgacctatgctgccccagaccccaaggccctgcggctgggcgtgctgaagaagaaggccatgctgcaccaggagggccacatggatgatgccctgagcctgacccgctgccagcaggaggagagccaggccgccaggatgatccacagcaccaacggcctgtacaaccagttcatcaagagcctggacagcttcagcggcaagccccggggcagcggccccccagctggaacagccctgcccattgaaggagtcatcctgagcctgcaggacctgatcatctactttgagcccccatctgaggacctgcagcacgaggagaagcagagcaagctgcggagcctgaggaaccggcagagcctcttccaggaggagggcatgctgtccatggtgctgaactgcatcgaccggctgaatgtgtacaccacagctgcccactttgctgagtttgctggggaggaggccgctgagagctggaaggagatcgtgaacctgctgtatgagctgctggccagcctcatccggggcaacagaagcaactgtgccctcttcagcaccaacctggactggctggtgtccaagctggaccggctggaggccagcagcggcatcctggaggtgctgtactgtgtgctgattgagagccctgaggtgctgaacatcatccaggagaaccacatcaagagcatcatcagcctgctggacaagcacggcaggaaccacaaggtgctggatgtgctgtgcagcctgtgtgtgtgcaatggagtggccgtgcgcagcaaccaggacctgatcacagagaacctgctgcccggccgggagctgctgctgcagaccaacctgatcaactacgtgaccagcatccggcccaacatctttgtgggccgggcagagggcaccacccagtacagcaagtggtactttgaggtgatggtggatgaggtgacccccttcctgacagcccaggccacccacctgcgggtgggctgggccctgacagagggctacaccccctacccaggagctggggagggctggggcggcaatggagtgggagatgacctgtacagctatggctttgatggcctgcacctgtggacaggccacgtggcccggcctgtgaccagccctggccagcacctgctggccccagaagatgtgatcagctgctgcctggacctgtctgtgcccagcatctccttccgcatcaatggctgccctgtgcagggcgtgtttgagagcttcaacctggatggcctcttcttccctgtggtgtccttctctgctggggtgaaggtgcgcttcctgctgggcggccgccacggggagttcaagttcctgcccccacctggctacgccccctgccatgaagctgtgctgccccgggagcggctgcacctggagcccatcaaggagtacagaagagagggcccccggggcccccacctggtgggccccagccgctgcctgagccacacagactttgtgccctgccctgtggacacagtgcagatcgtgctgcccccccacctggagcgcatccgggagaagctggccgagaacatccacgagctgtgggccctgacccgcatcgagcagggctggacctacggccctgtgagagatgacaacaagaggctgcacccctgcctggtggacttccacagcctgcctgagcctgagaggaactacaacctgcagatgtctggagagaccctgaagaccctgctggccctgggctgccacgtgggcatggctgatgagaaggccgaggacaacctgaagaagaccaagctgcccaagacctacatgatgagcaatggctacaagccagcccccctggacctgagccacgtgcggctgaccccagcccagaccaccctggtggaccggctggctgaaaatggccacaacgtgtgggcccgggacagagtgggccagggctggagctacagcgctgtgcaggacatcccagcccggaggaacccccggctggtgccctaccgcctgctggatgaggccaccaagaggagcaacagagacagcctgtgccaggccgtgaggaccctgctgggctacggctacaacatcgagcccccagaccaggagcccagccaggtggagaaccagagccgctgtgacagagtgcgcatcttccgggcagagaagagctacacagtgcagagcggccgctggtactttgaatttgaagctgtgaccaccggggagatgagggtgggctgggcccggcctgagctgcggccagatgtggagctgggcgcagatgagctggcctacgtgttcaacggccaccggggccagcgctggcacctgggcagcgagcccttcggccggccctggcagcctggagatgtggtgggctgcatgattgacctgacagagaacaccatcatcttcaccctgaatggagaggtgctgatgtctgacagcggcagcgagacagccttccgggagattgaaattggagatggcttcctgcctgtgtgcagcctgggccctggccaggtgggccacctgaacctgggccaggatgtgagcagcctgcgcttctttgccatctgtggcctgcaggagggctttgagccctttgccatcaacatgcagaggcctgtgaccacctggttcagcaagggcctgccccagtttgagcctgtgcccctggagcacccccactatgaggtgtcccgggtggatggcaccgtggacaccccaccctgcctgcggctgacccacaggacctggggcagccagaacagcctggtggagatgctgttcctgcggctgagcctgcctgtgcagttccaccagcacttccgctgcacagctggggccacccccctggcccctcctggcctgcagcccccagcagaagatgaggcccgggctgctgagccagaccctgactatgagaacctgcggcgctctgctgggggctggagcgaggctgaaaatggcaaggagggcacagccaaggagggcgcccctgggggcaccccccaggccggcggggaggcccagcctgcccgggcagaaaatgagaaggatgccaccacagagaagaacaagaagaggggcttcctgttcaaggccaagaaggtggccatgatgacccagcccccagccacccccaccctgccccggctgccccatgatgtggtgcctgctgacaacagagatgatcctgagatcatcctgaacaccaccacctactactacagcgtgcgggtgtttgctggccaggagcccagctgtgtgtgggccggctgggtgaccccagactaccaccagcacgacatgagctttgacctgagcaaggtgcgggtggtgacagtgaccatgggagatgagcagggcaatgtgcacagcagcctgaagtgcagcaactgctacatggtgtggggcggggactttgtgtccccaggccagcagggccgcatcagccacacagacctggtgattggctgcctggtggacctggccaccggcctgatgaccttcaccgccaacgggaaggagagcaacaccttcttccaggtggagcccaacaccaagctgtttcctgctgtgtttgtgctgcccacccaccagaatgtcatccagtttgagctgggcaagcagaagaacatcatgcccctgtctgctgccatgttccagagcgagaggaagaacccagccccccagtgccccccccggctggagatgcagatgctgatgcctgtgtcctggagcaggatgcccaaccacttcctgcaggtggagaccaggagagctggggagcggctgggctgggccgtgcagtgccaggagcccctgaccatgatggccctgcacatcccagaagaaaatcgctgcatggacatcctggagctgtctgagcggctggacctgcagcgcttccacagccacaccctgcggctgtacagagctgtgtgtgccctgggcaacaacagagtggcccacgccctgtgcagccacgtggaccaggcccagctgctgcacgccctggaggatgcccacctgcccggccccctgcgggccggctactatgacctgctgatcagcatccacctggagagcgcctgccgcagccgccgctccatgctgtctgagtacatcgtgcccctgaccccagagacccgggccatcaccctcttccccccaggccgcagcacagaaaatggccaccccaggcatggcctgcccggggtgggcgtgaccaccagcctgcggcccccccaccacttcagccccccctgctttgtggccgccctgcctgctgctggagctgctgaggccccagcccggctgagccctgccatccccctggaggccctgcgggacaaggccctgaggatgctgggggaggccgtgagagatggcggccagcacgcccgggaccctgtgggcggctctgtggagttccagtttgtgcctgtgctgaagctggtgtccaccctgctggtgatgggcatctttggagatgaagatgtgaagcagatcctgaagatgattgagcctgaggtgttcacagaggaggaggaggaggaggatgaggaggaggagggggaggaggaggatgaggaggagaaggaggaggatgaggaggagacagcccaggagaaggaggatgaggagaaggaggaggaggaggccgctgagggggagaaggaggagggcctggaggagggcctgctgcagatgaagctgcctgagagcgtgaagctgcagatgtgccacctgctggagtacttctgtgaccaggagctgcagcaccgggtggagagcctggccgcctttgctgagagatatgtggacaagctgcaggccaaccagaggagccgctatggcctgctgatcaaggccttctccatgacagctgctgagacagcccggaggacccgggagttccgcagccccccccaggagcagatcaacatgctgctgcagttcaaggatggaacagatgaggaggactgccccctgcctgaggagatccggcaggacctgctggacttccaccaggacctgctggcccactgcggcatccagctggatggagaggaggaggagcctgaggaggagaccaccctgggcagccggctgatgagcctgctggagaaggtgcggctggtgaagaagaaggaggagaagccagaggaggagaggtctgctgaggagagcaagcccaggagcctgcaggagctggtgagccacatggtggtgcgctgggcccaggaggactttgtgcagagccctgagctggtgcgggccatgttcagcctgctgcaccggcagtatgatggcctgggggagctgctgcgggccctgccccgggcctacaccatcagccccagctctgtggaggacaccatgagcctgctggagtgcctgggccagatccgcagcctgctgattgtgcagatgggcccccaggaggagaacctgatgatccagagcatcggcaacatcatgaacaacaaggtgttctaccagcaccccaacctgatgagggccctgggcatgcatgagaccgtgatggaggtgatggtgaatgtgctgggcggcggggagagcaaggagatccgcttccccaagatggtgaccagctgctgccgcttcctgtgctacttctgccgcatcagccggcagaaccagaggtccatgtttgaccacctgagctacctgctggagaacagcggcatcggcctgggcatgcagggcagcacccccctggatgtggccgccgcctctgtgattgacaacaatgagctggccctggccctgcaggagcaggacctggagaaggtggtgtcctacctggccggctgcggcctgcagagctgccccatgctggtggccaagggctacccagacatcggctggaacccctgtggcggggagcgctacctggacttcctgcgctttgctgtgtttgtgaatggagagagcgtggaggagaatgccaacgtggtggtgcggctgctgatcaggaagccagagtgcttcggccctgccctgcggggggagggcggcagcggcctgctggccgccatcgaggaggccatccgcatcagcgaggaccctgccagagatggccctggcatccggcgggacagaagaagagagcactttggagaggagcccccagaagaaaatagagtgcacctgggccacgccatcatgtccttctatgctgccctgattgacctgctgggccgctgtgcccctgagatgcacctgatccaggccgggaaaggagaggccctgcgcatccgggccatcctgcggagcctggtgcccctggaggacctggtgggcatcatcagcctgcccctgcagatccccaccctgggcaaggatggagccctggtgcagcccaagatgtctgccagctttgtgcctgaccacaaggcctccatggtgctcttcctggacagagtgtatggaattgagaaccaggacttcctgctgcacgtgctggatgtgggcttcctgcctgacatgagagctgctgccagcctggacacagccaccttcagcaccacagagatggccctggccctgaaccgctacctgtgcctggccgtgctgcccctcatcaccaagtgtgcccccctgtttgctggaacagagcaccgggccatcatggtggacagcatgctgcacacagtgtaccgcctgagccggggccgcagcctgaccaaggcccagagagatgtgattgaggactgcctgatgagcctgtgccgctacatccggcccagcatgctgcagcacctgctgcggcggctggtgtttgatgtgcccatcctgaatgaatttgccaagatgcccctgaagctgctgaccaaccactatgagcgctgctggaagtactactgcctgcccaccggctgggccaactttggagtgaccagcgaggaggagctgcacctgaccaggaagctgttctggggcatctttgacagcctggcccacaagaagtatgaccctgagctgtacaggatggccatgccctgcctgtgtgccatcgccggggccctgcccccagactatgtggatgccagctacagcagcaaggccgagaagaaggccaccgtggatgctgagggcaactttgaccccaggcctgtggagaccctgaatgtcatcatccctgagaagctggacagcttcatcaacaagtttgctgagtacacccatgagaagtgggcctttgacaagatccagaacaactggagctatggagaaaatattgatgaggagctgaagacccaccccatgctgcggccctacaagaccttcagcgagaaggacaaggagatctaccgctggcccatcaaggagagcctgaaggccatgattgcctgggagtggaccatcgagaaggcccgggagggggaggaggagaagacagagaagaagaagaccaggaagatcagccagagcgcccagacctatgacccccgggagggctacaacccccagcccccagacctgtctgctgtgaccctgagccgggagctgcaggccatggccgagcagctggccgagaactaccacaacacctggggcaggaagaagaagcaggagctggaggccaagggcggcggcacccaccccctgctggtgccctatgacaccctgacagccaaggagaaggcccgggaccgggagaaggcccaggagctgctgaagttcctgcagatgaatggctatgctgtgacccggggcctgaaggacatggagctggacagcagcagcattgagaagagatttgccttcggcttcctgcagcagctgctgcgctggatggacatcagccaggagttcatcgcccacctggaggccgtggtgagcagcggccgggtggagaagagcccccatgagcaggagatcaagttctttgccaagatcctgctgcccctcatcaaccagtacttcaccaaccactgcctgtacttcctgagcaccccagccaaggtgctgggcagcggcggccacgccagcaacaaggagaaggagatgatcaccagcctcttctgcaagctggccgccctggtgcgccaccgggtgtccctgtttggaacagatgccccagctgtggtgaactgcctgcacatcctggcccggagcctggatgccaggacagtgatgaagagcggccctgagatcgtgaaggccggcctgcggagcttctttgagagcgcctctgaagatattgagaagatggtggagaacctgcggctgggcaaggtgtcccaggcccggacccaggtgaagggcgtgggccagaacctgacctacaccaccgtggccctgctgcctgtgctgaccaccctcttccagcacatcgcccagcaccagtttggagatgatgtgatcctggatgatgtgcaggtgtcctgctaccgcaccctgtgcagcatctacagcctgggcaccaccaagaacacctacgtggagaagctgcggcctgccctgggggagtgcctggcccggctggccgccgccatgcctgtggccttcctggagccccagctgaatgagtacaatgcctgcagcgtgtacaccaccaagagcccccgggagcgggccatcctgggcctgcccaacagcgtggaggagatgtgcccagacatccctgtgctggagcggctgatggctgacattggaggcctggccgagagcggggcccgctacacagagatgccccacgtgattgagatcaccctgcccatgctgtgcagctacctgccccgctggtgggagcggggccctgaggccccacccagcgccctgcctgctggggcccccccaccctgcacagctgtgaccagtgaccacctgaacagcctgctgggcaacatcctgcgcatcatcgtgaacaacctgggcattgatgaggcctcctggatgaagaggctggccgtgtttgcccagcccatcgtgtcccgggcccggcctgagctgctgcagagccacttcatccccaccatcggccgcctgaggaagagagctgggaaggtggtgtctgaggaggagcagctgcggctggaggccaaggccgaggcccaggagggggagctgctggtgagagatgagttctctgtgctgtgccgggacctgtatgccctgtaccccctgctgatccgctacgtggacaacaacagagcccagtggctgacagagcccaaccccagcgctgaggagctgttcaggatggtgggggagatcttcatctactggagcaagagccacaacttcaagcgggaggagcagaactttgtggtgcagaatgagatcaacaacatgtccttcctgacagctgacaacaagagcaagatggccaaggccggggacatccagagcggcggcagtgaccaggagaggaccaagaagaagagaagaggagaccgctacagcgtgcagaccagcctcatcgtggccaccctgaagaagatgctgcccatcggcctgaacatgtgtgcccccacagaccaggacctgatcaccctggccaagaccaggtatgccctgaaggacacagatgaggaggtgcgggagttcctgcacaacaacctgcacctgcagggcaaggtggagggcagccccagcctgcgctggcagatggccctgtaccggggcgtgcccggccgggaggaggatgctgatgatcctgagaagatcgtgcggcgggtgcaggaggtgtctgctgtgctgtactacctggaccagacagagcacccctacaagagcaagaaggctgtgtggcacaagctgctgagcaagcagaggagaagagctgtggtggcctgcttcaggatgacccccctgtacaacctgcccacccaccgggcctgcaacatgttcctggagagctacaaggccgcctggatcctgacagaggaccacagctttgaggacaggatgattgatgacctgagcaaggccggggagcaggaggaggaggaggaggaggtggaggagaagaagccagaccccctgcaccagctggtgctgcacttcagcaggacagccctgacagagaagagcaagctggatgaggactacctgtacatggcctatgctgacatcatggccaagagctgccacctggaggagggcggggagaatggagaggccgaggaggaggtggaggtgtcctttgaggagaagcagatggagaagcagaggctgctgtaccagcaggcccggctgcacaccagaggagctgctgagatggtgctgcagatgatcagcgcctgcaagggggagactggagccatggtgagcagcaccctgaagctgggcatcagcatcctgaatggaggaaatgctgaggtgcagcagaagatgctggactacctgaaggacaagaaggaggtgggcttcttccagagcatccaggccctgatgcagacctgcagcgtgctggacctgaatgcctttgagcggcagaacaaggccgagggcctgggcatggtgaatgaagatggcaccgtgggggagaaggtgatggctgatgatgagttcacccaggacctcttccgcttcctgcagctgctgtgtgagggccacaacaatgacttccagaactacctgcggacccagacaggcaacaccaccaccatcaacatcatcatctgcaccgtggactacctgctgcggctgcaggagagcatcagtgacttctactggtactacagcggcaaggatgtgattgaggagcagggcaagaggaacttcagcaaggccatgtctgtggccaagcaggtgttcaacagcctgacagagtacatccagggcccctgcaccggcaaccagcagagcctggcccacagccggctgtgggatgctgtggtgggcttcctgcacgtgtttgcccacatgatgatgaagctggcccaggacagcagccagatcgagctgctgaaggagctgctggacctgcagaaggacatggtggtgatgctgctgagcctgctggagggcaatgtggtgaatggcatgattgcccggcagatggtggacatgctggtggagagcagcagcaatgtggagatgatcctgaagttctttgacatgttcctgaagctgaaggacatcgtgggcagcgaggccttccaggactatgtgacagacccccggggcctcatcagcaagaaggacttccagaaggccatggacagccagaagcagttcagcggccctgagatccagttcctgctgagctgcagcgaggctgatgaaaatgagatgatcaactgtgaggagtttgccaaccgcttccaggagcccgcccgggacatcggcttcaacgtggccgtgctgctgaccaacctgtctgaacatgtgccccatgacccccggctgcacaacttcctggagctggccgagagcatcctggagtacttccggccctacctgggcagaattgagatcatgggcgccagccgccgcatcgagcgcatctactttgagatcagcgagaccaacagagcccagtgggagatgccccaggtgaaggagagcaagaggcagttcatctttgatgtggtgaatgaaggaggagaggccgagaagatggagctgtttgtgtccttctgtgaggacaccatctttgagatgcagattgctgcccagatcagcgagcctgagggggagcctgagacagatgaagatgaaggagctggagctgctgaggccggggctgagggcgctgaggagggcgctgctggcctggagggcacagctgccacagctgctgctggggccacagcccgggtggtggccgccgccggccgggccctgcggggcctgagctaccgcagcctgcggcggcgggtgcggcggctgcggcggctgacagcccgggaggccgccacagctgtggccgccctgctgtgggccgctgtgacccgggccggggctgctggagctggagctgctgctggggccctgggcctgctgtggggcagcctgtttggaggcggcctggtggagggcgccaagaaggtgacagtgacagagctgctggccggcatgccagaccccaccagtgatgaggtgcatggagagcagcctgctggccctggaggagatgctgatggagagggcgccagcgagggcgctggagatgctgctgagggcgctggagatgaggaggaggccgtgcatgaggccggccctgggggcgcagatggagctgtggccgtgacagatggcggccccttccggcctgagggcgctgggggcctgggggacatgggagacaccaccccagctgagccccccaccccagagggcagccccatcctgaagaggaagctgggcgtggatggagtggaggaggagctgcccccagagcctgagcctgagcctgagcctgagctggagcctgagaaggcagatgctgaaaatggagagaaggaggaggtgcctgagcccaccccagagccccccaagaagcaggccccacccagccccccacccaagaaggaggaggccggcggggagttctggggcgagctggaggtgcagagggtgaagttcctgaactacctgagcaggaacttctacaccctgcgcttcctggccctcttcctggcctttgccatcaacttcatcctgctcttctacaaggtgtctgacagccccccaggagaagatgacatggagggcagcgctgctggagatgtgtctggagctggcagcggcggcagcagcggctggggcctgggcgctggggaggaggccgagggagatgaagatgagaacatggtgtactacttcctggaggagagcacaggctacatggagcccgccctgcgctgcctgagcctgctgcacaccctggtggccttcctgtgcatcatcggctacaactgcctgaaggtgcccctggtgatcttcaagcgggagaaggagctggccaggaagctggagtttgatggcctgtacatcacagagcagccagaagatgatgatgtgaagggccagtgggaccggctggtgctgaacacccccagcttccccagcaactactgggacaagtttgtgaagaggaaggtgctggacaagcacggggacatctacggccgggagagaattgctgagctgctgggcatggacctggccaccctggagatcacagcccacaatgaaaggaagcccaaccccccacctggcctgctgacctggctgatgagcattgatgtgaagtaccagatctggaagtttggagtcatcttcacagacaacagcttcctgtacctgggctggtacatggtgatgagcctgctgggccactacaacaacttcttctttgctgcccacctgctggacatcgccatgggcgtgaagaccctgcggaccatcctgagctctgtgacccacaacgggaagcagctggtgatgacagtgggcctgctggccgtggtggtgtacctgtacacagtggtggccttcaacttcttcaggaagttctacaacaagtcagaagatgaagatgagccagacatgaagtgtgatgacatgatgacctgctacctgttccacatgtatgtgggcgtgcgggccggcggcggcattggagatgaaattgaggaccctgctggagatgaatatgagctgtacagagtggtgtttgacatcaccttcttcttctttgtgattgtcatcctgctggccatcatccagggcctcatcattgatgccttcggggagctgcgggaccagcaggagcaggtgaaggaggacatggagaccaagtgcttcatctgtggcattggaagtgactactttgacaccacccctcatggctttgagacccacaccctggaggagcacaacctggccaactacatgttcttcctgatgtacctgatcaacaaggatgaaacagagcacacaggccaggagagctatgtgtggaagatgtaccaggagcgctgctgggacttcttccctgctggggactgcttcaggaagcagtatgaggaccagctgtcctag

SEQ ID NO: 12028 - DNA, 2031 bp, Artificial Sequence
  derived and/or modified sequence
atgaagagcggccctgagatcgtgaaggccggcctgcggagcttctttgagagcgcctctgaagatattgagaagatggtggagaacctgcggctgggcaaggtgtcccaggcccggacccaggtgaagggcgtgggccagaacctgacctacaccaccgtggccctgctgcctgtgctgaccaccctcttccagcacatcgcccagcaccagtttggagatgatgtgatcctggatgatgtgcaggtgtcctgctaccgcaccctgtgcagcatctacagcctgggcaccaccaagaacacctacgtggagaagctgcggcctgccctgggggagtgcctggcccggctggccgccgccatgcctgtggccttcctggagccccagctgaatgagtacaatgcctgcagcgtgtacaccaccaagagcccccgggagcgggccatcctgggcctgcccaacagcgtggaggagatgtgcccagacatccctgtgctggagcggctgatggctgacattggaggcctggccgagagcggggcccgctacacagagatgccccacgtgattgagatcaccctgcccatgctgtgcagctacctgccccgctggtgggagcggggccctgaggccccacccagcgccctgcctgctggggcccccccaccctgcacagctgtgaccagtgaccacctgaacagcctgctgggcaacatcctgcgcatcatcgtgaacaacctgggcattgatgaggcctcctggatgaagaggctggccgtgtttgcccagcccatcgtgtcccgggcccggcctgagctgctgcagagccacttcatccccaccatcggccgcctgaggaagagagctgggaaggtggtgtctgaggaggagcagctgcggctggaggccaaggccgaggcccaggagggggagctgctggtgagagatgagttctctgtgctgtgccgggacctgtatgccctgtaccccctgctgatccgctacgtggacaacaacagagcccagtggctgacagagcccaaccccagcgctgaggagctgttcaggatggtgggggagatcttcatctactggagcaagagccacaacttcaagcgggaggagcagaactttgtggtgcagaatgagatcaacaacatgtccttcctgacagctgacaacaagagcaagatggccaaggccggggacatccagagcggcggcagtgaccaggagaggaccaagaagaagagaagaggagaccgctacagcgtgcagaccagcctcatcgtggccaccctgaagaagatgctgcccatcggcctgaacatgtgtgcccccacagaccaggacctgatcaccctggccaagaccaggtatgccctgaaggacacagatgaggaggtgcgggagttcctgcacaacaacctgcacctgcagggcaaggtggagggcagccccagcctgcgctggcagatggccctgtaccggggcgtgcccggccgggaggaggatgctgatgatcctgagaagatcgtgcggcgggtgcaggaggtgtctgctgtgctgtactacctggaccagacagagcacccctacaagagcaagaaggctgtgtggcacaagctgctgagcaagcagaggagaagagctgtggtggcctgcttcaggatgacccccctgtacaacctgcccacccaccgggcctgcaacatgttcctggagagctacaaggccgcctggatcctgacagaggaccacagctttgaggacaggatgattgatgacctgagcaaggccggggagcaggaggaggaggaggaggaggtggaggagaagaagccagaccccctgcaccagctggtgctgcacttcagcaggacagccctgacagagaagagcaagctggatgaggactacctgtacatggcctatgctgacatcatggccaagagctgccacctggaggagggcggggagaatggagaggccgaggaggaggtggaggtgtcctttgaggagaagcagtag

SEQ ID NO: 12029 - DNA, 15117 bp, Artificial Sequence
  derived and/or modified sequence
atgggcgacgccgagggcgaggacgaggtgcagttcctgcggaccgacgatgaggtggtgctccagtgcagcgcaactgttctgaaggaacaactcaaactttgcctggccgccgagggctttggcaacagactttgctttctggagccgacctccaatgcccagaatgttccgcctgacctcgcaatatgctgctttgttctggaacaatctctctccgtgagagccctccaagagatgctggcaaatacagtggaggcgggcgtggagtccagtcaggggggtggtcatcgcacgcttctctacgggcacgctattcttctgaggcatgctcactcaaggatgtacctgtcttgcctgaccacaagcagaagcatgacagataaactcgccttcgatgtaggcctacaggaggatgccactggggaagcatgctggtggactatgcaccccgcaagcaagcagcgatccgagggagaaaaagttagagttggagatgacattatcctggtttctgtgtccagcgaacgctatctccatctgtctaccgcgagcggcgaactgcaagtggatgccagctttatgcagacactttggaacatgaatcccatctgtagcaggtgtgaagaaggctttgtcactggcgggcatgtactgcgcttgttccacggccatatggatgagtgtttgactatctccccagccgactctgacgatcagcgaaggcttgtttactacgaggggggagcggtctgtacacacgcccgatcactctggcgcttggagccactcagaattagctggagtgggtctcacctgaggtggggccagccactacgggtgagacacgtgacaactggtcagtaccttgcacttacagaagaccaagggctagtcgtggtggatgcgagtaaagctcatacaaaagcgactagtttctgtttccgaatatcaaaggagaaattggacgttgcaccaaaaagggatgtggaaggcatgggccccccagaaattaagtatggcgagagcttatgcttcgttcaacacgtggcatccggactctggctgacttatgccgctcccgatcctaaagcactccgcttgggagtgctgaagaaaaaagctatgctacatcaggaagggcatatggatgatgctctgtctctaacccgatgtcagcaggaagagagtcaggccgcgcgcatgattcattctaccaacggactgtacaaccaattcattaaatccctggactccttttccggtaagcctagaggcagcgggccccctgctggcacagccttgcctatcgagggtgtaattttatctctccaagacctgatcatctattttgagccaccatcagaggacctgcagcatgaggagaagcaatcaaagctgcggtctctcaggaatagacagagtttattccaggaagaagggatgttgtccatggtgcttaactgtattgataggttaaacgtgtacacaaccgctgcccattttgcggaatttgccggagaagaggcagccgagagctggaaagagattgtgaatctattatatgaactcctagcatcactcatccgtggcaaccggtctaattgtgcgttattcagtacaaacctggactggttggtgtccaagcttgacaggcttgaggcctcttccggcatccttgaagtcctgtactgcgtgctgatcgaatctcccgaagtgctgaatatcatccaggaaaatcacatcaaatcaatcatttcgctgctggacaaacacggtcggaatcataaggtactagacgtcctgtgttcattgtgcgtctgtaatggtgttgcggtgcgaagcaaccaagatctgatcacagaaaatttgctgcctggacgcgaactgctgcttcagaccaacctgataaactatgttacatccatcaggccaaatatatttgttgggagggcagaggggacaacccaatactctaagtggtatttcgaagtgatggtggatgaggtgacacctttcctgacagcccaggccacacacctccgagtcggctgggccctaacggagggatacacgccctaccccggcgccggggaggggtggggcgggaacggcgtgggggacgacctctattcttatggattcgatgggctccacctttggactggccacgttgcaaggccagtcacaagccccgggcagcacttgttggcacccgaagatgtgattagctgctgccttgacctgagcgtgccatccattagcttcagaattaacggttgccctgtgcaaggagtgtttgagtcattcaatttggacgggcttttcttccctgttgtgtctttctccgccggcgtgaaggtcagattcttgctcggcgggcgccacggggaatttaagtttctgcccccaccaggatacgccccttgtcatgaagcagtgctaccaagggagcgcctacatctcgagccaatcaaggagtacagacgggagggacctcgaggccctcacttggtcggccctagtcgttgtctgtcacacacagatttcgtgccatgtcccgtcgacaccgtgcagatcgttcttccaccacacctcgagcgcatccgagagaagttagccgagaatatccacgagctgtgggcactgaccaggatcgaacagggctggacctatgggcccgtcagagacgataacaagcgcctccatccctgcctggtggactttcactcgttacccgagcccgagagaaactataacctccagatgtctggtgaaacactgaaaacgcttctcgcactgggctgccacgtcggcatggccgatgagaaagccgaagacaacttgaagaagactaagctcccaaaaacctacatgatgagtaacgggtataaaccggctccactggatttgagccacgtgcggctcacacccgcccagaccaccctggtggacagactggccgagaacggacacaatgtgtgggcacgggaccgcgtcggtcaagggtggagttatagcgctgtgcaggatatccccgcacgaaggaatccacgcctggtgccttatcgactgctggacgaagctaccaagagatctaacagggactcgctctgccaagcagtgagaactctgttaggctatggttataacatcgagcccccggaccaagaaccctcccaggtcgagaaccaatctcggtgtgatcgtgtaaggatctttcgcgccgagaaatcctacactgtgcagtctggacgctggtacttcgagttcgaagcggttacgacaggagaaatgcgggtgggttgggcaaggcctgagctgcgacccgacgtggagctgggagcagatgagttagcatatgtattcaatgggcacagaggccagaggtggcacttgggctctgagccttttgggaggccgtggcagcctggagatgtagttggatgtatgattgacctgactgaaaacaccattattttcaccctgaacggagaagtgctaatgtctgacagcggatcagagacagcattccgcgagatcgagattggcgatggtttcctgcccgtttgtagcttggggcccggccaggtgggccaccttaatctgggacaggatgtgagctctcttaggttttttgcgatctgcggcctacaagaaggcttcgaaccgttcgcaatcaatatgcagcgcccagttacaacgtggttctctaagggtctgcctcaatttgaaccggtgcctctcgaacatccacattacgaggtttctcgcgttgacggcacggttgacacacccccctgcctacggctgacccatagaacctggggatctcaaaacagtttggtagaaatgctgttcttaagactaagcttgcctgtgcagttccatcagcatttccggtgcaccgctggggctacccctctggcacccccaggcctgcagccccccgcagaagacgaggcgcgggccgccgagccagaccctgattatgagaacctcaggcgatcagccgggggatggtctgaggcggagaatggtaaggagggaactgcgaaggaaggggccccggggggaacacctcaggctgggggtgaagcccagcccgctcgcgctgagaatgagaaggatgctaccactgagaaaaataagaaacggggctttctcttcaaggccaaaaaggtcgccatgatgacacagccgccggcaacaccgacactgccacggctgcctcacgatgttgtgcccgccgataatcgtgacgatcccgaaatcatcctcaacaccacgacctattattactccgtgagagttttcgccggacaggagccaagttgtgtgtgggcaggctgggtaacacctgactaccaccagcacgacatgagctttgatctgagcaaggttcgggtcgtaaccgtgacgatgggagatgaacagggaaacgttcattcctcactgaagtgctcgaattgttacatggtttggggcggcgatttcgtgtcccccggacagcagggacggatcagtcacacagatctggtgattggctgcctggtagacctggccactggtctaatgacattcacagccaatggaaaggaaagcaatactttctttcaggtagaacccaatacaaagctgttccccgctgtcttcgtgttgccaacccaccagaacgtcatccagttcgagctgggtaaacaaaagaatatcatgcccctgagcgctgcaatgttccagagtgagagaaagaacccagctccccagtgtccccctaggctcgaaatgcagatgctgatgcctgtcagctggtctagaatgcctaatcatttcctgcaggtggaaacgaggcgggcaggagagaggctggggtgggccgttcagtgtcaggagcctctgactatgatggcccttcacattccagaagagaatagatgcatggatatcctggaactaagcgagcgcttggacctgcagcgatttcattcgcacaccttaaggttgtaccgggcggtatgcgccttaggaaacaatcgtgtggcccacgccctgtgcagtcatgttgaccaagctcagcttctgcacgcgctcgaggacgctcatttaccaggcccactgagggccggttactatgacctcctaatatctattcatctcgaatcagcctgcaggtccagacggtccatgctgtctgaatatatcgtgcctctgacaccggaaacgcgggccatcaccctttttcctccaggcagaagtactgaaaacggccacccacgccacggcctccccggcgtgggggtaacaacttctctgcgccccccacaccacttttcacccccttgtttcgtcgcagccttacctgccgctggagccgctgaagcaccagcacgactgagtccggccattccccttgaagctctccgcgacaaagccctgcgcatgctgggcgaagccgtcagagacggggggcagcatgcccgagatcccgttggcggatccgtggaatttcagttcgtgccggtgttgaagcttgtctctacgctgttagtcatgggcattttcggtgacgaagatgtgaaacaaattctcaagatgatagagcccgaggtcttcaccgaagaagaggaggaggaagacgaggaggaggaaggtgaagaggaagacgaggaggaaaaggaggaggatgaagaggagacagcccaggaaaaagaagacgaggaaaaggaggaagaagaggctgcggaaggcgagaaagaagaaggactggaggagggtttgttacaaatgaaactgccagagtccgtgaaacttcagatgtgccacctgttggaatatttctgcgaccaggaacttcagcacagggtggagagcctggccgccttcgcagaaagatacgtagacaagcttcaagccaaccagcgttccagatatggcttgctcataaaggctttctctatgaccgcagccgagactgctcggcgcacccgagagtttcgttcacctccacaggagcagataaatatgctgctccagttcaaggacggcacagacgaggaggactgtccattgcccgaggagatccgccaagacctactagactttcatcaagacctgcttgcacactgtggcatccagttagacggcgaggaggaggaacctgaagaagagacaacactgggctcgcgccttatgtccctcctggagaaggtgcgactggtaaagaaaaaagaagagaagcccgaagaagaaaggtctgccgaagagagcaagccccgctcacttcaggaacttgttagccacatggttgttcgctgggcacaggaagatttcgtccagagcccagagctagtgcgcgcgatgtttagcctgctccataggcagtatgatggtctcggcgaactgctgcgcgcgctacccagagcctatacgatcagcccctcttcagtggaggatacgatgagtctgctggaatgcctcggccagatccggtctctgcttatcgtccagatgggcccccaggaagagaacctgatgatacagagcatcggtaatataatgaacaacaaggtgttttaccagcaccctaatctgatgcgagccctgggtatgcacgagacagtcatggaagttatggttaacgtgctcgggggcggagaatccaaggagattagatttcctaagatggtcacctcttgctgtagattcttgtgctacttttgtagaatttcccggcagaaccagcgatccatgttcgaccaccttagctatctcttggaaaattccggcatcggcctgggaatgcagggtagtacacctttggatgtggcagccgcatccgttattgataacaacgaattagccctcgccctgcaggaacaggatctcgagaaggtggtcagctatcttgctggttgtggtctgcagagttgtccaatgctggtcgcaaaaggataccccgatattggctggaacccttgcggcggggagcgttatctcgacttcctccggttcgcggtatttgtgaatggggagagtgtcgaggagaacgccaatgtggtggttagattgcttatcagaaaacctgaatgtttcgggccggctcttagaggtgaaggcggtagcggcctacttgcagccatagaggaagcaattcgcatctccgaggaccccgcccgggatggcccgggaatccgaagagaccgccgccgggaacacttcggcgaggagcctccagaggagaatagagttcacttgggacacgcaatcatgtctttttatgccgctcttatagatttgttaggacgctgcgctcccgaaatgcatttaatacaagcagggaaaggcgaggctctacgcataagagctattctgagaagtctcgtgcccctcgaagacttggttggtattatctccttgcccttacaaatacctactctagggaaagacggcgcactggttcagccgaagatgtccgcctccttcgtgcctgatcacaaggctagcatggtgctgttcctggaccgcgtatatgggattgagaatcaggactttctgcttcatgttctggatgttggtttcctccccgatatgagggcagcggcctcgctcgataccgccacctttagtacaactgagatggccctggccttaaaccgatacctgtgcctagcagtcctgcccttgatcacgaagtgcgcaccgttgttcgctggtaccgagcatcgcgcaattatggtggacagtatgctgcacacagtatatcgcctgtcccgaggcagatctctcacaaaggcccagagggacgtgattgaagattgtctgatgagcctctgcagatacattcgaccttcaatgctgcagcatctactgcggaggctggtgttcgatgtgccaatcttgaacgagttcgctaaaatgcctttgaaattgctgaccaaccattatgaaagatgttggaagtactactgccttccaaccggatgggccaactttggagtgactagcgaggaggaactgcatttaacaagaaagctcttttgggggattttcgattcactggctcacaagaaatacgaccccgagctctatcggatggctatgccttgcttatgtgctattgctggggccctgcctcccgattacgtggacgccagctattcttccaaggcagaaaaaaaggctaccgtagatgccgaaggcaacttcgatccccgccccgtggaaaccctgaatgttataattccagaaaaactcgactcctttattaacaagtttgcggaatacactcacgagaagtgggcatttgataaaattcaaaacaattggagttacggggaaaatatcgatgaagagctcaagacccaccccatgctgagaccatacaaaacctttagtgaaaaagacaaagagatttatcgatggccaattaaggaaagcctgaaagcaatgatcgcctgggaatggaccatcgaaaaggcacgggagggggaggaagaaaagactgagaaaaagaaaacacgcaaaatctcgcagtccgcccaaacatacgaccccagagaggggtacaaccctcaaccccctgatcttagtgcagttacattgtctagagagctgcaagcaatggcggagcagctggctgaaaattaccacaacacgtggggacgcaagaagaaacaagagctggaggcaaaggggggaggtacccaccctctattggttccatacgatacacttaccgcaaaggagaaggccagggatagggagaaggcacaggaacttctgaagtttttacagatgaacggctatgctgttacacgaggcctgaaggacatggaactcgactcctcttccattgaaaagaggtttgcctttggtttcctgcagcagctgctgaggtggatggatatctcccaagaattcattgcacacttagaggctgtggtctccagcggtcgtgtggaaaaatcgccccatgaacaagaaatcaagttcttcgcgaaaattcttctgcctctgatcaaccagtatttcacaaaccactgtctgtatttcctctcaactcccgcgaaagtcctcgggagcggcggccatgccagtaataaagaaaaagagatgatcacctctctgttctgcaaactggccgcccttgtaagacatagagtgtcattgtttgggactgacgcacctgccgtggtgaactgtctgcacatcttggcccgaagcctcgacgctagaacggtcatgaagtccggcccggaaatcgtcaaggctggcctgcgaagctttttcgaatcagcctccgaggacattgagaagatggttgagaatctgaggctcggaaaagtcagtcaggcgagaacccaggtgaaaggagtgggccagaatctgacatacacaaccgtcgccctcttgccagtcctgaccaccttgtttcaacacatcgctcagcatcagttcggggacgacgtgatcttggacgacgtgcaggtgtcgtgctatcggacactgtgcagcatctattcattgggaaccaccaagaacacttatgtcgaaaaactgcgccccgcactaggggagtgcctggctcgcctcgctgctgcgatgccagtagccttcctggagccccagctgaatgagtacaacgcctgctccgtgtacactactaagagtcccagagagcgcgcaattcttgggctcccaaattccgtggaagagatgtgtccagatattcccgtgctcgagcgcctcatggcagacatagggggcctggccgagtccggggcccgctatacagaaatgccacatgtgatcgagatcacactgcccatgttgtgctcatatctgccccgttggtgggaacggggaccagaggcgccaccgagtgcgcttcccgcgggcgcccctcccccctgcactgccgttacatcagatcatctgaatagtctcttgggaaatatcctgcggatcatcgtaaacaacctgggcatcgatgaagcctcctggatgaagagattggctgtgtttgctcagcccattgtcagccgagcccgacctgaactgctgcaatcccattttataccaacaataggtaggctgcgtaagcgtgcaggcaaagtggtgtctgaagaagaacagttgaggttggaggcgaaggccgaagcacaagagggggaactccttgtaagagacgagttttccgtgctttgtcgtgatctgtacgctctctatccgctgttgattcgctacgttgacaataaccgcgcccaatggttgacagaacccaatccctctgctgaagaattgtttcgcatggtgggcgagatctttatctactggtctaagtcccacaacttcaagcgggaggaacagaactttgtggttcagaacgaaattaataatatgagtttcctgacggctgacaacaagtcaaagatggcaaaggccggggacatccaatccggaggtagcgaccaggaacggaccaaaaaaaaacgacggggcgatcgctactctgtgcagacctccctaatcgtagctaccctgaagaagatgctcccaatcgggttaaatatgtgcgcaccgacagaccaggacctgattactctggccaagactaggtacgcccttaaggacaccgacgaggaagtgcgagaattcctgcacaataatctccatctgcagggcaaggttgaggggtcaccgtccctgaggtggcaaatggccttataccgtggggtgcctgggcgagaggaggacgcggacgacccagaaaaaatcgttagacgcgttcaggaggtcagcgccgtactgtattacctcgatcaaactgaacacccatataaatccaaaaaagctgtgtggcataagctcctgtcaaaacagaggaggagagccgtcgtggcatgcttccgcatgacccccctgtataacctgcctacacaccgggcctgcaacatgtttctggagtcgtataaagctgcatggattcttactgaagatcactcgtttgaggatagaatgattgatgacctatcgaaagccggcgagcaggaagaagaggaggaggaagtagaggagaagaagcccgaccccctgcaccagctggtgctacacttttcacgaactgcgcttacggaaaagagcaagctggatgaggactatttgtacatggcgtacgctgacattatggccaagtcctgtcaccttgaggaggggggcgaaaacggggaggccgaagaggaagttgaagtctcatttgaagagaagcagatggaaaagcagcgcttgttgtaccagcaagctcggcttcacactagaggggccgccgaaatggtgttacagatgatttccgcctgtaagggagaaaccggcgccatggtgtctagtactctcaaactgggaatctcaattcttaatggcggcaacgctgaggtgcaacaaaagatgcttgattatttaaaagacaagaaagaggtcgggttctttcagagcattcaagcactgatgcaaacttgcagtgtgttagacctgaacgcctttgaacggcagaacaaggctgaaggcttaggtatggttaacgaagacggcactgtaattaaccgtcaaaacggggagaaagtgatggccgacgatgagttcactcaggatctgttccggtttcttcagttgctttgcgagggacataataacgatttccagaactacttgcgaacgcagactggcaatacaacaaccatcaatattataatctgcaccgtggattacctcctgcgcctacaggaaagcattagcgacttttattggtattatagcggcaaagacgttatagaagagcagggaaagaggaatttctccaaagctatgagtgttgctaaacaggtctttaacagtctcacggagtatatccaagggccctgcactggcaaccagcagtctctggcacatagccggctctgggacgctgtagtcggatttctgcatgttttcgctcacatgatgatgaaactggctcaagattcgtctcagatcgaactgctcaaagagctgctggacttgcaaaaggatatggtggtgatgctgctgagtctactggagggcaacgtggtgaacgggatgattgctcggcagatggtcgatatgcttgtcgagtcttccagcaacgttgaaatgatactgaagtttttcgatatgttcctgaaacttaaagacatcgtcggcagtgaggcgttccaggactatgtgaccgatcctcgggggctcatcagtaagaaggatttccagaaagctatggatagccagaagcagttcagcggacctgagatccagttcctgctgagttgttccgaggccgacgaaaatgaaatgatcaattgcgaagagtttgccaaccgttttcaagagccggcacgggacattgggttcaatgtggccgttctcttgaccaatctttcagagcatgtgccgcatgatccgcgtctgcataatttcctggagctggcagagagtattctggagtactttcgcccttatctgggtagaatcgagataatgggagcatcaaggcgcatagagagaatctatttcgagatttcagagaccaatagagctcaatgggaaatgccgcaagtaaaagaatccaagcgacagttcatttttgacgtcgtgaacgaaggcggggaagctgagaaaatggagttgttcgtgagtttttgtgaggacaccattttcgaaatgcaaatcgcggcccagatctctgaaccagaaggagagccagagacggacgaggatgagggcgcgggcgccgctgaagccggtgctgagggcgcagaggagggagctgcaggcctcgaggggacagccgccacagccgccgcaggtgcgaccgcccgagtcgttgcagcagcaggtcgggctttaagaggactcagctacagaagtctgaggcgacgcgttcgccggttaagacgcttgaccgctcgggaagccgccaccgccgtagccgctctgttatgggccgcggttaccagggccggggccgctggtgccggtgcagccgcaggtgcccttggtctgttatggggatcattgtttgggggggggcttgtggaaggcgccaaaaaggtgaccgtgacagagctgttggccgggatgcccgatccaacaagcgacgaagtacacggcgagcagcctgccggcccaggcggtgatgcagatggagagggcgctagtgagggggccggcgacgccgccgaaggagcaggagatgaggaggaggccgttcacgaggccggccctggaggtgctgatggcgccgtggccgtcacggatgggggaccttttcggccagagggagccggcggactgggcgacatgggggacactacaccggccgagccccctaccccagagggctccccgattttaaaacgaaaactgggggttgatggtgtcgaggaggagctcccacccgaacctgaaccagagcccgagccagagctggagcccgagaaggccgatgctgagaatggggaaaaggaggaagtgccagagcctacacccgagccgccgaagaagcaagcccctccaagccccccccccaaaaaggaggaagcaggcggcgagttttggggagaactggaggtgcagcgtgtgaagttcctgaactacctttccagaaatttctatacactgaggtttctcgctctgttcctggcctttgccatcaatttcattctgcttttctacaaagtaagtgattccccaccaggcgaggatgatatggagggatccgctgccggcgatgtttccggtgcaggatctggtggtagttcagggtggggtctgggcgccggcgaggaggccgagggcgacgaggacgagaacatggtttactactttctggaagaatccaccggctacatggagcccgctcttaggtgcttgagtctgctccataccctcgtcgcatttttatgtatcataggatacaattgcctgaaggtccccctcgtgatcttcaaacgggaaaaagagttggctagaaaactcgagttcgacggactttacatcacggaacagcccgaagatgatgatgtcaaaggacagtgggatagactggtgcttaacacgcctagcttcccctccaactattgggacaaattcgtgaagcggaaggtgctcgataagcacggtgatatttacggccgtgaaaggattgccgagctcctcggtatggacctggctactttagagatcaccgcccataatgagagaaagccaaacccgcctccaggcctgctgacgtggctgatgagcatagacgtgaaataccagatatggaagttcggtgtgatatttacggacaactcatttttatacctggggtggtacatggtcatgagccttctgggacactacaataacttcttttttgccgcccatctgctagacatcgccatgggcgtcaagactctccgtacaatcctgtccagcgtgacccataatggtaaacagctggttatgaccgtgggattactagctgtcgtggtttacttgtatactgtggtagcgttcaattttttcaggaaattttataacaagagcgaggatgaagatgagcctgacatgaaatgcgacgacatgatgacatgttacttgttccatatgtacgtaggcgtccgtgcagggggaggcataggcgacgagattgaggatcccgccggcgacgagtatgagttataccgcgtcgtgtttgacattaccttcttcttttttgtaattgtgatcctccttgcgatcatccagggacttatcattgatgctttcggcgagctacgtgaccagcaagaacaggtgaaagaggacatggagaccaagtgtttcatctgcggaatcggttctgactatttcgacacaactcctcatgggtttgagacccacaccctggaagagcacaacctggcaaactatatgttttttctaatgtacttaatcaataaagacgaaaccgaacacacgggccaggagagctatgtgtggaaaatgtatcaggaacgctgttgggattttttccccgccggcgactgcttcaggaagcaatacgaggatcagctcagttag

SEQ ID NO: 12030 - DNA, 15102 bp, Artificial Sequence
  derived and/or modified sequence
atgggcgacgccgagggcgaggacgaggtgcagttcctgcggaccgatgatgaggttgtgcttcagtgctctgccaccgtgctcaaggagcagcttaagctctgcttagctgccgaaggatttgggaatcgactgtgtttccttgagcccactagcaacgcccagaacgtgccacccgacctggccatttgctgcttcgtgctagagcaaagcttatccgtcagagcactacaagaaatgctcgcaaatacagtcgaagccggcgtggaatcctctcaaggtggtggtcaccgtacactcctgtacggccatgcaattttacttcggcacgcccatagccggatgtatctgtcttgcctgacgacatcacgcagtatgaccgataaactggctttcgacgtggggctgcaggaagatgcaactggtgaagcctgctggtggactatgcaccccgcatctaaacagaggtcagagggcgagaaagtgcgggtgggggatgatatcatattagtctcagtgtctagcgagcggtacctccacttgagcaccgcaagtggagagttgcaggtagacgccagttttatgcagacattgtggaacatgaatccaatctgtagccgatgtgaggagggatttgtgaccgggggtcacgtactgcgcctttttcatggccacatggatgagtgcctcactatctctcccgcggacagcgacgaccagagaagactggtgtattatgagggcggcgcagtatgcactcacgcgagaagcctgtggcgccttgagccattgcgcatctcctggtctggatcccacttgcggtggggtcagcctctgagggtgcgccacgtcacaaccggtcagtatctagcactgaccgaggaccaaggactggtggtcgtagatgcctccaaggcgcacactaaggcaacgagcttttgttttcgtatctcaaaggagaaactggatgtcgctcccaagcgagatgtcgagggcatgggtccccccgagattaagtacggggagagcttgtgctttgttcagcacgtagcttccgggctatggctgacttacgccgcccccgacccgaaggccctgaggctcggcgtgcttaagaaaaaggcaatgctgcaccaggagggccatatggacgatgccctgagcctgactcggtgtcagcaggaagaatctcaggccgcgagaatgattcactctactaatggattgtataatcaattcatcaagtctctcgacagcttcagtggaaagccgcgcggaagcggcccaccagctggaaccgctctaccgattgagggcgtgattctgagcctccaagatttgatcatatacttcgaacctccttcagaagatttgcagcacgaagagaagcagtcaaagctgcgatcgcttaggaacaggcagagcttgttccaggaagaagggatgttgtctatggttctcaattgtatcgataggctcaatgtgtatacaaccgctgctcacttcgcggagttcgccggcgaggaagcagccgaaagctggaaggagatagtcaatctgctgtatgagctcctggcctctctcattagaggcaaccgctcaaactgcgccctcttctctacaaacctggactggctggtgagcaaactggaccggctagaggcatcctcggggatccttgaggtgctgtattgcgtcttaatagagtccccggaagtgcttaacattattcaggagaaccacatcaagagcataatttccttacttgataaacatggacgtaatcataaagtgttggacgtcctttgctccctgtgtgtatgtaacggcgtggccgtccggtccaaccaggacttgattacagaaaacttgctgcccggacgggaactgctgctccagacaaacctcataaactacgtgacttccatccgcccgaatatctttgtcggtcgcgctgaagggacaacacagtactctaagtggtattttgaagtcatggtagacgaagtcacacccttcctgactgctcaggcaacacatcttcgtgtaggatgggccctgaccgaaggctacaccccataccccggcgcgggggagggatgggggggaaatggggttggcgatgacctgtattcttacggtttcgacggcctacatctgtggacaggccatgtggcgagacctgttaccagcccaggccagcacctcttggctcctgaagatgtcataagctgttgtctggacctgtcggtcccttctatctccttcagaatcaacggttgccctgtgcaaggtgttttcgaatctttcaacctagatggcctgttctttccagttgtcagcttctccgcaggggtgaaggtccgcttcctcctgggcggacgtcacggcgagtttaaatttcttcctccgcccggctacgcaccatgtcatgaagccgtcctccccagggagaggcttcacttagaacccattaaggaatacagaagggagggcccacgagggccccacctggtcggccctagccgatgtttgtcacacacggacttcgtgccatgccctgtggatactgtgcagattgtgctgcccccgcatctcgagcgcatcagggagaagctggccgagaacattcacgaactctgggccttgaccagaatagagcaaggctggacctacggtcccgttagggacgataataagagactccacccctgcctagtggattttcacagcttgcctgagccagaaaggaattacaacctccaaatgagtggagagaccctcaaaactctgcttgcactcggctgccatgtcggaatggcggatgagaaggccgaagataacttaaagaagacgaagttacctaaaacgtatatgatgagtaacgggtataagcctgcccctctggacctgagccatgtgagactgactcccgcccagacaaccttggtggatcggttggccgagaacggtcacaacgtatgggccagggaccgggtcggccagggctggagctattccgccgtgcaggacatcccggccaggcgtaatccccgccttgtcccataccgtttactggacgaagccaccaaacgttctaatagagactccctctgccaggccgttcgaacgctgttgggctacggttacaatatcgaaccccccgatcaggagccctctcaggtcgagaatcaatctcggtgtgacagagttcgaatttttcgggctgaaaagtcctataccgtgcaatcaggcagatggtattttgaatttgaggctgtgaccacaggggaaatgagagtcggttgggctaggccggaattacgaccggacgtggagctcggggctgatgaattggcttacgtgttcaacggtcaccgtgggcagcgatggcatcttgggtccgaaccattcggaaggccatggcagccaggagatgttgtgggatgcatgattgatttgacagagaatacgatcattttcactttgaacggtgaagtgctcatgagcgattccggtagcgaaactgccttccgcgagatcgaaattggtgacggtttcctgccagtttgttccctgggcccaggacaagtagggcacctgaacctcgggcaagatgtgtcatcactgaggttttttgctatctgcggactgcaggagggctttgaaccattcgccataaatatgcagaggccagtgaccacctggtttagcaaaggactgcctcagttcgaaccagtgccactggagcatccgcattatgaggtatcacgggtggacggaaccgtagacactccgccgtgccttcgcctcacgcaccgcacgtgggggagtcagaacagtctggtggagatgctgtttctcagattgagtttacctgttcaattccaccaacatttccgatgcaccgccggcgccacccctcttgctcctcctggccttcagcctcctgctgaggacgaagcaagagccgcagagcctgacccagattatgagaacctgagaaggagcgccggcggatggagcgaagcagaaaatggcaaagagggcacggctaaagaaggggcccctggcggtactccccaggccggcggggaagcacagccagccagagctgagaacgaaaaggatgccactacagagaagaataagaaacgcggatttctgtttaaggctaaaaaggtcgctatgatgactcaaccacctgccactcctaccctgccacggctgccccacgatgtggtgcccgccgacaaccgcgatgacccagaaataattcttaacactaccacttattactactccgtccgggtcttcgcagggcaggagccgtcctgcgtctgggctggctgggtaacccccgattaccaccagcatgatatgtcatttgacctgagcaaggttcgggtcgtgaccgtaaccatgggggacgagcagggcaatgtgcacagtagcctaaagtgtagcaattgctatatggtgtggggcggggactttgtgtctcccggtcagcaaggccggatttctcacacagatctggtgatcggctgtcttgtcgacctcgccacaggactaatgacttttaccgccaacggtaaggaatccaatacgttcttccaggtcgaaccaaacacaaaactgttcccagccgtgtttgtccttccaacccaccagaacgttattcagttcgaactcggtaaacagaagaatatcatgcccctaagtgcagccatgttccaatcggagcggaagaacccagccccccaatgccccccaaggctggagatgcagatgctgatgcctgtgagctggagccggatgcccaatcacttcctccaagttgaaacacgtagggctggggagaggttgggctgggccgtgcaatgtcaggagcccctcactatgatggccctgcatattcctgaggagaaccgatgcatggacatcctggagctgtcagaacggcttgatcttcagagatttcattctcacactctgcggctgtatcgtgcagtctgcgcactgggcaataatcgcgtcgctcacgcgctgtgttctcacgtggaccaagcccagcttctacatgccctggaggatgcccatctacccggccctctgagagcgggctactacgatctactgatctccatacacctggagtccgcttgtcgctcgcgcaggagcatgctgagtgagtacatagtcccccttactcctgagacacgggctatcacactgtttcctcctggacggtccactgagaacggccacccacgccatgggctgcccggggtgggcgtaaccactagcctccgccctccacatcatttttcacctccctgttttgtagcagcacttcccgccgcgggcgctgccgaggcgcccgccaggctgagccctgcgatacctctcgaggcactgcgggacaaagctctgcgcatgctgggggaggcagtgagggacggggggcagcatgcaagagacccggtggggggctccgtggagttccagtttgtacccgtgttgaaactggtctccacgttgctggtcatgggtattttcggcgacgaggacgtcaagcagatccttaagatgatcgagccagaggtcttcactgaagaggaggaggaggaagatgaagaagaagagggggaagaggaggacgaagaagagaaagaagaagatgaggaggaaaccgcccaggaaaaggaggacgaagaaaaagaagaagaagaagctgctgaaggagagaaggaagaaggcttggaggagggtctgctccaaatgaagctgccagagagcgtgaagctgcagatgtgtcacctgctggagtacttctgtgaccaggagctgcagcacagagtcgagagtctagccgcttttgctgaacgatacgtggacaaactccaggccaaccagcgcagcaggtacggactattgatcaaggctttttccatgaccgccgcggagactgctcgcaggactagagaatttagatcaccacctcaagaacaaatcaatatgctgttgcagttcaaggacggcaccgatgaagaggactgtccactcccagaggagatacggcaggatctgctcgattttcatcaggatctactagctcattgtggcatccaactcgatggggaagaagaagaaccagaagaggaaactacactgggcagccggttgatgtcactgctcgaaaaagtgcgactcgtgaagaagaaagaagaaaagccagaagaagagcgctcagctgaagagtccaagccccgcagcctgcaggaattagtctcccacatggtagttcgttgggcccaggaggactttgtccagtctccggagttggtgcgtgctatgttcagcctgctgcaccgccagtatgatggactcggcgaactactccgagcactgccccgcgcttacaccatttccccatccagcgtggaagacactatgtccctgctggaatgcctgggccaaatcaggtcacttctgattgtacagatgggccctcaggaggaaaatcttatgatccagagtattgggaacatcatgaataataaggtattctatcagcatccgaacctgatgcgtgctctggggatgcatgaaaccgtcatggaggttatggtcaatgtgctggggggcggagagtccaaagagatcagatttccaaaaatggttactagttgttgcagattcctgtgttacttttgcagaatatcaagacagaatcagaggtcgatgttcgaccatctcagttaccttctggagaactcaggaatcggtctcggtatgcaaggctcaaccccacttgacgtggctgcggctagtgtgatcgataacaatgaacttgcactagctctccaggagcaagacctggagaaggttgtgtcatacttggccggatgcggcctgcagtcctgcccaatgctcgtcgctaagggttacccggatatcggctggaacccttgcggaggggagagatacttagatttcttacgtttcgcggttttcgtgaatggcgagtcggtcgaagagaacgcaaacgtagtagtgaggctccttatcaggaagcccgaatgcttcggtcctgccctcaggggagagggaggctctgggcttcttgccgccattgaggaagcaattcgaatttccgaggatcctgctagggatggaccaggtattagacgagaccggcgcagagagcatttcggagaggagccaccagaggagaacagggtacatttaggacacgctatcatgtcattttacgctgcactgatagacctactaggcaggtgtgcccccgagatgcaccttatccaggctgggaagggcgaggccctccgtatccgcgctatcttgaggtcactggtcccattagaagatttggtgggcattattagcttgcccctgcaaatccctactctaggtaaagacggcgccctggtgcagcctaaaatgagtgcaagtttcgtgccagaccataaggctagcatggtgctcttcctggatcgggtctatggaatcgaaaaccaagacttcttgctccatgtcctcgatgtggggtttctgccagatatgcgggcagctgcatcactcgacaccgctaccttctcaacgacagaaatggcgttggcgctgaatcgctacctgtgtctcgctgtgttgccactcatcaccaaatgtgcaccccttttcgctgggaccgagcatcgggctattatggtggactctatgctccacaccgtgtaccggctgtcccggggcaggtctctcacgaaagcccagcgggacgtgatcgaagattgcctgatgagcctgtgtcgctacattcgcccatcgatgctacagcatctgctccggcggctggtgttcgacgtgccaatactcaatgaattcgccaagatgcctctgaagctcctcactaatcattacgaacgctgttggaagtattattgtctccccaccggctgggccaatttcggagttactagcgaagaggagcttcacctgaccaggaagctgttctggggaatcttcgatagcctggcccacaagaagtatgatccagagctatatagaatggctatgccgtgcctgtgtgcaatcgccggcgccttacctcctgactacgtagatgcctcctactcaagcaaagccgaaaagaaagctacagtggatgccgagggcaatttcgacccaaggcctgtagagacacttaatgtgattattcctgagaaactggactcttttattaacaaatttgctgagtatactcacgaaaagtgggcttttgacaagatccagaataactggagttatggagagaacattgatgaggaacttaagactcaccccatgttacggccatacaaaacattttccgaaaaggacaaagagatttatcggtggcccattaaagagagcctgaaagccatgatagcgtgggagtggacaatcgagaaagctagagaaggcgaggaagaaaagaccgagaagaaaaagacaagaaagatcagccagagtgcgcagacctacgacccacgggagggatataatccccagccaccagacctgtcagcagtaacattgtctagggaattgcaagcgatggccgagcaactcgccgaaaactatcataatacctggggacggaagaagaagcaggaactggaagcaaagggaggaggaacacaccctctcctcgtaccatacgatacccttaccgctaaggagaaggcccgggacagggaaaaggcacaggaactgctaaagtttctacagatgaatggttatgctgttacccgagggttaaaagacatggagctcgattcctcctcaattgaaaaacgttttgcatttgggttcctacaacagctgcttcgctggatggacataagccaggagtttatcgcacatctggaggctgtggtgtctagcgggagggtcgagaagtcaccacatgaacaggagataaagttttttgcgaagatcctgctgccacttatcaaccagtattttactaatcattgtctgtacttcctgtcaacacccgccaaagtcctggggagtggcggtcacgcatcaaacaaagaaaaggagatgattacctcccttttttgcaagctggccgcgctggttcgtcacagagtctcgctgtttgggaccgatgctcccgctgtggttaattgtctgcatatactcgcccgatcactggatgcccggacagtcatgaagagcggccctgagatcgttaaagccggtttacgcagtttttttgagagtgcatccgaggacattgagaaaatggtggaaaacctgaggcttggcaaagtgtcacaggcccgcacccaggtgaagggagtcggacagaatctcacctatacaacagtggctctgctacctgtcctgacaactctgtttcagcacatcgctcagcatcaattcggagacgacgtgattcttgacgacgtgcaagtctcgtgttaccgcacgctttgctccatctattcactgggaaccaccaagaatacctatgtcgagaaacttcgcccggctctgggagagtgtctggcgaggctggccgctgcaatgcccgtagctttcttggagcctcaacttaatgaatacaacgcatgcagcgtttacacaacgaaatcacccagagaacgggctatacttgggcttcctaacagtgtcgaggagatgtgtccagatataccggtcctagagagacttatggccgacatcggtggcctggccgagtcaggcgcgcggtatactgaaatgccccacgtcattgaaattactctgcccatgctatgttcctacctgccgcgttggtgggaaagagggcctgaagccccaccctcggcactgcccgctggagcgcctcccccttgtacagcagtgacttccgaccatctcaatagcctgcttgggaatatcctccggattattgtgaataacctgggtatcgacgaggcttcctggatgaaacgcctagcagtcttcgcacagccaattgtgtcaagagcccgcccagaacttctgcaaagccattttattccaacaattggcaggttgcgcaagagggccgggaaggtggtgtctgaggaggaacagttaaggctggaggctaaggcagaggcccaggaaggcgaactccttgtcagagatgagtttagcgtcctgtgtagagatttatacgcgttatatcccttactgataaggtatgtcgacaacaatcgggcccagtggttgaccgaacccaacccctcggcagaagaacttttcaggatggtgggggaaatctttatatactggtcaaagagccacaacttcaagagagaagaacagaattttgtcgtccaaaatgagattaacaacatgagcttcctgaccgcagacaataagtctaagatggccaaagcaggtgacatccagagtggaggcagtgatcaggagcgcactaagaaaaaacgccgcggagataggtacagcgtccagactagtctcattgtcgctacattgaagaagatgctccctattggcctgaacatgtgtgcccctaccgaccaagatttaataactctggctaagacacgttacgccttgaaggacactgacgaggaggttagagagttcttgcacaataacttacaccttcagggcaaagttgaaggatccccttcactgcgctggcagatggccctctatagaggcgtgccaggacgcgaagaggacgccgacgatccggagaagatagtaaggagagtgcaggaggtatcggctgtgctttattacctggaccagacagagcacccttataaatcgaaaaaggctgtctggcataagctgttatcgaaacagagacgaagagccgtagttgcctgcttcagaatgacaccactctataatttaccgacccacagagcctgcaacatgttcttagaatcctacaaagctgcgtggatcctgaccgaagaccactcttttgaggacaggatgatcgatgacctctctaaggctggcgaacaggaggaagaggaggaagaagtcgaggagaaaaagcctgatccactgcatcagctagtgctgcatttctcgcgtactgcactcaccgagaaatctaagctggacgaagactatttatacatggcctatgcagatattatggccaaatcctgccatctggaagaggggggagaaaatggggaggctgaggaagaagtcgaggttagcttcgaagaaaagcaaatggagaaacagagactgctctatcaacaggcccggctgcatacacggggtgctgcggagatggtccttcagatgatctccgcctgtaagggggagacgggggccatggtgagttctaccctgaagctgggcatcagcattctaaacggcggtaacgcagaggttcaacaaaagatgttggattatctgaaggataagaaggaggtgggttttttccaatcgattcaggctctgatgcagacctgcagcgtgctggacctcaatgccttcgagcgtcagaacaaggccgaaggcctgggaatggttaacgaggatggcactgtaggagaaaaggtcatggccgacgacgaatttacccaggacctgtttaggtttcttcagctcctctgcgaaggccacaacaacgactttcagaattacctgagaactcagacgggaaatactacgacaataaacataatcatatgtacagtggattatttgcttaggttgcaagaatctatctctgacttctactggtattatagcggcaaagacgtgatcgaggaacagggaaagcggaatttttccaaggcaatgtccgtggctaagcaagtctttaactctctcacagaatatatccagggcccatgcacagggaaccagcagagccttgcacattcacggctctgggatgctgtggttgggtttcttcacgttttcgcccacatgatgatgaaactggcacaggacagttctcaaattgagcttctcaaggagctgctggatctgcagaaggatatggttgtcatgctcttgagcttactggaaggtaacgtggtgaatggcatgatagcgcgacagatggtagacatgctggtcgagtcaagtagcaacgtagagatgatcctgaagttttttgatatgttcttaaaactgaaggatatagtgggtagtgaggcctttcaggattatgtgacagatccacgcggcctcatttctaagaaagacttccaaaaggctatggatagtcagaagcagttctctgggcccgaaatccagttcctactcagctgctcagaggcggatgagaacgaaatgatcaactgtgaggaattcgcgaatagatttcaggaaccggctagagatattggttttaatgtcgccgtcttgctcacaaacctttctgagcacgtcccgcacgatccacgactccataattttctggagctggcggagtctatacttgaatatttcagaccttacctgggccgaattgagattatgggcgcgagtagaagaattgaacgcatttattttgaaatctctgagacaaatcgggcccagtgggagatgccccaggtgaaagagtccaagaggcaatttatttttgacgtggttaacgaggggggggaggccgaaaaaatggagctgttcgtgtccttctgtgaggataccattttcgagatgcagattgcagctcagatcagcgagccagagggagaacctgaaactgacgaagatgaaggagccggggcagccgaagcgggtgctgaaggggccgaagagggtgcggccggattagagggaaccgctgctactgcggccgccggagctacggcacgggtggtagctgcggccggccgtgcattgcggggcctgtcttaccgctcgctgcgaaggagggttcgccgattgaggcgactcaccgcgagggaagcagctaccgctgtggccgctcttctgtgggccgccgtgacccgagccggcgcagcaggagcgggcgcggccgccggagccctgggactgttgtggggcagtctctttggtggcggtttggtcgaaggtgcaaaaaaggtaacagtgacggagttacttgcaggtatgccagaccccacctctgacgaagtccacggagaacagccagctggcccggggggcgatgccgatggagagggggcatctgaaggtgctggtgacgctgcagaaggcgccggcgacgaagaagaggccgtgcacgaggccggtccaggaggcgccgacggggccgttgccgtcacggatggaggcccatttagacccgagggagccggaggactcggggatatgggcgacacaactcccgccgaaccccctaccccagagggctccccaatcttgaaacgcaagttgggggtagacggagtagaagaagagctgcctccagagccagaacccgagccggagccggagctggaaccggaaaaggcggatgcagaaaacggcgagaaagaggaagtgcccgagcccacacccgaacctccgaaaaagcaagcgcctccgtctcctccacctaaaaaggaggaggccggaggtgagttttggggcgaactggaggtgcagcgcgtgaagttcctgaactatctgtccagaaacttttataccttgcggtttcttgcactcttcctggctttcgccatcaacttcatccttctgttctacaaagtctccgattcccctccaggcgaggacgatatggagggctcagctgctggagacgtctctggggccgggtccggcggaagttccggctggggcctgggcgccggcgaggaggctgagggagacgaggacgaaaacatggtctattatttccttgaagagtcaacggggtatatggagcccgccctccgttgtctgtcacttctccacaccctggtcgcattcctctgcattattggttacaattgcctgaaagtgccactggtcatcttcaaacgagagaaggagctggctcgcaaacttgaattcgacggcttgtacattaccgaacaaccagaagatgatgacgtaaaaggccagtgggacaggctggtcctcaacactcccagcttcccctcaaattattgggacaaatttgttaagagaaaagtgcttgataagcatggcgacatttatggtagagagaggatcgctgagctgttgggcatggacttggccacactggagatcacagcacacaatgagcgaaaaccgaacccccctccaggactactgacctggctgatgagcatagacgtaaagtatcagatctggaagtttggagtgatcttcaccgacaactccttcctgtacctgggatggtatatggtgatgtcactattgggacactacaataatttttttttcgctgctcatctgcttgacatcgccatgggtgtgaagacactaaggactatactctcatccgtgacccataacggaaaacagctggttatgaccgtcggtctgctggctgtggtcgtgtatctttacaccgtggttgcgttcaacttttttcggaaattctacaacaaatccgaagatgaagatgaacctgatatgaagtgcgatgacatgatgacatgctacctgttccacatgtatgtgggggtaagggctggagggggtatcggtgacgagatcgaagatccagctggcgacgagtacgagctttaccgcgtagtctttgacatcacgtttttttttttcgttattgtaattcttctggcaatcattcaaggccttattatcgacgcattcggcgaactgagggaccaacaggaacaggtcaaagaggacatggagacgaagtgtttcatttgcggtatcggatccgactacttcgacacaaccccgcacgggtttgagactcacactctggaggaacacaatctggccaattacatgttcttcttaatgtacctcattaataaggatgagacagagcataccggccaggagagctacgtatggaaaatgtatcaggagcggtgttgggacttttttccagcaggagactgctttaggaagcagtacgaagaccagctgtcgtag

SEQ ID NO: 12031 - DNA, 2031 bp, Artificial Sequence
  derived and/or modified sequence
atgaagagcggccccgagatcgtgaaggccggcctgcggagcttcttcgaaagtgctagcgaggatatcgagaagatggtggagaatctgcgcctcggcaaggtttcacaagcaaggactcaggtgaagggcgtgggacaaaacttgacttacacaacggtagcccttttgcctgtcctgacaacactctttcaacatatcgcccagcaccagttcggggacgacgtcatccttgacgatgtgcaggtctcctgttaccgcactctctgcagtatctactctttaggaacaactaaaaatacatatgtcgagaagttaagacctgcactaggtgaatgtttagcacggcttgcggcagccatgccagttgcctttctggaaccccagctgaacgagtacaacgcatgtagtgtctacactacaaagtctccccgcgagcgcgcaatcctgggccttcccaattccgttgaggaaatgtgccccgatatcccagtgctcgagagattaatggccgatatcggtgggctggcggagagcggagcacggtacacagaaatgccacacgtcatcgagattaccttgcccatgctctgttcttacctccctaggtggtgggagcgcggccccgaggcacccccatcagcactgccagccggtgcacctccaccctgtacagcagtcacatcggaccatttgaattcactcctagggaatatcctgagaattattgtcaataacctcggcatcgatgaagcctcatggatgaaacgattggctgtgttcgcccagccaattgtgtcccgagctcggcctgaacttttacagtcacacttcatccccactatcggccgtctgcgaaaaagggctggcaaggttgtctctgaggaagagcaactgcgcctggaagccaaagctgaggcccaagagggagaattactcgtgagggacgagttcagtgtgctgtgccgggatctctatgccctctacccacttctgataagatatgtggataacaatagagcacagtggttaaccgaacctaatccgtcagccgaagaattgttcaggatggtcggtgagatcttcatatattggtctaagtctcacaactttaaacgggaggaacagaactttgttgtgcagaatgagattaataacatgagtttccttaccgctgataataaatctaagatggccaaagcaggggatatccagtccggcggctccgatcaggaaagaaccaaaaaaaaacgccgtggggatcgctattccgtacagacctctttgattgtcgcaacgcttaagaagatgctgcccatcggactgaacatgtgcgctcctaccgatcaggatctcattacactcgccaaaacccgatatgccctaaaggatacggatgaggaagtccgggagttccttcacaataacctgcacctgcagggaaaggtggaagggagtcccagcctgagatggcagatggccctgtaccgaggcgtgccaggccgggaggaggacgccgatgaccctgaaaaaatcgtccggagggtgcaggaggtgtctgccgttctctactacctcgatcagacagaacacccgtacaagtccaagaaggccgtgtggcacaagttgctctccaagcagcgacgaagagctgtcgttgcctgtttccgaatgaccccactttataacctccccacacatcgggcatgcaacatgtttcttgagtcttataaggcagcttggatacttaccgaagatcacagctttgaagacagaatgatcgatgatctgagcaaggccggggaacaagaagaagaggaggaggaggttgaggagaagaagcccgaccccctccatcagcttgtgcttcacttttctcggacagcgctgactgagaaatctaagttggacgaagattacctttacatggcctacgccgacattatggccaaatcttgccatcttgaagaaggtggtgaaaatggcgaggctgaagaggaagtggaggtctccttcgaggaaaagcaatag

SEQ ID NO: 12032 - DNA, 15117 bp, Artificial Sequence
  derived and/or modified sequence
atgggcgatgccgagggagaggacgaggttcagtttctgcggacagacgatgaggttgtgctacaatgcagcgctacagtactcaaggaacagttgaaactctgcctcgccgctgaaggcttcggcaaccggctctgctttctggaaccaacttctaacgctcagaacgtcccgcctgatctggcaatttgctgtttcgtccttgaacagtcactgtctgtccgcgcactgcaggagatgctcgctaacaccgtggaggccggtgtagaaagcagccagggaggtggccacaggactcttttgtacggtcacgccatcctgttgaggcatgcgcattcaagaatgtacctttcttgcttgaccacaagcagatctatgaccgacaagctcgcatttgatgtgggtctgcaagaagatgccactggcgaggcatgttggtggacaatgcacccagcctcaaagcagaggagcgagggagagaaggtacgggtgggagacgacatcatactggtcagcgtctccagcgaacgctacctgcacctgtcaactgctagtggcgaactgcaggtagacgcttccttcatgcagacgttatggaatatgaatcctatttgctccaggtgcgaggaaggttttgtgacaggtgggcacgtcctgcgtctgtttcacggtcacatggatgagtgcctaacaatctcacccgcagattccgatgatcagcgccgactcgtttattatgaagggggagcagtctgtacacatgcacgctcactctggcggctagagcctttgaggatttcctggtcaggatcccatctgaggtggggtcagcctctacgcgtgaggcacgtgacaaccggacagtatctagcactgaccgaggaccaaggactagtcgtcgtggacgcttctaaggcccataccaaagctacatctttctgctttagaatctcaaaagaaaagctggatgtcgcacccaaacgagatgtcgaaggaatggggcctccagaaattaaatacggagaatctctgtgctttgtgcagcatgtcgcaagtggattatggctgacttacgccgcacccgacccaaaagccctccgcctaggagtccttaagaagaaggcgatgctgcaccaagagggccacatggacgatgccctctcgcttactcgctgccaacaggaggagtcccaggctgccaggatgatccattccactaatggcctttacaaccaattcattaagagcctcgattcctttagtggcaagcccaggggttctggacctccagccggaactgcccttcccatcgagggggtaatcctttccctgcaggatctgatcatctattttgaaccaccgtcagaagatctccaacacgaagaaaagcaaagtaagttgagaagtctgcgcaaccgccagtcactattccaggaggaaggcatgctgtcaatggtactcaattgtatcgatcgtttgaacgtgtacactaccgctgcccatttcgctgaatttgcaggagaagaagcagccgaaagctggaaggagatcgtgaacctgctgtacgaactcctcgccagccttattagagggaaccggagcaattgtgcactatttagcacaaaccttgattggctcgtgtctaagctggacaggttggaggcttctagtggcattctggaggtactttactgtgtgttaatcgagtcgccagaagtgctgaatatcattcaagagaaccacattaagagcattattagcttacttgacaagcacggccgaaatcataaagtcttggatgttttatgcagcttgtgtgtttgtaatggagtggcagtcaggtcgaaccaggatttgatcaccgagaacctgcttccaggtcgcgagctactgctacagactaatttaattaactacgtcacttccatcaggcctaacatattcgtcggcagggccgagggaacaacccagtattcgaaatggtactttgaggtcatggtcgacgaggtcaccccgtttctgacagcgcaggccacacatctgcgcgtgggctgggcacttacagaaggctacaccccatatccaggagctggggagggctggggtggaaacggcgttggggatgacctgtatagctatggtttcgatggtctgcatctgtggacaggacatgtggcacggcctgttacttcccctggtcaacacttactagcccctgaggacgtcatttcctgctgccttgacttgtccgttccgagcatcagtttccgcattaacggctgtcctgtgcagggagtgtttgagagcttcaacctggatggcctgttcttcccagtggtgtctttttctgccggtgtcaaggtgcgcttcctcctgggaggccgacatggtgagttcaagttcctaccaccccctggttatgcaccctgtcatgaagcagtcctccctcgtgagcgattacatctggagcctattaaagagtacagaagagaggggcctcggggacctcacctcgtaggaccatcaagatgcctttcccatacagattttgtgccatgcccggtggatactgtgcaaattgtcctccccccacacctggagcgcattcgggagaagctagcagagaatattcacgagctatgggctctaacccgaatagagcagggatggacttacggccctgtacgcgatgataataagcgccttcatccctgcctggtggactttcactcgctgccggagccagagcggaattataatctgcaaatgagcggcgagacgctgaaaaccttgctggcccttggctgccacgtgggcatggctgatgagaaagctgaggacaacttgaagaagacaaaactgccaaaaacctatatgatgagtaacggctacaagccagcccctttagacctctctcacgtgcgcctcactcccgcacagacaacactggtcgataggcttgccgagaatggccacaatgtctgggcgagggatcgtgtgggccagggatggtcatactccgccgtgcaggatatcccagccaggcgtaatccgaggcttgtcccctaccgactccttgatgaggccacaaaaagaagcaacagggattccttgtgtcaggcagtccggacacttttaggatatggctacaacatagagccacccgaccaggaaccctcccaggtggaaaatcaaagccgctgtgacagggtgaggatcttcagggcagaaaagagttacaccgtgcagagtgggagatggtactttgagtttgaggccgttacgaccggcgagatgcgggtgggctgggctagaccagagttgcgacccgacgtcgaactgggagccgacgagctggcatatgtcttcaatggccacaggggccagcgctggcacttggggtcagagccctttgggaggccttggcagcctggcgacgttgttgggtgcatgattgacttaactgagaacaccatcatctttacattgaacggcgaggtgctgatgtcagacagcggtagtgagactgctttccgcgaaattgaaatcggtgatggttttctaccggtgtgcagtctgggaccaggccaggtcggccacctgaacttaggacaggacgtctcctctctcaggttcttcgctatctgcggtctgcaggaagggtttgaaccctttgctataaacatgcagagaccagtcactacatggttcagtaagggcctcccacaatttgagcctgtgcctttggaacaccctcactacgaggtgtctcgggttgatgggactgtcgacacacctccttgtctgcgcctgacccacagaacctggggctcccagaacagtcttgtggagatgctgtttctgagactcagcttgcccgtccagtttcaccagcactttcgctgcaccgccggagccaccccgctagctccacctggcctccagccaccggctgaggacgaggccagagccgctgaacctgatcctgactatgaaaacctgaggcgtagcgctggagggtggtctgaagcagaaaacggaaaggagggcaccgcaaaagaaggggctccaggcggtaccccccaggccggtggggaggcccagcctgctcgggcagagaatgagaaggatgccacaactgagaagaacaagaaacgaggcttcctgtttaaggctaaaaaggtggctatgatgacacagccacccgcaactccaacactcccgagactcccccacgacgtcgtaccggcagataacagagacgatcctgaaattatcctgaatacgaccacctactactattcagtcagagtgttcgctggtcaagagcctagctgcgtctgggctggatgggtgacccctgattaccaccaacatgatatgtcatttgacctctccaaggtcagggtggtgaccgtaaccatgggggatgaacagggaaatgttcacagttccctaaaatgttccaactgttacatggtgtggggaggggactttgtgagccctgggcagcaaggtaggatctcacacaccgatctcgtcatcggatgcctggtggacctggcaactgggctaatgacctttacggccaacggtaaggaatccaatacgttttttcaggtcgaaccgaataccaaattgttccccgctgtcttcgtgcttcctacccatcaaaacgtgattcagttcgagctggggaagcagaagaacatcatgccattatccgctgcaatgttccagtctgaacgcaagaacccagccccacaatgtccccctagattggagatgcagatgctgatgcctgtgtcttggtctaggatgccgaatcacttcctccaggtcgagacccggcgtgcaggtgaaagactcggatgggctgtccaatgccaggaaccgcttaccatgatggcactgcatattccagaagagaatcgttgcatggacatactggagctgtccgagcgtctggacttgcaaagattccactcgcatacactgcggctctatcgcgctgtgtgtgccctggggaacaacagggtcgcacacgctctctgtagccatgtggatcaagcgcagctgcttcacgcgctggaagacgcacatctcccaggacccttgcgtgccggttactacgacctgctcatctctattcacctggagtccgcgtgcagatcgcgtagatcaatgttgtctgagtacatagtaccactaacccctgagacacgagctatcaccctgtttccacccggacgaagtaccgaaaacggccacccacggcacgggctgcctggggtgggcgtgactaccagcctgcgtcctcctcaccacttcagcccaccctgcttcgtggccgcacttccagccgcaggcgctgctgaggcaccagccagattgtctcctgccattcccctagaggctttgagggacaaagccttgagaatgctgggagaggccgtacgggatggaggtcagcatgcaagagatccagttggcggatccgttgaattccagttcgttcccgttctcaagctcgtgagcaccctgctggtgatggggattttcggcgacgaggatgtgaaacagattctcaagatgattgagcccgaggtgtttactgaagaagaggaggaagaggacgaagaggaggagggagaggaagaagatgaagaagagaaggaggaggacgaggaggaaacagctcaggagaaagaggacgaggagaaggaggaggaagaagcagctgagggggaaaaggaggaaggcctagaggagggtctgctgcaaatgaagctgcctgagtctgtgaaacttcagatgtgccaccttctagagtatttctgcgatcaagagctgcagcatcgtgtggagtctctcgccgcatttgctgaaaggtatgtcgataaactccaggctaatcagaggtctcgctatggtctcctgatcaaagctttctccatgaccgcggcagagacagccaggcggacccgagagttccggagcccgcctcaggagcaaatcaacatgctgttgcagttcaaggatggaactgacgaagaggactgtccactacctgaagagatccgccaggacctcctcgactttcatcaagatctgctcgcgcactgcggaattcagctggatggggaggaagaggagcctgaggaagagacgaccctggggagccgtctgatgagcctactggagaaggtccgattagtaaagaagaaggaggagaagcccgaagaggaaagaagtgccgaggaatctaaacccagaagcctacaggaattggtgtcccatatggtggtccgctgggctcaggaggatttcgtacagagtcctgagctggtgagagccatgttttcactgttacatcggcagtacgatggactgggagagctactgcgggctctccctagagcctacaccatctctccttcctccgtcgaagacacaatgtctctcttggagtgtctcggccagattagaagcttgctgatcgttcagatgggccctcaggaggaaaacttaatgattcagtccatcggaaacatcatgaacaacaaagttttttaccagcatcccaacctgatgagagctctggggatgcacgagacggtaatggaagttatggttaatgttctagggggtggggaatcaaaggagatcagatttccaaaaatggtgaccagttgttgtcgctttttatgttacttctgccggatctctcgccagaatcagcggtctatgttcgaccacctatcttatctgctcgagaattccggaattgggctgggtatgcaaggaagtactcccttggatgtggctgcagcaagtgtaatcgacaataacgaactggcactggccttgcaagagcaggatctggagaaggtagtctcctacctcgctgggtgcgggttgcagtcttgtcctatgctcgtcgctaaaggatatccagacattggatggaacccttgcggaggcgaaagatatctggatttccttcgatttgctgtgttcgttaatggggagtctgtcgaggaaaacgccaacgtagtcgtgaggctcctcattcggaagcctgaatgtttcggacctgctctgagaggggaaggcggttccgggctgttggccgcaatcgaggaggctattcggatcagtgaggaccccgcacgggatggccctggtatccggcgtgaccgaagaagggagcactttggcgaggaacctccggaagagaaccgggtccacctcggccatgcaatcatgtcgttttatgccgcacttattgatctgctaggaagatgtgcaccagaaatgcacctcatacaggcaggcaagggggaagctctacggatccgagctattctgagaagcttggtgcctctggaggatctagttggaatcatctctttacccctgcagatcccaaccctgggcaaagatggggctctggtgcagcctaagatgtctgcttcttttgtgcccgatcacaaagccagcatggtgttatttctggaccgcgtttacggcatcgagaaccaggatttccttctgcacgtgctggacgtaggctttctgccggatatgcgcgctgctgcttcccttgatacagccacctttagtactactgagatggccctcgcactgaacaggtatttgtgcctggcggtgctcccactgatcactaaatgtgcacctctattcgcgggaacggagcaccgcgcaatcatggtcgattctatgctgcataccgtctacagactgagtcgcggacggagcctgactaaagcccagcgggacgtgattgaggattgcttgatgtctctatgccggtacattcgcccaagtatgttgcagcatttgttgagacggctggtgttcgatgttccaatcctcaacgagttcgctaagatgccgctgaagttgctgacaaaccactacgaacgatgctggaaatactactgtctgcctacagggtgggcgaatttcggagtcacatcggaggaggaattgcacctcactcgcaaactgttctggggtatcttcgattcacttgctcacaagaagtatgatccagagctgtatcgtatggccatgccatgtttatgtgccattgccggtgccctaccgcctgactacgtggacgcatcctactcaagtaaggctgagaaaaaggctacggtagatgcggaaggtaatttcgaccccagacctgttgaaaccctgaatgtaattattcccgagaaattggactcctttatcaacaagtttgcagagtacacacacgagaagtgggccttcgataagatacaaaataattggagctacggggaaaacatcgatgaagaacttaaaacccacccaatgctacgaccctacaagaccttttccgagaaggataaggaaatctatcggtggcctatcaaggagtcactgaaggccatgattgcctgggaatggacgattgagaaagccagagagggcgaggaagaaaagaccgagaaaaagaaaacgagaaagatttcccagtccgcccagacgtatgaccctagggaaggatataatccccagccacccgacctctcggctgtgaccctgtccagagaactacaggcaatggccgaacagctagctgagaactatcacaacacatggggaaggaaaaagaaacaggaactggaggcaaaggggggtggaacccatcctctgctggtcccgtatgacacactgacggcaaaagaaaaggccagggaccgggaaaaggcccaagaactgctcaaattccttcagatgaatggatatgccgtgacccggggtctgaaagacatggagttagattcaagctccattgaaaagcgctttgcttttggctttctccagcagctgctgcgctggatggatatatcccaggaattcatcgcacatttagaggccgtggtttccagcggcagggttgagaaatcgccccacgaacaagagatcaaattctttgccaaaatcctgcttccactcataaatcagtactttacaaatcactgtctgtatttcttgtcaacccccgctaaggtgctgggttctggaggtcacgcgagcaacaaggagaaagaaatgataacttcgttattttgtaagctggccgcattggtccgtcacagggtgtccttgtttggtaccgacgctccggcagtggtaaattgccttcatattctggctcgatctcttgatgcgaggacggtcatgaagagcgggcctgaaatcgtaaaggcgggtttgcgcagtttcttcgaatcagcatcagaagacatcgagaagatggtggaaaatctgcgtcttggtaaagtatctcaagcccgtacccaggtcaaaggcgtgggacagaacctgacttacaccaccgttgctctactgcctgtgctgactacactttttcagcacattgctcagcatcagttcggggatgacgtgattctggatgatgtgcaggtgagctgttacaggacactgtgctctatatactcgctgggaacgactaaaaatacttatgtcgagaagctgcggccagccttgggggagtgtctcgccaggctggccgctgctatgccagtcgccttcttagagccccagctgaatgagtacaacgcatgctcagtctacacaacaaagagccctcgcgagagggctattctggggctgcccaactcggtggaggagatgtgtccagacatacccgttctggagcggctgatggctgatatcggaggattggccgagtccggcgcacgctacacagagatgccccatgtaattgagataactctccccatgctatgtagctatctgccgcgatggtgggagagaggccctgaagcacccccatccgccctcccagccggagcgccacccccttgtacagcagtgacgagcgaccatcttaattctttactgggaaacattctgcgcatcatcgtgaacaacctgggcatcgatgaagctagttggatgaaaagattagcggtgttcgcacagccaattgtctcaagagcgagacctgaactgctgcagtcacacttcatcccaactatcggccgtctcagaaagagagccggaaaagtggtcagcgaggaggagcagctgagactcgaagctaaggcagaggcacaggagggtgagctgctcgtcagggatgagttttctgttttgtgtcgggatctttacgccttatatcccctgctcatccggtacgttgacaataaccgggcacagtggttgaccgagcctaatcctagcgcggaggagctttttcggatggttggggaaatctttatctactggtctaaaagccataatttcaagcgggaagaacagaactttgtcgtccaaaatgagataaacaatatgtctttcctcacggccgacaataagagtaaaatggcaaaggccggagatatacaaagtgggggaagtgaccaagaaagaacgaaaaaaaaaagacgcggtgaccggtattctgtgcaaactagtcttatcgtcgctacactgaaaaaaatgctgccaatcggattgaacatgtgcgcaccaactgatcaggatctcatcacactggccaaaacccgctacgcgctgaaagataccgacgaagaagttcgcgaatttcttcacaataacctgcatctccagggcaaggtggagggtagcccttccctacgctggcagatggcactgtataggggtgtccccggaagggaagaggatgccgacgacccggaaaaaattgtgcgcagagtgcaagaagtgtccgccgtcctgtattacctagatcaaaccgagcacccatacaagtctaagaaagcagtatggcacaagctgttatcaaagcagcgcaggagggcagtggtggcatgtttccggatgacccccctgtataacttgcccacccaccgtgcttgtaacatgtttctggagtcctacaaagcagcgtggatacttaccgaagaccactcttttgaagacagaatgatcgatgatctctcgaaggccggagaacaggaggaggaagaagaagaagtggaggagaagaagcccgaccctcttcaccagctggtcctgcatttcagcaggactgccttgacagagaaatctaagctggacgaagactacctgtacatggcatatgcagacattatggcaaaatcttgtcacctggaggagggcggagaaaacggcgaagccgaagaagaagtagaagtttccttcgaagaaaaacagatggaaaaacagcgcctcctgtaccagcaggcacgacttcacactagaggagctgcagaaatggtgctccagatgattagtgcatgtaagggcgagactggggctatggtatcctccacactcaaattgggtattagtatactgaatggcggtaacgcggaagtccagcagaaaatgttggattacctgaaagataagaaagaagttggcttctttcagagcattcaagcattaatgcaaacatgcagcgtactggatctgaatgcattcgagagacaaaataaagccgaagggcttggcatggtgaacgaagatggcactgtgattaatcggcagaacggagaaaaggtgatggcagacgacgaattcacccaggacctctttcgtttcctgcagcttctctgtgagggccataacaacgattttcagaattatctgcggactcagacagggaacacaaccactatcaacattatcatttgtacagtggactacttgcttcgcctgcaggagtcgatatcggacttctattggtattattccggtaaagacgtgatcgaggagcagggcaaaagaaacttctcaaaggcaatgagtgtggcaaagcaggttttcaattccctcaccgagtatattcaaggaccatgcactggtaaccaacagtcactggcccactcccgactgtgggacgctgtcgtcggtttcttacacgtgtttgcccatatgatgatgaagcttgcccaggattctagccagatcgagctgttaaaggagttgcttgacctgcaaaaggacatggtggtcatgctgctgtccctcctggaaggcaacgtcgtcaatgggatgatagccaggcagatggttgatatgctcgtagaaagttcatccaatgtcgagatgattctcaagttctttgatatgtttctaaagctgaaagatatcgtgggaagtgaagctttccaagattatgtgacggaccctcgcggtttgatcagcaagaaagatttccagaaggctatggactcccagaagcagttcagcgggcctgagatccagttcctgctgtcatgttctgaagctgatgaaaatgaaatgattaattgcgaagaattcgctaaccgattccaggaacccgcaagagacatcggattcaacgtggccgtccttctgacaaatttgagtgagcatgtgccccacgatccccgactccataattttttagaattggcagaatcgattctggagtatttcagaccttatctgggcaggattgaaattatgggagcctcccgcaggatagagagaatttattttgagatcagtgagacaaacagagctcagtgggagatgcctcaggttaaagagagcaaaagacaattcatttttgatgtcgtaaacgaaggaggcgaagccgagaaaatggaacttttcgtcagcttctgcgaagacaccatctttgagatgcaaatagccgcacaaattagtgaacccgaaggcgaacccgagacagatgaagatgagggagcaggtgctgcagaggcaggggctgaaggagccgaggaaggagctgctgggctagaaggtacagccgctacagccgctgctggggcaacagccagggtggtggcagctgccggtcgggcactccgcggactgagctaccgcagtttaagaaggcgtgtgcggagacttagacgcctgacagcccgtgaagctgccaccgccgttgcagctctgttatgggccgctgtgactcgcgctggcgctgccggagctggcgctgctgctggcgctctcggactcctttggggaagccttttcggaggcggactcgtggagggagccaaaaaggtgaccgtaacggagctcctcgcaggcatgccagacccaactagcgacgaggtgcatggtgagcaaccggctggccctgggggtgacgctgacggtgagggtgcctctgaaggcgctggagatgcagctgagggtgcgggtgatgaagaggaggctgtgcacgaggctgggccagggggagcagacggagcggttgccgtaacagatggtgggccttttaggccagagggggcaggcggtctgggggatatgggcgacactaccccggctgaaccaccaacccctgagggctcccctatcctgaaacgcaagctgggagtagatggcgtggaggaggagctgcccccagaaccagagcccgagccggaacccgagttagagcctgagaaagcggacgcagagaatggcgagaaggaagaggtccctgagcctacccctgaaccacccaagaagcaagcccctccctccccccctccgaaaaaagaagaggccggaggggagttttggggggagttggaagtgcagcgggttaagtttctcaactatctgtcacgaaacttctataccttaagatttttagcgctatttctggcatttgcgattaattttatcctcctgttctacaaagtgtccgactctcctccgggtgaggatgatatggaaggctctgctgctggtgatgtgtctggagctggtagtgggggaagcagcggctggggcttgggagctggggaagaagccgagggggacgaggacgagaatatggtttattacttcctggaggaatcaacaggctacatggaaccagctctgcgctgcctatctctgctgcacacactcgtggccttcctttgcataatcgggtacaattgcctcaaggtccctttggtcattttcaagcgtgagaaggagctagctaggaagctggagttcgacggcctctacatcacagaacagcctgaagatgatgacgtcaagggtcagtgggacagactcgtacttaataccccgtccttcccaagtaattactgggataagttcgtcaagcgcaaagtgcttgacaagcacggcgacatttacggaagagaacgaattgccgagctgctgggaatggatctggctactctggagataaccgcccataatgagagaaaacctaacccaccccctggcctactgacctggctgatgtcaattgacgtgaaataccagatatggaaatttggggtcatatttaccgacaattctttcctttatctggggtggtacatggttatgagtcttctaggacactataataacttcttctttgcagcccacctactggacatcgccatgggagttaagactctgaggactatcctttcaagtgtgactcataacggcaagcagctggttatgacagtgggtctgttggccgtggtggtgtacctgtatacagtggtggccttcaatttttttagaaagttctacaacaagagtgaggatgaggatgaacccgatatgaagtgtgatgatatgatgacttgttacctgttccatatgtacgtgggcgtgcgagcagggggaggcatcggggatgagatagaagatcctgctggcgatgaatacgaactgtaccgcgtcgtttttgatatcacattcttcttttttgtcatcgttatattgctggctattatccagggcctgatcatcgatgccttcggtgagctgagagaccagcaggagcaggtgaaagaggacatggaaaccaaatgctttatttgtggaatcggtagtgactactttgacactacgccccatggcttcgagacccatacactggaagagcacaacctggctaactatatgtttttcttgatgtacctgattaataaggacgaaacagaacacaccggccaggagtcttacgtgtggaaaatgtaccaagaacgctgctgggacttcttcccggctggcgactgcttcaggaagcagtacgaggatcaactctcttaa

SEQ ID NO: 12033 - DNA, 15102 bp, Artificial Sequence
  derived and/or modified sequence
atgggggacgctgagggcgaagatgaagtgcaattccttcgaacagacgacgaggtggttctacagtgttccgccaccgtgctgaaggagcagctgaagctgtgccttgctgccgagggtttcggcaacagattgtgtttcctggagcccacttccaatgcacagaacgtgccccctgatttggccatctgctgctttgtgttggagcagtcccttagtgtgcgggcactgcaggagatgttagctaataccgttgaggccggtgttgagagttcccaaggcggaggacatagaaccttgttgtacgggcatgccattctgttgagacacgcgcactctagaatgtacctatcttgcctgacgacatctcggtcgatgacggataagctggcttttgacgtgggtctgcaggaagatgccacaggcgaagcctgctggtggaccatgcacccggcaagcaagcagagatccgagggtgagaaggttagggtcggagatgacatcatcttggtatccgtgagctcggagaggtacttgcacctgtccaccgcttccggcgagctccaagttgatgcatcatttatgcagacattgtggaacatgaatccaatttgtagtagatgtgaggaggggtttgtcaccggtggccacgtcttgcgtttgttccacgggcatatggacgagtgtctcacaatctcccctgccgactcagatgaccaacgcagactggtgtactatgaaggaggcgctgtatgcacacacgcacgctccctttggaggctggagccactaaggatatcctggtctggatcccatcttcggtggggacaacctctgagagtccggcacgttacgactggccaatatttggccctcaccgaggaccaaggactagtcgtggtcgacgcaagtaaggcccacaccaaggccacttctttttgtttcagaatctcgaaggaaaaactcgacgtggcacctaagcgtgacgtcgaaggcatggggcctccagaaatcaaatatggagaatctctgtgctttgtgcagcacgtggcttccggtctgtggcttacatacgccgcacctgaccccaaagcactgcggctgggcgtactcaagaagaaggcaatgctacaccaggagggtcatatggatgatgcactaagcctgacccgttgccaacaggaagagagccaggctgctcggatgatacacagtaccaatggattatataaccagttcattaaaagcctggacagcttttcaggcaaaccgcgaggtagcggcccacctgcaggaaccgcgctacccattgagggggttatcctgagcttacaggacttaataatctacttcgagcccccaagcgaggacctgcagcatgaagaaaaacaaagcaagcttaggagcctcaggaaccgtcagagcctctttcaggaagaagggatgctgtccatggtgctgaattgtattgaccggttaaacgtctacaccactgctgctcacttcgccgaattcgccggagaggaagctgccgagagctggaaggagatcgtcaaccttctgtacgagctacttgcaagcctcattcggggtaatagatctaattgcgcactgttctcaaccaatctggactggttggtgtcaaagcttgatcgtctcgaagcctctagtggtattctcgaagtattgtattgcgtgctgatcgagtccccagaggtcttgaacatcatccaagaaaaccatatcaagtccataatatcactactggacaagcatggtcgaaaccataaggtgttggacgtgctgtgtagcctgtgtgtgtgtaacggcgtcgcggttcgatcgaatcaggaccttataacagaaaatttgcttccgggtcgcgagctcttattgcagacgaacctcatcaactacgtgacaagcatccggcctaatatcttcgttgggagggccgaggggacaactcagtatagcaagtggtactttgaagtcatggttgacgaggttacccctttcttaacagcacaggccactcatcttcgcgtgggatgggctcttaccgaaggatataccccgtaccccggtgcaggcgaggggtggggcggaaacggagtgggagatgacctttactcctatggcttcgatggcctccacctgtggacaggccacgttgccaggccggtgacaagcccgggtcagcacttgctggcgcctgaggacgtgatctcttgttgtcttgatttatcagtgccctccatctcattccgcatcaatgggtgccccgttcagggagttttcgagtctttcaacttggatggcctgttcttcccagttgtctctttctctgcaggcgttaaagtgaggtttctactgggtggccgacacggcgagttcaagttcctccctccgccagggtatgccccttgccatgaggctgtgctgcctcgcgaaaggcttcacctcgagcccatcaaggagtatagacgggagggccctagagggccacacctagtaggacctagtcgatgcctgagccacaccgatttcgtgccttgtccagtagatacagtgcagatagtactgccaccacatttggaacggatccgggagaaactggctgaaaatattcacgaactgtgggctttaacccggattgagcagggctggacgtatggccctgtgcgggacgataataaacgactgcatccatgtctggttgactttcactcactgcctgagcccgaaaggaactataacttgcagatgagtggcgagaccctcaaaactctgttagccctggggtgtcacgttggcatggctgatgaaaaggccgaagacaatctcaagaagacaaagctccccaagacctacatgatgtccaatggttataaacccgctcccctggacctttcccacgttagactgaccccagctcagacgacgctggtggatcgcctggccgaaaacggccataatgtttgggccagagatcgtgtagggcaggggtggagttacagcgccgttcaggatatcccagctcgtcggaatcccaggctagttccttataggctcctagacgaggcaacaaagaggtccaaccgcgattccttgtgccaagcagtcagaaccctactggggtatgggtataacattgaaccgcctgatcaggaaccatcacaggtcgagaaccaaagcagatgcgacagggttaggatcttcagggccgaaaagtcctacaccgttcagtctggccgatggtattttgagttcgaggccgtcaccacaggcgaaatgcgagtggggtgggccagacccgagctgcggccagacgtagaactcggagctgacgaattagcctacgtcttcaatgggcatcgtggccagcgttggcatttgggcagtgagccttttggcagaccatggcagcctggggatgtcgtgggctgcatgatcgacctgaccgaaaatactatcatcttcacccttaacggagaggttctgatgtcagacagcgggtctgaaaccgctttcagagaaatagagattggcgacggtttcctgcccgtttgtagcctaggcccaggacaggtgggccacctgaacctggggcaggacgtatcatccctcagattctttgccatttgtggcctgcaggagggctttgaaccatttgctatcaacatgcaacggccagtaacaacctggttctctaagggactcccacaattcgaacccgttccactcgagcacccccattacgaggtgagtcgggtggacggtacagtcgatacccccccttgtcttcgcctaacacatcgcacctgggggagccagaacagtctcgtcgaaatgcttttccttcgcctgtccctccccgtgcagttccaccagcatttccgctgtacggccggagccacacccttagccccacccggactgcagcctcccgctgaggacgaggccagagctgctgagccagatcccgattacgaaaaccttcgcagaagcgccggaggatggagtgaggcggaaaacggcaaggaaggaaccgcaaaagagggcgcaccaggcggaacaccgcaggctggcggtgaggcacagccagccagagccgaaaatgaaaaagacgccacgacagaaaagaataagaagcggggattcctgttcaaggctaagaaggtcgcgatgatgacacagcccccagctactcccactctccccagactgccccacgacgtcgtgccagctgacaatagggatgaccctgagatcatcctgaacactaccacctattactacagcgtgagagttttcgcgggtcaggagcccagttgcgtctgggccggttgggtgaccccagactaccatcagcatgatatgagttttgatctctctaaggtgcgcgtagtgaccgtcacaatgggcgatgagcaggggaacgtacattcctctcttaaatgttccaactgctacatggtttgggggggagactttgtgtctccaggacagcaggggaggatctcccacaccgacctcgttatcggatgtctggtggacctcgcaactggcctgatgacattcactgcaaatggcaaggagtctaacacttttttccaggtcgaaccaaacaccaagctgttcccagccgtgtttgttcttccaacccatcagaacgtgattcagtttgaactgggtaagcagaaaaacattatgccccttagtgcagctatgttccaatccgagaggaagaatccggcacctcaatgtccccctcgcttggagatgcagatgctgatgcccgtcagctggtctcggatgcctaatcatttcctgcaggttgagacccggagagcaggagaacgcctaggatgggcagtgcagtgtcaagagccattgactatgatggcactccacatcccagaggagaatcggtgtatggacatactggaactgagcgagcgccttgacctgcagagattccattctcataccctgcgcctctatagggctgtgtgtgccctgggcaacaatagagtcgcacacgcactgtgctcacatgtcgaccaggctcagttgctccacgcgcttgaagatgctcaccttccagggccactgcgggcaggatactacgacttactgatttctatacatctggagtcagcctgcagatcccgacggagcatgctctcggagtacattgttccactcacacccgagactagagctattaccctctttccacccggtaggtccacagaaaacgggcacccccgacatggcctgccgggagttggggtaactactagcctgcggcctccacaccacttttctccgccttgtttcgttgcagccttacctgccgctggcgctgccgaagcacccgctcgcctttctcctgccatccctctggaggccctccgcgacaaagctttgaggatgctcggagaggcagtgcgagatgggggtcagcatgccagggacccagtgggcggatctgtggagtttcagttcgtccccgttctgaagctggtttccacactgctcgttatgggcattttcggggacgaagatgtgaaacaaatcctaaagatgatcgagccagaagtctttaccgaggaagaagaggaggaggatgaagaggaagaaggcgaggaagaagacgaggaagaaaaggaagaagacgaagaggagacagcacaagagaaggaggacgaagaaaaagaagaagaagaggcagcggaaggggagaaggaagagggtttggaagagggtctgctgcagatgaaattgcctgaatccgtgaagttgcagatgtgccatctcttggaatacttctgtgatcaggagctgcaacatcgggtcgagtccttagcagcatttgccgagcggtacgtggataaacttcaggccaaccagcggagtagatatggcttactaattaaggccttctccatgaccgcagctgaaacagctcggcgaactagggaattccgctcgcccccacaagagcagattaacatgctcctgcagtttaaggacggtaccgatgaggaggattgccctttgcctgaagaaataagacaggacctgctcgacttccaccaggatctcctggcacactgtgggatccagttagatggagaggaagaagagcccgaagaagagaccacactagggtcaagactgatgtccctcctcgagaaggtgcgattggtcaaaaagaaggaagaaaaacccgaggaggagagatcagcagaggaaagcaaaccccgaagcctgcaggagctggtgtctcatatggtggtgaggtgggcccaggaggatttcgtgcagtcacccgagctggttcgggcaatgttctctctgctgcatagacagtacgacgggctgggcgagctgctgcgagcacttccaagagcatacactatttcgcccagcagcgtcgaggacaccatgagtttactggagtgtctgggccagatccggagcctgcttatagtgcaaatgggtccccaggaggaaaacctgatgatacaatctattggaaatattatgaacaataaggtcttctaccagcatcccaatctgatgcgtgcacttggcatgcacgagactgtgatggaggtaatggtcaacgtcctgggcggtggcgagtcaaaagaaatccggttccctaagatggtgacgtcctgttgcagattcctttgttatttttgcaggatctctcgtcagaaccagaggtctatgttcgatcatctcagctacttgctagaaaattccgggattggcctgggaatgcagggctctactccattagatgtggccgcagcatccgtgatagacaataatgaacttgcgcttgccttacaggaacaggatctggagaaggtagtgtcgtacctcgccggatgtggcctgcagtcgtgtccaatgctggtcgccaaaggctatcctgacattgggtggaatccctgcgggggtgaaaggtatctcgatttcttgcggtttgccgtgttcgtgaacggtgagagtgtggaagaaaacgctaatgtagtagtgagattgttaatccgaaaaccggaatgtttcgggccagccttgcgaggcgaggggggatcggggctcctcgcagcgattgaggaagcaatcagaattagcgaagatcccgcacgggacggcccaggcatacggagagatcggcgaagagagcacttcggtgaagaacctccagaagagaaccgggtacatttgggacacgccataatgtctttctacgccgcattaatagacctgctcggaagatgtgccccagagatgcacctgattcaggccggtaagggcgaagcacttagaatacgcgctatcctaaggtccttggtccctctcgaagatctcgtgggcattatctcactccccttacagattccaactttggggaaagacggcgcactggttcaacctaagatgtctgcatcttttgtgccggaccacaaggcaagtatggtgctcttcttagatcgagtgtatgggatcgaaaaccaagatttcttgctgcacgtgctggacgtgggttttctacctgacatgagggctgccgctagcctggacaccgctaccttctcaactaccgagatggcattagcacttaatcggtacctgtgtcttgccgtgctccctctaataacaaagtgcgcaccattgttcgccggtaccgaacatagagcaattatggttgactctatgctccacactgtctacagattgtccagaggcaggagcttaactaaagcccagcgggatgtaatcgaggattgcctgatgtccttgtgtcgttacatcagacctagcatgctgcaacacctgcttagaagactggtctttgatgttccaattttaaacgaattcgccaaaatgcctctgaagctccttacaaaccattacgagcggtgttggaaatattattgcctacccacggggtgggctaatttcggcgttacatcagaagaagagttgcacctgacacgcaaactgttttgggggatattcgattctttggcccacaagaaatatgaccccgagctctatagaatggccatgccgtgcttatgtgcgattgcaggtgctctgcccccagattatgtcgatgcctcttacagtagcaaggcagaaaaaaaggccacagtcgatgctgaaggaaattttgacccaaggcctgtcgagaccctcaacgtcattatccccgaaaagttggactctttcataaataaattcgcggagtatacacacgagaaatgggcatttgataagattcaaaataattggagttacggcgagaatatcgatgaagagctcaagacccaccctatgctccgaccttataagaccttttcagagaaggacaaagagatttatcgctggcccatcaaagaatcactgaaggccatgatagcttgggagtggaccatcgaaaaggccagggagggagaggaggaaaagaccgagaaaaagaaaaccaggaaaatttcccagtctgcccagacctacgaccccagagagggctataatcctcaaccaccagacctgagcgccgtgactctgtctcgagagttgcaggccatggccgaacagctcgcagagaattaccataatacatggggtcgaaagaagaagcaggaattagaagccaaaggcggaggaacacatcctctgctggttccatacgacaccttgactgcaaaggagaaagctagggacagagaaaaggcacaggagctcctcaagtttctgcagatgaacggttacgccgtaaccagaggactcaaggatatggagctggactcttcgtccattgaaaagcgctttgctttcggattcctacaacaactgcttcggtggatggatatctcccaggaatttattgcacatctcgaggcggtagtcagctctgggcgtgtcgagaagtcccctcacgagcaagaaatcaagttcttcgccaagatactcttgcctctaatcaaccagtactttactaatcattgcctgtatttcctgtctacccccgctaaggtcctgggctccggcggacatgcttctaacaaagaaaaagagatgattaccagcctgttttgcaagctcgcagccttagtgaggcatagggtctcacttttcgggactgatgcaccagccgtggtgaattgtctccatatcctggcaaggagcctggacgcacgcaccgtaatgaaatctggaccagaaatcgttaaggctggcctgcgtagcttttttgaatccgccagcgaggacatagaaaagatggtagagaacttaagactgggtaaggtgtcacaggcccgaactcaagtaaagggagtcggacagaacttgacctatacaactgttgccctgctgcccgtgctgacaacgctctttcagcacatcgctcaacatcagtttggggacgacgtgatcctggatgacgttcaggtaagttgctataggactctgtgttccatttattctttgggaacgaccaaaaacacctacgtggagaaactgagaccagctctgggagaatgcctggcccgactcgctgccgcaatgccagtagcttttctcgagccgcagctgaatgaatataatgcatgttcagtatacacgactaagagcccgagggagcgcgctatccttggcctgcctaattctgttgaggaaatgtgccctgatatacctgtgctcgaaaggcttatggcagacatagggggtcttgccgagtcaggagccagatataccgaaatgccacacgttattgagattacgttaccgatgctgtgcagctacctccctaggtggtgggagaggggccctgaggctcctccgagtgccctgcctgcgggagctccaccaccctgcactgcggtgacttcggaccaccttaatagcttattggggaatatcctccgcatcattgtgaataacctcggcatcgacgaggcatcctggatgaagagactggctgtgtttgctcagccaatagtaagcagggccagacccgaattattacagagccacttcatacccacaataggtcgactccgcaaacgcgcaggaaaagttgtgagtgaagaagagcagttgcgtttggaagcaaaagctgaggcccaggagggcgagctgctggtaagggatgagttcagtgtgttgtgccgcgatttgtacgcgctctatccactgctgatcagatatgtcgacaataatagggcccagtggctgacggaacccaacccttcagctgaggagctgtttcgcatggtgggcgagatttttatatactggtctaaatctcataacttcaagagggaggaacagaattttgtggtccagaatgaaatcaataatatgtccttcctgaccgctgataataaaagcaagatggcgaaagccggtgatatccagtccggtggcagtgatcaggagagaacaaagaaaaaacgacgaggggacagatatagcgtgcagaccagcctgatagtagccacattaaaaaagatgttgcctatcgggctgaatatgtgtgcacccaccgatcaagatctaatcacccttgccaagacaaggtatgccctcaaagacactgacgaggaggtccgcgaattcttgcataataacttgcacctgcagggtaaagttgaagggtcaccgtcactgagatggcagatggcattgtaccgtggggtgccagggagagaggaggatgctgatgatcctgagaagattgtgcgccgagtgcaggaggtatctgcagtgttgtactacctcgatcagacggagcatccgtataagagtaagaaggcagtctggcataagctgttatctaagcagagacggagggccgttgtcgcgtgttttcgcatgacccctctgtataatctgccgacacaccgcgcttgcaatatgttcctagaatcttacaaagcggcttggattctcaccgaggaccactctttcgaggacaggatgatcgacgatctgtccaaagcaggcgagcaagaagaggaagaggaggaggtggaagaaaagaaacccgaccctctgcaccagctggtcctgcacttcagcaggacagcactgaccgagaaatcgaagcttgacgaggactacctatacatggcctacgctgatatcatggccaagtcatgtcacctggaagagggcggagagaatggcgaagctgaggaggaggtggaggtgtccttcgaggaaaaacagatggagaaacaacggctgttgtatcagcaagcacgtctacacactcgcggagcggctgagatggtgctccagatgatttcggcctgtaaaggcgagaccggggcaatggtgagttcaacactgaaactcggtattagcattctgaacggaggcaacgcggaggtgcagcagaaaatgcttgattacctaaaagacaaaaaagaagtgggtttttttcagagcatccaggccctgatgcagacctgtagcgtgctggaccttaatgccttcgagcgacaaaataaagccgagggcctggggatggtaaatgaggacggaaccgtaggcgaaaaggtgatggctgatgacgaatttacacaagacctgtttcgatttctccagttgctctgtgaaggacacaataacgactttcaaaattatctgagaacccagacgggtaacacaacaacaatcaacattataatttgcactgtcgactatctcctcagactccaggaaagcatcagtgacttctattggtattattccggaaaagatgtgatcgaggaacaagggaaacgtaacttctctaaagctatgtccgttgccaaacaagtgtttaatagcttaactgagtatattcaaggtccctgcacaggaaaccaacagagtctggcgcactcacgcctgtgggatgccgtcgttggatttctgcatgtttttgcccatatgatgatgaagttagctcaggacagttcccagatcgagcttctcaaagaacttcttgacctgcagaaagatatggtggtaatgttgctgtctctcctcgagggaaacgtcgtgaacggaatgattgccagacaaatggtggacatgcttgtggaatccagcagtaacgtggagatgattttaaaattcttcgatatgtttttaaaattaaaagacattgtgggaagcgaagcgttccaagattacgtgactgaccccagaggattaatctcaaagaaagattttcagaaagccatggactcacagaagcagtttagtggccctgagattcagttcttgttgagctgctctgaagcggacgagaacgaaatgatcaattgtgaggagtttgccaatcgctttcaggaacctgcacgagacattggctttaacgttgctgtcctgctcactaacctgtcagaacacgtaccccacgacccaaggctgcacaatttcctggagctcgctgaaagcattcttgagtacttccgcccatatctgggcaggatcgagatcatgggagcttcacggcgtatcgagagaatttattttgaaatctccgagaccaaccgggctcagtgggaaatgccccaggtaaaagagagtaaacggcagtttattttcgatgtcgtcaacgaggggggagaagccgaaaaaatggagctgtttgtaagtttctgtgaggatacaatcttcgaaatgcaaatagcggctcagatcagtgagcccgagggcgaaccggagacagatgaagatgaaggagcgggagcagccgaagccggagccgagggagccgaagaaggggcagcaggacttgagggaacagctgccaccgccgctgccggagctacagcacgagtcgtggctgcggctgggagggccctgcgtggtctgtcctatcggtctctgaggcggcgagttcgtcgcctgcggagactgacggccagagaggcagcaaccgctgtggccgcattactgtgggcggctgttactcgagcaggcgctgccggagccggtgccgctgcaggagcccttggcttgctgtggggttcactgttcggtggcggtctggtggagggcgctaaaaaagtgactgtcacagaactgctcgccggtatgcccgatccaacgtctgatgaggtgcacggcgaacagcctgctggcccaggaggagatgcggacggcgagggcgcttccgagggggctggagacgccgcagagggggctggtgacgaggaggaagctgtccatgaagccggtccaggaggggctgatggtgccgtcgccgtgactgatggcggaccctttcgtcctgaaggggctggcggactcggcgatatgggcgatactaccccagccgaaccacccacccccgaaggatcccctattttaaaaaggaaactgggagtagatggcgtagaagaagagcttcccccagagcccgaaccagagcctgaaccggagctcgagccagaaaaggccgacgcagagaatggggagaaggaggaggtgccagaaccaactccagagcccccaaaaaagcaggcccctccgagtccacctccaaagaaagaggaagctggcggagaattttggggagagctggaagtgcaacgagtgaagtttctaaattacctctcccgcaacttttacacactgcgtttcctggctcttttcctcgcctttgctattaattttatccttctattttataaggtcagcgatagccctcctggggaggacgatatggagggcagtgctgcgggagacgtatcaggcgcaggcagcgggggtagtagcggttgggggttgggcgctggggaggaggcagagggggacgaggacgagaacatggtttattactttctagaggaaagcactggctatatggagcccgcacttaggtgtttgtcccttcttcataccttggtggcctttctgtgtattattgggtataattgcctgaaggtgccactcgtgatctttaagcgggagaaggaactcgcaagaaaactggagtttgacggcctttacatcaccgaacagcccgaagatgacgatgtcaagggccagtgggacaggcttgtgctgaataccccctccttcccaagcaattactgggataagtttgtcaaacgaaaggtcctggacaagcatggtgacatttatggacgggagcgcatagccgaattgcttggcatggacttggccacgctggaaatcacagcccacaatgagcggaaacccaatcctccccctggcttgcttacatggcttatgtcgatcgacgtgaaataccagatttggaagtttggagtgatttttacagataactcttttctctatcttggatggtatatggtgatgtcactactcggacattacaacaatttcttcttcgctgcacacctgctggacattgcaatgggcgtaaagaccctacgaactatcctgtcgtctgtaacccataacgggaagcaacttgtcatgactgtggggctcctggcagtcgtggtctacctatatacagtcgtggccttcaattttttccgcaagttctataataaatctgaggacgaggatgaacccgatatgaaatgtgatgatatgatgacttgttatctgttccatatgtatgtgggagtccgcgcaggcggaggcattggagacgaaattgaggatcccgcaggagatgagtatgaactgtatagagtcgtgttcgatataaccttctttttttttgtgatcgttatcctcttagcaatcatccagggactaatcattgacgcattcggggaattaagagatcagcaggagcaggtcaaggaggatatggaaaccaaatgcttcatatgcggcattgggagcgattacttcgacaccactcctcacgggtttgagacacacactctggaagaacacaatctcgctaactacatgttttttctaatgtacttaatcaacaaagacgagactgagcataccggccaggaatcatatgtttggaagatgtatcaggagaggtgttgggacttcttccctgcaggagactgctttcggaaacagtacgaggaccagctctcatag

SEQ ID NO: 12034 - DNA, 2031 bp, Artificial Sequence
  derived and/or modified sequence
atgaaaagcggccctgaaattgtcaaggcgggtttgcgttccttttttgagtctgcttctgaggacattgaaaaaatggtggaaaatctcaggctcggtaaggtcagtcaggctaggacccaggttaagggtgtgggccagaaccttacatacaccaccgttgcactgctgcctgtacttactaccctgtttcagcacattgcccagcaccaattcggtgacgatgtgatcttggatgatgtgcaggtcagctgctaccggacactgtgttctatttattctcttgggacaacaaaaaatacatatgttgagaaactcaggcctgcccttggagagtgccttgctcgactggcggctgcaatgcctgtggcttttctcgagcctcagctcaacgagtataatgcttgttctgtgtatacaacgaagtctccccgagagcgtgcaatacttggactgcccaacagtgttgaggaaatgtgccctgatattcctgtcttggagcgtctaatggcagacattggcggtctcgctgagagtggggcacgctataccgaaatgccacacgtaatagagataacgctcccgatgctgtgttcctacctccccaggtggtgggaaagaggacctgaagcacctcccagtgccctccccgcaggagcccctcccccttgtacagccgtgaccagtgaccaccttaactccttactgggaaatatactcaggatcatcgtgaataacttgggcattgacgaggcaagctggatgaagagacttgcggtctttgctcagccgatcgtgtctcgcgctcgtcccgaacttcttcaaagccactttataccaacgatcggaaggcttcgtaagcgcgctggtaaagtggtgagtgaggaggaacaactccgactcgaagctaaggccgaggcgcaggagggggagctgctcgtccgggatgagttctcagtgttgtgccgggatctgtacgctctgtacccgcttcttattcgctacgtcgataataaccgcgctcagtggctgaccgaacccaaccccagcgctgaggagctgtttagaatggtgggcgagatttttatctactggtctaaatcccacaactttaagcgggaggaacagaatttcgtggtccagaatgaaataaacaatatgagttttttaactgccgataataagagtaaaatggcgaaagcgggtgatattcagtctggaggctctgatcaggaaagaacaaagaagaagagacgcggagatagatacagtgttcaaacaagcctgatcgtggccactttgaagaaaatgctgccgattgggcttaacatgtgtgcccctactgatcaggatttaattacactggcaaagactaggtatgctctgaaggacaccgatgaggaggtgcgggagttccttcataataacctgcacctgcaagggaaagtcgagggaagcccctccttgcggtggcagatggctctctaccggggagttcccggtcgggaagaagacgctgacgatcccgagaagattgtccggcgagtacaggaggtgagcgcggtattgtactatctcgaccagaccgaacacccgtataaatctaagaaagcggtctggcacaagctgctcagcaagcagcggagaagagctgtggtcgcctgctttcggatgacgcctctttacaacttgcctactcaccgagcctgtaatatgtttctagaatcctataaggcagcctggattctgaccgaggaccactcctttgaggaccggatgatagacgacctatccaaggctggcgagcaggaggaggaggaagaggaggtagaggagaagaagccagatcccctccaccagttggtactccattttagccggacagctctgaccgagaagtccaaactagacgaagattatttgtatatggcatatgccgacatcatggcaaagtcttgtcacctggaagaaggtggggagaatggggaggctgaagaagaagtagaagtttcattcgaggaaaaacagtag

SEQ ID NO: 12035 - DNA, 15391 bp, Artificial Sequence
  derived and/or modified sequence
tctacctcgcgggtgcctctggtgtctccagaggtctccgaccccagcccgcccccagccctcccgcccagcccgcagccccctccctctgttccccgacctcagaccctgggcttccgacctcgacatcatgggtgacgcagaaggcgaagacgaggtccagttcctgcggacggacgatgaggtggtcctgcagtgcagcgctaccgtgctcaaggagcagctcaagctctgcctggccgccgagggcttcggcaaccgcctgtgcttcctggagcccactagcaacgcgcagaatgtgccccccgatctggccatctgttgcttcgtcctggagcagtccctgtctgtgcgagccctgcaggagatgctggctaacacggtggaggctggcgtggagtcatcccagggcgggggacacaggacgctcctgtatggccatgccatcctgctccggcatgcacacagccgcatgtatctgagctgcctcaccacctcccgctccatgactgacaagctggccttcgatgtgggactgcaggaggacgcaacaggagaggcttgctggtggaccatgcacccagcctccaagcagaggtctgaaggagaaaaggtccgcgttggggatgacatcatccttgtcagtgtctcctccgagcgctacctgcacctgtcgaccgccagtggggagctccaggttgacgcttccttcatgcagacactatggaacatgaaccccatctgctcccgctgcgaagagggcttcgtgacgggaggtcacgtcctccgcctctttcatggacatatggatgagtgtctgaccatttcccctgctgacagtgatgaccagcgcagacttgtctactatgaggggggagctgtgtgcactcatgcccgctccctctggaggctggagccactgagaatcagctggagtgggagccacctgcgctggggccagccactccgagtccggcatgtcactaccgggcagtacctagcgctcaccgaggaccagggcctggtggtggttgacgccagcaaggctcacaccaaggctacctccttctgcttccgcatctccaaggagaagctggatgtggcccccaagcgggatgtggagggcatgggcccccctgagatcaagtacggggagtcactgtgcttcgtgcagcatgtggcctcaggactgtggctcacctatgctgctccagaccccaaggccctgcggctcggcgtgctcaagaagaaggccatgctgcaccaggagggccacatggacgacgcactgtcgctgacccgctgccagcaggaggagtcccaggccgcccgcatgatccacagcaccaatggcctatacaaccagttcatcaagagcctggacagcttcagcgggaagccacggggctcggggccacccgctggcacggcgctgcccatcgagggcgttatcctgagcctgcaggacctcatcatctacttcgagcctccctccgaggacttgcagcacgaggagaagcagagcaagctgcgaagcctgcgcaaccgccagagcctcttccaggaggaggggatgctctccatggtcctgaattgcatagaccgcctaaatgtctacaccactgctgcccactttgctgagtttgcaggggaggaggcagccgagtcctggaaagagattgtgaatcttctctatgaactcctagcttctctaatccgtggcaatcgtagcaactgtgccctcttctccacaaacttggactggctggtcagcaagctggatcggctggaggcctcgtctggcatcctggaggtcctgtactgtgtcctcattgagagtccagaggttctgaacatcatccaggagaatcacatcaagtccatcatctccctcctggacaagcatgggaggaaccacaaggtcctggacgtgctatgctccctgtgtgtgtgtaatggtgtggctgtacgctccaaccaagatcttattactgagaacttgctgcctggccgtgagcttctgctgcagacaaacctcatcaactatgtcaccagcatccgccccaacatctttgtgggccgagcggaaggcaccacgcagtacagcaaatggtactttgaggtgatggtggacgaggtgactccatttctgacagctcaggccacccacttgcgggtgggctgggccctcaccgagggctacaccccctaccctggggccggcgagggctggggcggcaacggggtcggcgatgacctctattcctacggctttgatggactgcatctctggacaggacacgtggcacgcccagtgacttccccagggcagcacctcctggcccctgaagacgtgatcagctgctgcctggacctcagcgtgccgtccatctccttccgcatcaacggctgccccgtgcagggtgtctttgagtccttcaacctggacgggctcttcttccctgttgtcagcttctcggctggtgtcaaggtgcggttcctccttggtggccgccatggtgaattcaagttcctgcccccacctggctatgctccatgccatgaggctgtgctccctcgagagcgactccatcttgaacccatcaaggagtatcgacgggaggggccccgggggcctcacctggtgggccccagtcgctgcctctcacacaccgacttcgtgccctgccctgtggacactgtccagattgtcctgccgccccatctggagcgcattcgggagaagctggcggagaacatccacgagctctgggcgctaacccgcatcgagcagggctggacctacggcccggttcgggatgacaacaagaggctgcacccgtgtcttgtggacttccacagccttccagagcctgagaggaactacaacctgcagatgtctggggagacgctcaagactctgctggctctgggctgccacgtgggcatggcggatgagaaggcggaggacaacctgaagaagacaaaactccccaagacgtatatgatgagcaatgggtacaagccggctccgctggacctgagccacgtgcggctgacgccggcgcagacgacactggtggaccgtctggcagaaaatgggcacaacgtgtgggcccgagaccgcgtgggccagggctggagctacagcgcagtgcaggacatcccagcgcgccgaaaccctcggctggtgccctaccgcctgctggatgaagccaccaagcgcagcaaccgggacagcctctgccaggccgtgcgcaccctcctgggctacggctacaacatcgagcctcctgaccaggagcccagtcaggtggagaaccagtctcgttgtgaccgggtgcgcatcttccgggcagagaaatcctatacagtgcagagcggccgctggtacttcgagtttgaagcagtcaccacaggcgagatgcgcgtgggctgggcgaggcccgagctgaggcctgatgtagagctgggagctgacgagctggcctatgtcttcaatgggcaccgcggccagcgctggcacttgggcagtgaaccatttgggcgcccctggcagccgggcgatgtcgttggctgtatgatcgacctcacagagaacaccattatcttcaccctcaatggcgaggtcctcatgtctgactcaggctccgaaacagccttccgggagattgagattggggacggcttcctgcccgtctgcagcttgggacctggccaggtgggtcatctgaacctgggccaggacgtgagctctctgaggttctttgccatctgtggcctccaggaaggcttcgagccatttgccatcaacatgcagcgcccagtcaccacctggttcagcaaaggcctgccccagtttgagccagtgccccttgaacaccctcactatgaggtatcccgagtggacggcactgtggacacgcccccctgcctgcgcctgacccaccgcacctggggctcccagaacagcctggtggagatgcttttcctgcggctgagcctcccagtccagttccaccagcacttccgctgcactgcaggggccaccccgctggcacctcctggcctgcagccccccgccgaggacgaggcccgggcggcggaacccgaccctgactacgaaaacctgcgccgctcagctgggggctggagcgaggcagagaacggcaaagaagggactgcgaaggagggcgcccccgggggcaccccgcaggcggggggagaggcgcagcccgccagggcggagaatgagaaggatgccaccaccgagaagaacaagaagagaggcttcttattcaaggccaagaaggtcgccatgatgacccagccaccggccacccccacgctgccccgactccctcacgacgtggtgcctgcagacaaccgcgatgaccccgagatcatcctcaacaccaccacgtactattactccgtgagggtctttgctggacaggagcccagctgcgtgtgggcgggctgggtcacccctgactaccatcagcacgacatgagcttcgacctcagcaaggtccgggtcgtgacggtgaccatgggggatgaacaaggcaacgtccacagcagcctcaagtgtagcaactgctacatggtgtggggcggagactttgtgagtcccgggcagcagggccggatcagccacacggaccttgtcattgggtgcctggtggacttggccactggcttaatgacctttacagccaatggcaaagagagcaacacctttttccaggtggaacccaacactaagctatttcctgccgtcttcgtcctgcccacccaccagaacgtcatccagtttgagctggggaagcagaagaacatcatgccgttgtcagccgccatgttccaaagcgagcgcaagaacccggccccgcagtgcccaccgcggctggagatgcagatgctgatgccagtgtcctggagccgcatgcccaaccacttcctgcaggtggagacgaggcgtgccggcgagcggctgggctgggccgtgcagtgccaggagccgctgaccatgatggcgctgcacatccccgaggagaaccggtgcatggacatcctggagctgtcggagcgcctggacctgcagcgcttccactcgcacaccctgcgcctctaccgcgctgtgtgcgccctgggcaacaatcgcgtggcgcacgctctgtgcagccacgtagaccaagctcagctgctgcacgccctggaggacgcgcacctgccaggcccactgcgcgcaggctactatgacctcctcatcagcatccacctcgaaagtgcctgccgcagccgccgctccatgctctctgaatacatcgtgcccctcacgcctgagacccgcgccatcacgctcttccctcctggaaggagcacagaaaatggtcacccccggcatggcctgccgggagttggagtcaccacttcgctgaggcccccgcatcatttctcgcccccctgtttcgtggccgctctgccagctgctggggcagcagaggccccggcccgcctcagccctgccatcccgctggaggccctgcgggacaaggcactgaggatgctgggggaggcggtgcgcgacggtgggcagcacgctcgcgaccccgtcgggggctccgtggagttccagtttgtgcctgtgctcaagctcgtgtccaccctgctggtgatgggcatctttggcgatgaggatgtgaaacagatcttgaagatgattgagcctgaggtcttcactgaggaagaagaggaggaggacgaggaggaagagggtgaagaggaagatgaggaggagaaggaggaggatgaggaggaaacagcacaggaaaaggaagatgaggaaaaagaggaagaggaggcagcagaaggggagaaagaagaaggcttggaggaagggctgctccagatgaagttgccagagtctgtgaagttacagatgtgccacctgctggagtatttctgtgaccaagagctgcagcaccgtgtggagtccctggcagcctttgcggagcgctatgtggacaagctccaggccaaccagcggagccgctatggcctcctcataaaagccttcagcatgaccgcagcagagactgcaagacgtacccgcgagttccgctccccaccccaggaacagatcaatatgctattgcaattcaaagatggtacagatgaggaagactgtcctctccctgaagagattcgacaggatttgcttgactttcatcaagacctgctggcacactgtggaattcagctagatggagaggaggaggaaccagaggaagagaccaccctgggcagccgcctcatgagcctgttggagaaagtgcggctggtgaagaagaaggaagagaaacctgaggaggagcggtcagcagaggagagcaaaccccggtccctgcaggagctggtgtcccacatggtggtgcgctgggcccaagaggacttcgtgcagagccccgagctggtgcgggccatgttcagcctcctgcaccggcagtacgacgggctgggtgagctgctgcgtgccctgccgcgggcgtacaccatctcaccgtcctccgtggaagacaccatgagcctgctcgagtgcctcggccagatccgctcgctgctcatcgtgcagatgggcccccaggaggagaacctcatgatccagagcatcgggaacatcatgaacaacaaagtcttctaccaacacccgaacctgatgagggcgctgggcatgcacgagacggtcatggaggtcatggtcaacgtcctcgggggcggcgagtccaaggagatccgcttccccaagatggtgacaagctgctgccgcttcctctgctatttctgccgaatcagccggcagaaccagcgctccatgtttgaccacctgagctacctgctggagaacagtggcatcggcctgggcatgcagggctccacgcccctggacgtggctgctgcctccgtcattgacaacaatgagctggccttggcattgcaggagcaggacctggaaaaggttgtgtcctacctggcaggctgtggcctccagagctgccccatgcttgtggccaaagggtacccagacattggctggaacccctgtggtggagagcgctacctggacttcctgcgctttgctgtcttcgtcaacggcgagagcgtggaggagaacgccaatgtggtggtgcggctgctcatccggaagcctgagtgcttcggacccgccctgcggggtgagggtggctcagggctgctggctgccatcgaagaggccatccgcatctccgaggaccctgcgagggatggcccaggcatccgcagggaccggcggcgcgagcactttggtgaggaaccgcctgaagaaaaccgggtgcacctgggacacgccatcatgtccttctatgccgccttgatcgacctgctcggacgctgtgcaccagagatgcatctaatccaagccggcaagggtgaggccctgcggatccgcgccatcctccgctcccttgtgcccttggaggaccttgtgggcatcatcagcctcccactgcagattcccaccctgggcaaagatggggctctggtgcagccaaagatgtcagcatccttcgtgccggaccacaaggcgtccatggtgctcttcctggaccgtgtgtatggcatcgagaaccaggacttcttgctgcacgtgctggacgtggggttcctgcccgacatgagggcagccgcctcgctggacacggccactttcagcaccaccgagatggcgctggcgctgaaccgctacctgtgcctggccgtgctgccgctcatcaccaagtgtgcgccgctctttgcgggcacagaacaccgcgccatcatggtggactctatgctgcataccgtgtaccgcctgtctcggggtcgttcgctcaccaaggcgcagcgtgacgtcatcgaggactgcctcatgtcgctctgcaggtacatccgcccgtcgatgctgcagcacctgttgcgccgcctggtgttcgacgtgcccatcctcaacgagttcgccaagatgccactcaagctcctcaccaaccactatgagcgctgttggaagtactactgcctacccacgggctgggccaacttcggggtcacctcagaggaggagctgcacctcacacggaaactcttctggggcatctttgactctctggcccataagaaatacgacccggagctgtaccgcatggccatgccttgtctgtgcgccattgccggggctctgccccccgactatgtggatgcctcatactcatctaaggcagagaaaaaggccacagtggatgctgaaggcaactttgatccccggcctgtggagaccctcaatgtgatcatcccggagaagctggactccttcattaacaagtttgcggagtacacacacgagaagtgggccttcgacaagatccagaacaactggtcctatggagagaacatagacgaggagctgaagacccaccccatgctgaggccctacaagaccttttcagagaaggacaaagagatttaccgctggcccatcaaggagtccctgaaggccatgattgcctgggaatggacgatagagaaggccagggagggtgaggaggagaagacggaaaagaaaaaaacgcggaagatatcacaaagtgcccagacctatgatcctcgagaaggctacaaccctcagccccccgaccttagtgctgttaccctgtcccgggagctgcaggccatggcagaacaactggcagaaaattaccacaacacgtggggacggaagaagaagcaggagctggaagccaaaggcggtgggacccaccccctgctggtcccctacgacacgctcacggccaaggagaaggcacgagatcgagagaaggcccaggagctactgaaattcctgcagatgaatggctacgcggttacaagaggccttaaggacatggaactggactcgtcttccattgaaaagcggtttgcctttggcttcctgcagcagctgctgcgctggatggacatttctcaggagttcattgcccacctggaggctgtggtcagcagtgggcgagtggaaaagtccccacatgaacaggagattaaattctttgccaagatcctgctccctttgatcaaccagtacttcaccaaccactgcctctatttcttgtccactccggctaaagtgctgggcagcggtggccacgcctctaacaaggagaaggaaatgatcaccagcctcttctgcaaacttgctgctctcgtccgccaccgagtctctctctttgggacagacgccccagctgtggtcaactgtcttcacatcctggcccgctccctggatgccaggacagtgatgaagtcaggccctgagatcgtgaaggctggcctccgctccttcttcgagagtgcctcggaggacatcgagaagatggtggagaacctgcggctgggcaaggtgtcgcaggcgcgcacccaggtgaaaggcgtgggccagaacctcacctacaccactgtggcactgctgccggtcctcaccaccctcttccagcacatcgcccagcaccagttcggagatgacgtcatcctggacgacgtccaggtctcttgctaccgaacgctgtgcagtatctactccctgggaaccaccaagaacacttatgtggaaaagcttcggccagccctcggggagtgcctggcccgtctggcagcagccatgccggtggcgttcctggagccgcagctgaacgagtacaacgcctgctccgtgtacaccaccaagtctccgcgggagcgggccatcctggggctccccaacagtgtggaggagatgtgtcccgacatcccggtgctggagcggctcatggcagacattggggggctggccgagtcaggtgcccgctacacagagatgccgcatgtcatcgagatcacgctgcccatgctatgcagctacctgccccgatggtgggagcgcgggcccgaggcacccccttccgccctgcccgccggcgcccccccaccctgcacagctgtcacctctgaccacctcaactccctgctggggaatatcctgagaatcatcgtcaacaacctgggcattgacgaggcctcctggatgaagcggctggctgtgttcgcacagcccattgtgagccgtgcacggccggagctcctgcagtcccacttcatcccaactatcgggcggctgcgcaagagggcagggaaggtggtgtccgaggaggagcagctgcgcctggaggccaaggcggaggcccaggagggcgagctgctggtgcgggacgagttctctgtgctctgccgggacctctacgccctgtatccgctgctcatccgctacgtggacaacaacagggcgcagtggctgacggagccgaatcccagcgcggaggagctgttcaggatggtgggcgagatcttcatctactggtccaagtcccacaacttcaagcgcgaggagcagaactttgtggtccagaatgagatcaacaacatgtccttcctgactgctgacaacaaaagcaaaatggctaaggcgggagatatacagtccggtggctcggaccaggaacgcaccaagaagaagcgccggggggaccggtactctgtgcagacgtcactgatcgtggccacactgaagaagatgctgcccatcggcctgaatatgtgtgcgcccaccgaccaagacctcatcacgctggccaagacccgttacgccctgaaagacacagatgaggaggtccgggaatttctgcacaacaaccttcaccttcagggaaaggtcgaaggctccccgtctctgcgctggcagatggctctgtaccggggcgtcccgggtcgcgaggaggacgccgatgaccccgagaaaatcgtgcgcagagtccaggaagtgtcagccgtgctctactacctggaccagaccgagcacccttacaagtctaagaaggccgtgtggcacaagcttttgtccaaacagcgccggcgggcagtcgtggcctgtttccgtatgacgcccctgtacaacctgcccacgcaccgggcatgtaacatgttcctggagagctacaaggctgcatggatcctgactgaagaccacagttttgaggaccgcatgatagatgacctttcaaaagctggggagcaggaggaggaggaggaagaggtggaagagaagaagccagaccccctgcaccagttggtcctgcacttcagccgcactgccctgacggaaaagagcaaactggatgaggattacctgtacatggcctatgctgatatcatggcaaagagctgccacctggaggagggaggggagaacggtgaagctgaagaggaggttgaggtctcctttgaggagaaacagatggagaagcagaggctcttgtaccagcaagcacggctgcacacccggggggcggccgagatggtgctgcagatgatcagtgcctgcaaaggagagacaggtgccatggtgtcctccaccctgaagctgggcatctccatcctcaatggaggcaatgctgaggtccagcagaaaatgctggattatcttaaggacaagaaggaagttggcttcttccagagtatccaggcactgatgcaaacatgcagcgtcctggatctcaatgcctttgagagacagaacaaggccgaggggctgggcatggtgaatgaggatggcactgtcatcaatcgccagaacggagagaaggtcatggcggatgatgaattcacacaagacctgttccgattcctacaattgctctgtgaggggcacaataatgatttccagaactacctacggacacagacagggaacacgaccactattaacatcatcatttgcactgtggactacctcctgcggctgcaggaatccatcagcgacttctactggtactactcgggcaaggatgtcattgaagagcagggcaagaggaacttctccaaagccatgtcggtggctaagcaggtgttcaacagcctcactgagtacatccagggtccctgcaccgggaaccagcagagcctggcgcacagtcgcctatgggacgcagtggtgggattcctgcacgtgttcgcccacatgatgatgaagctcgctcaggactcaagccagatcgagctgctgaaggagctgctggatctgcagaaggacatggtggtgatgttgctgtcgctactagaagggaacgtggtgaacggcatgatcgcccggcagatggtggacatgctcgtggaatcctcatccaatgtggagatgatcctcaagttcttcgacatgttcctgaaactcaaggacattgtgggctctgaagccttccaggactacgtaacggatccccgtggcctcatctccaagaaggacttccagaaggccatggacagccagaagcagttcagcggtccagaaatccagttcctgctttcgtgctccgaagcggatgagaacgaaatgatcaactgcgaagagttcgccaaccgcttccaggagccagcacgcgacatcggcttcaacgtggcggtgctgctgaccaacctgtcggagcatgtgccgcatgaccctcgcctgcacaacttcctggagctggccgagagcatccttgagtacttccgcccctacctgggccgcatcgagatcatgggcgcgtcacgccgcatcgagcgcatctacttcgagatctcagagaccaaccgcgcccagtgggagatgccccaggtgaaggagtccaagcgccagttcatcttcgacgtggtgaacgagggcggcgaggctgagaagatggagctcttcgtgagtttctgcgaggacaccatcttcgagatgcagatcgccgcgcagatctcggagcccgagggcgagccggagaccgacgaggacgagggcgcgggcgcggcggaggcgggcgcggaaggcgcggaggagggcgcggcggggctcgagggcacggcggccacggcggcggcgggggcgacggcgcgggttgtggcggccgcaggccgggccctgcgaggcctcagctaccgcagcctgcggcggcgcgtgcggcggctgcggcggcttacggcccgcgaggcggccaccgcagtggcggcgctgctctgggcagcagtgacgcgcgctggggccgctggcgcgggggcggcggcgggcgcgctgggcctgctctggggctcgctgttcggcggcggcctggtggagggcgccaagaaggtgacggtgaccgagctcctggcaggcatgcccgaccccaccagcgacgaggtgcacggcgagcagccggccgggccgggcggagacgcagacggcgagggtgccagcgagggcgctggagacgccgcggagggcgctggagacgaggaggaggcggtgcacgaggccgggccgggcggtgccgacggggcggtggccgtgaccgatgggggccccttccggcccgaaggggctggcggtctcggggacatgggggacacgacgcctgcggaaccgcccacacccgagggctctcccatcctcaagaggaaattgggggtggatggagtggaggaggagctcccgccagagccagagcccgagccggaaccagagctggagccggagaaagccgatgccgagaatggggagaaggaagaagttcccgagcccacaccagagccccccaagaagcaagcacctccctcaccccctccaaagaaggaggaagctggaggcgaattctggggagaactggaggtgcagagggtgaagttcctgaactacctgtcccggaacttttacaccctgcggttccttgccctcttcttggcatttgccatcaacttcatcttgctgttttataaggtctcagactctccaccaggggaggacgacatggaaggctcagctgctggggatgtgtcaggtgcaggctctggtggcagctctggctggggcttgggggccggagaggaggcagagggcgatgaggatgagaacatggtgtactacttcctggaggaaagcacaggctacatggaacccgccctgcggtgtctgagcctcctgcatacactggtggcctttctctgcatcattggctataattgtctcaaggtgcccctggtaatctttaagcgggagaaggagctggcccggaagctggagtttgatggcctgtacatcacggagcagcctgaggacgatgacgtgaaggggcagtgggaccgactggtgctcaacacgccgtctttccctagcaactactgggacaagtttgtcaagcgcaaggtcctggacaaacatggggacatctacgggcgggagcggattgctgagctactgggcatggacctggccacactagagatcacagcccacaatgagcgcaagcccaacccgccgccagggctgctgacctggctcatgtccatcgatgtcaagtaccagatctggaagttcggggtcatcttcacagacaactccttcctgtacctgggctggtatatggtgatgtccctcttgggacactacaacaacttcttctttgctgcccatctcctggacatcgccatgggggtcaagacgctgcgcaccatcctgtcctctgtcacccacaatgggaaacagctggtgatgaccgtgggccttctggcggtggtcgtctacctgtacaccgtggtggccttcaacttcttccgcaagttctacaacaagagcgaggatgaggatgaacctgacatgaagtgtgatgacatgatgacgtgttacctgtttcacatgtacgtgggtgtccgggctggcggaggcattggggacgagatcgaggaccccgcgggtgacgaatacgagctctacagggtggtcttcgacatcaccttcttcttcttcgtcatcgtcatcctgttggccatcatccagggtctgatcatcgacgcttttggtgagctccgagaccaacaagagcaagtgaaggaggatatggagaccaagtgcttcatctgtggaatcggcagtgactactttgatacgacaccgcatggcttcgagactcacacgctggaggagcacaacctggccaattacatgtttttcctgatgtatttgataaacaaggatgagacagaacacacgggtcaggagtcttatgtctggaagatgtaccaagagagatgttgggatttcttcccagctggtgattgtttccgtaagcagtatgaggaccagcttagctgacacacccccagctggccctccacccccacctcaagtgccttattctcacagcaagccccttagtccccaagcccctccccctaaggcagctgggggagaggtgacctagtactggaaaataaatctgtgctacgccccccagca

SEQ ID NO: 12036 - DNA, 15376 bp, Artificial Sequence
  derived and/or modified sequence
tctacctcgcgggtgcctctggtgtctccagaggtctccgaccccagcccgcccccagccctcccgcccagcccgcagccccctccctctgttccccgacctcagaccctgggcttccgacctcgacatcatgggtgacgcagaaggcgaagacgaggtccagttcctgcggacggacgatgaggtggtcctgcagtgcagcgctaccgtgctcaaggagcagctcaagctctgcctggccgccgagggcttcggcaaccgcctgtgcttcctggagcccactagcaacgcgcagaatgtgccccccgatctggccatctgttgcttcgtcctggagcagtccctgtctgtgcgagccctgcaggagatgctggctaacacggtggaggctggcgtggagtcatcccagggcgggggacacaggacgctcctgtatggccatgccatcctgctccggcatgcacacagccgcatgtatctgagctgcctcaccacctcccgctccatgactgacaagctggccttcgatgtgggactgcaggaggacgcaacaggagaggcttgctggtggaccatgcacccagcctccaagcagaggtctgaaggagaaaaggtccgcgttggggatgacatcatccttgtcagtgtctcctccgagcgctacctgcacctgtcgaccgccagtggggagctccaggttgacgcttccttcatgcagacactatggaacatgaaccccatctgctcccgctgcgaagagggcttcgtgacgggaggtcacgtcctccgcctctttcatggacatatggatgagtgtctgaccatttcccctgctgacagtgatgaccagcgcagacttgtctactatgaggggggagctgtgtgcactcatgcccgctccctctggaggctggagccactgagaatcagctggagtgggagccacctgcgctggggccagccactccgagtccggcatgtcactaccgggcagtacctagcgctcaccgaggaccagggcctggtggtggttgacgccagcaaggctcacaccaaggctacctccttctgcttccgcatctccaaggagaagctggatgtggcccccaagcgggatgtggagggcatgggcccccctgagatcaagtacggggagtcactgtgcttcgtgcagcatgtggcctcaggactgtggctcacctatgctgctccagaccccaaggccctgcggctcggcgtgctcaagaagaaggccatgctgcaccaggagggccacatggacgacgcactgtcgctgacccgctgccagcaggaggagtcccaggccgcccgcatgatccacagcaccaatggcctatacaaccagttcatcaagagcctggacagcttcagcgggaagccacggggctcggggccacccgctggcacggcgctgcccatcgagggcgttatcctgagcctgcaggacctcatcatctacttcgagcctccctccgaggacttgcagcacgaggagaagcagagcaagctgcgaagcctgcgcaaccgccagagcctcttccaggaggaggggatgctctccatggtcctgaattgcatagaccgcctaaatgtctacaccactgctgcccactttgctgagtttgcaggggaggaggcagccgagtcctggaaagagattgtgaatcttctctatgaactcctagcttctctaatccgtggcaatcgtagcaactgtgccctcttctccacaaacttggactggctggtcagcaagctggatcggctggaggcctcgtctggcatcctggaggtcctgtactgtgtcctcattgagagtccagaggttctgaacatcatccaggagaatcacatcaagtccatcatctccctcctggacaagcatgggaggaaccacaaggtcctggacgtgctatgctccctgtgtgtgtgtaatggtgtggctgtacgctccaaccaagatcttattactgagaacttgctgcctggccgtgagcttctgctgcagacaaacctcatcaactatgtcaccagcatccgccccaacatctttgtgggccgagcggaaggcaccacgcagtacagcaaatggtactttgaggtgatggtggacgaggtgactccatttctgacagctcaggccacccacttgcgggtgggctgggccctcaccgagggctacaccccctaccctggggccggcgagggctggggcggcaacggggtcggcgatgacctctattcctacggctttgatggactgcatctctggacaggacacgtggcacgcccagtgacttccccagggcagcacctcctggcccctgaagacgtgatcagctgctgcctggacctcagcgtgccgtccatctccttccgcatcaacggctgccccgtgcagggtgtctttgagtccttcaacctggacgggctcttcttccctgttgtcagcttctcggctggtgtcaaggtgcggttcctccttggtggccgccatggtgaattcaagttcctgcccccacctggctatgctccatgccatgaggctgtgctccctcgagagcgactccatcttgaacccatcaaggagtatcgacgggaggggccccgggggcctcacctggtgggccccagtcgctgcctctcacacaccgacttcgtgccctgccctgtggacactgtccagattgtcctgccgccccatctggagcgcattcgggagaagctggcggagaacatccacgagctctgggcgctaacccgcatcgagcagggctggacctacggcccggttcgggatgacaacaagaggctgcacccgtgtcttgtggacttccacagccttccagagcctgagaggaactacaacctgcagatgtctggggagacgctcaagactctgctggctctgggctgccacgtgggcatggcggatgagaaggcggaggacaacctgaagaagacaaaactccccaagacgtatatgatgagcaatgggtacaagccggctccgctggacctgagccacgtgcggctgacgccggcgcagacgacactggtggaccgtctggcagaaaatgggcacaacgtgtgggcccgagaccgcgtgggccagggctggagctacagcgcagtgcaggacatcccagcgcgccgaaaccctcggctggtgccctaccgcctgctggatgaagccaccaagcgcagcaaccgggacagcctctgccaggccgtgcgcaccctcctgggctacggctacaacatcgagcctcctgaccaggagcccagtcaggtggagaaccagtctcgttgtgaccgggtgcgcatcttccgggcagagaaatcctatacagtgcagagcggccgctggtacttcgagtttgaagcagtcaccacaggcgagatgcgcgtgggctgggcgaggcccgagctgaggcctgatgtagagctgggagctgacgagctggcctatgtcttcaatgggcaccgcggccagcgctggcacttgggcagtgaaccatttgggcgcccctggcagccgggcgatgtcgttggctgtatgatcgacctcacagagaacaccattatcttcaccctcaatggcgaggtcctcatgtctgactcaggctccgaaacagccttccgggagattgagattggggacggcttcctgcccgtctgcagcttgggacctggccaggtgggtcatctgaacctgggccaggacgtgagctctctgaggttctttgccatctgtggcctccaggaaggcttcgagccatttgccatcaacatgcagcgcccagtcaccacctggttcagcaaaggcctgccccagtttgagccagtgccccttgaacaccctcactatgaggtatcccgagtggacggcactgtggacacgcccccctgcctgcgcctgacccaccgcacctggggctcccagaacagcctggtggagatgcttttcctgcggctgagcctcccagtccagttccaccagcacttccgctgcactgcaggggccaccccgctggcacctcctggcctgcagccccccgccgaggacgaggcccgggcggcggaacccgaccctgactacgaaaacctgcgccgctcagctgggggctggagcgaggcagagaacggcaaagaagggactgcgaaggagggcgcccccgggggcaccccgcaggcggggggagaggcgcagcccgccagggcggagaatgagaaggatgccaccaccgagaagaacaagaagagaggcttcttattcaaggccaagaaggtcgccatgatgacccagccaccggccacccccacgctgccccgactccctcacgacgtggtgcctgcagacaaccgcgatgaccccgagatcatcctcaacaccaccacgtactattactccgtgagggtctttgctggacaggagcccagctgcgtgtgggcgggctgggtcacccctgactaccatcagcacgacatgagcttcgacctcagcaaggtccgggtcgtgacggtgaccatgggggatgaacaaggcaacgtccacagcagcctcaagtgtagcaactgctacatggtgtggggcggagactttgtgagtcccgggcagcagggccggatcagccacacggaccttgtcattgggtgcctggtggacttggccactggcttaatgacctttacagccaatggcaaagagagcaacacctttttccaggtggaacccaacactaagctatttcctgccgtcttcgtcctgcccacccaccagaacgtcatccagtttgagctggggaagcagaagaacatcatgccgttgtcagccgccatgttccaaagcgagcgcaagaacccggccccgcagtgcccaccgcggctggagatgcagatgctgatgccagtgtcctggagccgcatgcccaaccacttcctgcaggtggagacgaggcgtgccggcgagcggctgggctgggccgtgcagtgccaggagccgctgaccatgatggcgctgcacatccccgaggagaaccggtgcatggacatcctggagctgtcggagcgcctggacctgcagcgcttccactcgcacaccctgcgcctctaccgcgctgtgtgcgccctgggcaacaatcgcgtggcgcacgctctgtgcagccacgtagaccaagctcagctgctgcacgccctggaggacgcgcacctgccaggcccactgcgcgcaggctactatgacctcctcatcagcatccacctcgaaagtgcctgccgcagccgccgctccatgctctctgaatacatcgtgcccctcacgcctgagacccgcgccatcacgctcttccctcctggaaggagcacagaaaatggtcacccccggcatggcctgccgggagttggagtcaccacttcgctgaggcccccgcatcatttctcgcccccctgtttcgtggccgctctgccagctgctggggcagcagaggccccggcccgcctcagccctgccatcccgctggaggccctgcgggacaaggcactgaggatgctgggggaggcggtgcgcgacggtgggcagcacgctcgcgaccccgtcgggggctccgtggagttccagtttgtgcctgtgctcaagctcgtgtccaccctgctggtgatgggcatctttggcgatgaggatgtgaaacagatcttgaagatgattgagcctgaggtcttcactgaggaagaagaggaggaggacgaggaggaagagggtgaagaggaagatgaggaggagaaggaggaggatgaggaggaaacagcacaggaaaaggaagatgaggaaaaagaggaagaggaggcagcagaaggggagaaagaagaaggcttggaggaagggctgctccagatgaagttgccagagtctgtgaagttacagatgtgccacctgctggagtatttctgtgaccaagagctgcagcaccgtgtggagtccctggcagcctttgcggagcgctatgtggacaagctccaggccaaccagcggagccgctatggcctcctcataaaagccttcagcatgaccgcagcagagactgcaagacgtacccgcgagttccgctccccaccccaggaacagatcaatatgctattgcaattcaaagatggtacagatgaggaagactgtcctctccctgaagagattcgacaggatttgcttgactttcatcaagacctgctggcacactgtggaattcagctagatggagaggaggaggaaccagaggaagagaccaccctgggcagccgcctcatgagcctgttggagaaagtgcggctggtgaagaagaaggaagagaaacctgaggaggagcggtcagcagaggagagcaaaccccggtccctgcaggagctggtgtcccacatggtggtgcgctgggcccaagaggacttcgtgcagagccccgagctggtgcgggccatgttcagcctcctgcaccggcagtacgacgggctgggtgagctgctgcgtgccctgccgcgggcgtacaccatctcaccgtcctccgtggaagacaccatgagcctgctcgagtgcctcggccagatccgctcgctgctcatcgtgcagatgggcccccaggaggagaacctcatgatccagagcatcgggaacatcatgaacaacaaagtcttctaccaacacccgaacctgatgagggcgctgggcatgcacgagacggtcatggaggtcatggtcaacgtcctcgggggcggcgagtccaaggagatccgcttccccaagatggtgacaagctgctgccgcttcctctgctatttctgccgaatcagccggcagaaccagcgctccatgtttgaccacctgagctacctgctggagaacagtggcatcggcctgggcatgcagggctccacgcccctggacgtggctgctgcctccgtcattgacaacaatgagctggccttggcattgcaggagcaggacctggaaaaggttgtgtcctacctggcaggctgtggcctccagagctgccccatgcttgtggccaaagggtacccagacattggctggaacccctgtggtggagagcgctacctggacttcctgcgctttgctgtcttcgtcaacggcgagagcgtggaggagaacgccaatgtggtggtgcggctgctcatccggaagcctgagtgcttcggacccgccctgcggggtgagggtggctcagggctgctggctgccatcgaagaggccatccgcatctccgaggaccctgcgagggatggcccaggcatccgcagggaccggcggcgcgagcactttggtgaggaaccgcctgaagaaaaccgggtgcacctgggacacgccatcatgtccttctatgccgccttgatcgacctgctcggacgctgtgcaccagagatgcatctaatccaagccggcaagggtgaggccctgcggatccgcgccatcctccgctcccttgtgcccttggaggaccttgtgggcatcatcagcctcccactgcagattcccaccctgggcaaagatggggctctggtgcagccaaagatgtcagcatccttcgtgccggaccacaaggcgtccatggtgctcttcctggaccgtgtgtatggcatcgagaaccaggacttcttgctgcacgtgctggacgtggggttcctgcccgacatgagggcagccgcctcgctggacacggccactttcagcaccaccgagatggcgctggcgctgaaccgctacctgtgcctggccgtgctgccgctcatcaccaagtgtgcgccgctctttgcgggcacagaacaccgcgccatcatggtggactctatgctgcataccgtgtaccgcctgtctcggggtcgttcgctcaccaaggcgcagcgtgacgtcatcgaggactgcctcatgtcgctctgcaggtacatccgcccgtcgatgctgcagcacctgttgcgccgcctggtgttcgacgtgcccatcctcaacgagttcgccaagatgccactcaagctcctcaccaaccactatgagcgctgttggaagtactactgcctacccacgggctgggccaacttcggggtcacctcagaggaggagctgcacctcacacggaaactcttctggggcatctttgactctctggcccataagaaatacgacccggagctgtaccgcatggccatgccttgtctgtgcgccattgccggggctctgccccccgactatgtggatgcctcatactcatctaaggcagagaaaaaggccacagtggatgctgaaggcaactttgatccccggcctgtggagaccctcaatgtgatcatcccggagaagctggactccttcattaacaagtttgcggagtacacacacgagaagtgggccttcgacaagatccagaacaactggtcctatggagagaacatagacgaggagctgaagacccaccccatgctgaggccctacaagaccttttcagagaaggacaaagagatttaccgctggcccatcaaggagtccctgaaggccatgattgcctgggaatggacgatagagaaggccagggagggtgaggaggagaagacggaaaagaaaaaaacgcggaagatatcacaaagtgcccagacctatgatcctcgagaaggctacaaccctcagccccccgaccttagtgctgttaccctgtcccgggagctgcaggccatggcagaacaactggcagaaaattaccacaacacgtggggacggaagaagaagcaggagctggaagccaaaggcggtgggacccaccccctgctggtcccctacgacacgctcacggccaaggagaaggcacgagatcgagagaaggcccaggagctactgaaattcctgcagatgaatggctacgcggttacaagaggccttaaggacatggaactggactcgtcttccattgaaaagcggtttgcctttggcttcctgcagcagctgctgcgctggatggacatttctcaggagttcattgcccacctggaggctgtggtcagcagtgggcgagtggaaaagtccccacatgaacaggagattaaattctttgccaagatcctgctccctttgatcaaccagtacttcaccaaccactgcctctatttcttgtccactccggctaaagtgctgggcagcggtggccacgcctctaacaaggagaaggaaatgatcaccagcctcttctgcaaacttgctgctctcgtccgccaccgagtctctctctttgggacagacgccccagctgtggtcaactgtcttcacatcctggcccgctccctggatgccaggacagtgatgaagtcaggccctgagatcgtgaaggctggcctccgctccttcttcgagagtgcctcggaggacatcgagaagatggtggagaacctgcggctgggcaaggtgtcgcaggcgcgcacccaggtgaaaggcgtgggccagaacctcacctacaccactgtggcactgctgccggtcctcaccaccctcttccagcacatcgcccagcaccagttcggagatgacgtcatcctggacgacgtccaggtctcttgctaccgaacgctgtgcagtatctactccctgggaaccaccaagaacacttatgtggaaaagcttcggccagccctcggggagtgcctggcccgtctggcagcagccatgccggtggcgttcctggagccgcagctgaacgagtacaacgcctgctccgtgtacaccaccaagtctccgcgggagcgggccatcctggggctccccaacagtgtggaggagatgtgtcccgacatcccggtgctggagcggctcatggcagacattggggggctggccgagtcaggtgcccgctacacagagatgccgcatgtcatcgagatcacgctgcccatgctatgcagctacctgccccgatggtgggagcgcgggcccgaggcacccccttccgccctgcccgccggcgcccccccaccctgcacagctgtcacctctgaccacctcaactccctgctggggaatatcctgagaatcatcgtcaacaacctgggcattgacgaggcctcctggatgaagcggctggctgtgttcgcacagcccattgtgagccgtgcacggccggagctcctgcagtcccacttcatcccaactatcgggcggctgcgcaagagggcagggaaggtggtgtccgaggaggagcagctgcgcctggaggccaaggcggaggcccaggagggcgagctgctggtgcgggacgagttctctgtgctctgccgggacctctacgccctgtatccgctgctcatccgctacgtggacaacaacagggcgcagtggctgacggagccgaatcccagcgcggaggagctgttcaggatggtgggcgagatcttcatctactggtccaagtcccacaacttcaagcgcgaggagcagaactttgtggtccagaatgagatcaacaacatgtccttcctgactgctgacaacaaaagcaaaatggctaaggcgggagatatacagtccggtggctcggaccaggaacgcaccaagaagaagcgccggggggaccggtactctgtgcagacgtcactgatcgtggccacactgaagaagatgctgcccatcggcctgaatatgtgtgcgcccaccgaccaagacctcatcacgctggccaagacccgttacgccctgaaagacacagatgaggaggtccgggaatttctgcacaacaaccttcaccttcagggaaaggtcgaaggctccccgtctctgcgctggcagatggctctgtaccggggcgtcccgggtcgcgaggaggacgccgatgaccccgagaaaatcgtgcgcagagtccaggaagtgtcagccgtgctctactacctggaccagaccgagcacccttacaagtctaagaaggccgtgtggcacaagcttttgtccaaacagcgccggcgggcagtcgtggcctgtttccgtatgacgcccctgtacaacctgcccacgcaccgggcatgtaacatgttcctggagagctacaaggctgcatggatcctgactgaagaccacagttttgaggaccgcatgatagatgacctttcaaaagctggggagcaggaggaggaggaggaagaggtggaagagaagaagccagaccccctgcaccagttggtcctgcacttcagccgcactgccctgacggaaaagagcaaactggatgaggattacctgtacatggcctatgctgatatcatggcaaagagctgccacctggaggagggaggggagaacggtgaagctgaagaggaggttgaggtctcctttgaggagaaacagatggagaagcagaggctcttgtaccagcaagcacggctgcacacccggggggcggccgagatggtgctgcagatgatcagtgcctgcaaaggagagacaggtgccatggtgtcctccaccctgaagctgggcatctccatcctcaatggaggcaatgctgaggtccagcagaaaatgctggattatcttaaggacaagaaggaagttggcttcttccagagtatccaggcactgatgcaaacatgcagcgtcctggatctcaatgcctttgagagacagaacaaggccgaggggctgggcatggtgaatgaggatggcactgtaggagagaaggtcatggcggatgatgaattcacacaagacctgttccgattcctacaattgctctgtgaggggcacaataatgatttccagaactacctacggacacagacagggaacacgaccactattaacatcatcatttgcactgtggactacctcctgcggctgcaggaatccatcagcgacttctactggtactactcgggcaaggatgtcattgaagagcagggcaagaggaacttctccaaagccatgtcggtggctaagcaggtgttcaacagcctcactgagtacatccagggtccctgcaccgggaaccagcagagcctggcgcacagtcgcctatgggacgcagtggtgggattcctgcacgtgttcgcccacatgatgatgaagctcgctcaggactcaagccagatcgagctgctgaaggagctgctggatctgcagaaggacatggtggtgatgttgctgtcgctactagaagggaacgtggtgaacggcatgatcgcccggcagatggtggacatgctcgtggaatcctcatccaatgtggagatgatcctcaagttcttcgacatgttcctgaaactcaaggacattgtgggctctgaagccttccaggactacgtaacggatccccgtggcctcatctccaagaaggacttccagaaggccatggacagccagaagcagttcagcggtccagaaatccagttcctgctttcgtgctccgaagcggatgagaacgaaatgatcaactgcgaagagttcgccaaccgcttccaggagccagcacgcgacatcggcttcaacgtggcggtgctgctgaccaacctgtcggagcatgtgccgcatgaccctcgcctgcacaacttcctggagctggccgagagcatccttgagtacttccgcccctacctgggccgcatcgagatcatgggcgcgtcacgccgcatcgagcgcatctacttcgagatctcagagaccaaccgcgcccagtgggagatgccccaggtgaaggagtccaagcgccagttcatcttcgacgtggtgaacgagggcggcgaggctgagaagatggagctcttcgtgagtttctgcgaggacaccatcttcgagatgcagatcgccgcgcagatctcggagcccgagggcgagccggagaccgacgaggacgagggcgcgggcgcggcggaggcgggcgcggaaggcgcggaggagggcgcggcggggctcgagggcacggcggccacggcggcggcgggggcgacggcgcgggttgtggcggccgcaggccgggccctgcgaggcctcagctaccgcagcctgcggcggcgcgtgcggcggctgcggcggcttacggcccgcgaggcggccaccgcagtggcggcgctgctctgggcagcagtgacgcgcgctggggccgctggcgcgggggcggcggcgggcgcgctgggcctgctctggggctcgctgttcggcggcggcctggtggagggcgccaagaaggtgacggtgaccgagctcctggcaggcatgcccgaccccaccagcgacgaggtgcacggcgagcagccggccgggccgggcggagacgcagacggcgagggtgccagcgagggcgctggagacgccgcggagggcgctggagacgaggaggaggcggtgcacgaggccgggccgggcggtgccgacggggcggtggccgtgaccgatgggggccccttccggcccgaaggggctggcggtctcggggacatgggggacacgacgcctgcggaaccgcccacacccgagggctctcccatcctcaagaggaaattgggggtggatggagtggaggaggagctcccgccagagccagagcccgagccggaaccagagctggagccggagaaagccgatgccgagaatggggagaaggaagaagttcccgagcccacaccagagccccccaagaagcaagcacctccctcaccccctccaaagaaggaggaagctggaggcgaattctggggagaactggaggtgcagagggtgaagttcctgaactacctgtcccggaacttttacaccctgcggttccttgccctcttcttggcatttgccatcaacttcatcttgctgttttataaggtctcagactctccaccaggggaggacgacatggaaggctcagctgctggggatgtgtcaggtgcaggctctggtggcagctctggctggggcttgggggccggagaggaggcagagggcgatgaggatgagaacatggtgtactacttcctggaggaaagcacaggctacatggaacccgccctgcggtgtctgagcctcctgcatacactggtggcctttctctgcatcattggctataattgtctcaaggtgcccctggtaatctttaagcgggagaaggagctggcccggaagctggagtttgatggcctgtacatcacggagcagcctgaggacgatgacgtgaaggggcagtgggaccgactggtgctcaacacgccgtctttccctagcaactactgggacaagtttgtcaagcgcaaggtcctggacaaacatggggacatctacgggcgggagcggattgctgagctactgggcatggacctggccacactagagatcacagcccacaatgagcgcaagcccaacccgccgccagggctgctgacctggctcatgtccatcgatgtcaagtaccagatctggaagttcggggtcatcttcacagacaactccttcctgtacctgggctggtatatggtgatgtccctcttgggacactacaacaacttcttctttgctgcccatctcctggacatcgccatgggggtcaagacgctgcgcaccatcctgtcctctgtcacccacaatgggaaacagctggtgatgaccgtgggccttctggcggtggtcgtctacctgtacaccgtggtggccttcaacttcttccgcaagttctacaacaagagcgaggatgaggatgaacctgacatgaagtgtgatgacatgatgacgtgttacctgtttcacatgtacgtgggtgtccgggctggcggaggcattggggacgagatcgaggaccccgcgggtgacgaatacgagctctacagggtggtcttcgacatcaccttcttcttcttcgtcatcgtcatcctgttggccatcatccagggtctgatcatcgacgcttttggtgagctccgagaccaacaagagcaagtgaaggaggatatggagaccaagtgcttcatctgtggaatcggcagtgactactttgatacgacaccgcatggcttcgagactcacacgctggaggagcacaacctggccaattacatgtttttcctgatgtatttgataaacaaggatgagacagaacacacgggtcaggagtcttatgtctggaagatgtaccaagagagatgttgggatttcttcccagctggtgattgtttccgtaagcagtatgaggaccagcttagctgacacacccccagctggccctccacccccacctcaagtgccttattctcacagcaagccccttagtccccaagcccctccccctaaggcagctgggggagaggtgacctagtactggaaaataaatctgtgctacgccccccagca

SEQ ID NO: 12037 - DNA, 2200 bp, Artificial Sequence
  derived and/or modified sequence
aaacttgctgctctcgtccgccaccgagtctctctctttggacagtgatgaagtcaggccctgagatcgtgaaggctggcctccgctccttcttcgagagtgcctcggaggacatcgagaagatggtggagaacctgcggctgggcaaggtgtcgcaggcgcgcacccaggtgaaaggcgtgggccagaacctcacctacaccactgtggcactgctgccggtcctcaccaccctcttccagcacatcgcccagcaccagttcggagatgacgtcatcctggacgacgtccaggtctcttgctaccgaacgctgtgcagtatctactccctgggaaccaccaagaacacttatgtggaaaagcttcggccagccctcggggagtgcctggcccgtctggcagcagccatgccggtggcgttcctggagccgcagctgaacgagtacaacgcctgctccgtgtacaccaccaagtctccgcgggagcgggccatcctggggctccccaacagtgtggaggagatgtgtcccgacatcccggtgctggagcggctcatggcagacattggggggctggccgagtcaggtgcccgctacacagagatgccgcatgtcatcgagatcacgctgcccatgctatgcagctacctgccccgatggtgggagcgcgggcccgaggcacccccttccgccctgcccgccggcgcccccccaccctgcacagctgtcacctctgaccacctcaactccctgctggggaatatcctgagaatcatcgtcaacaacctgggcattgacgaggcctcctggatgaagcggctggctgtgttcgcacagcccattgtgagccgtgcacggccggagctcctgcagtcccacttcatcccaactatcgggcggctgcgcaagagggcagggaaggtggtgtccgaggaggagcagctgcgcctggaggccaaggcggaggcccaggagggcgagctgctggtgcgggacgagttctctgtgctctgccgggacctctacgccctgtatccgctgctcatccgctacgtggacaacaacagggcgcagtggctgacggagccgaatcccagcgcggaggagctgttcaggatggtgggcgagatcttcatctactggtccaagtcccacaacttcaagcgcgaggagcagaactttgtggtccagaatgagatcaacaacatgtccttcctgactgctgacaacaaaagcaaaatggctaaggcgggagatatacagtccggtggctcggaccaggaacgcaccaagaagaagcgccggggggaccggtactctgtgcagacgtcactgatcgtggccacactgaagaagatgctgcccatcggcctgaatatgtgtgcgcccaccgaccaagacctcatcacgctggccaagacccgttacgccctgaaagacacagatgaggaggtccgggaatttctgcacaacaaccttcaccttcagggaaaggtcgaaggctccccgtctctgcgctggcagatggctctgtaccggggcgtcccgggtcgcgaggaggacgccgatgaccccgagaaaatcgtgcgcagagtccaggaagtgtcagccgtgctctactacctggaccagaccgagcacccttacaagtctaagaaggccgtgtggcacaagcttttgtccaaacagcgccggcgggcagtcgtggcctgtttccgtatgacgcccctgtacaacctgcccacgcaccgggcatgtaacatgttcctggagagctacaaggctgcatggatcctgactgaagaccacagttttgaggaccgcatgatagatgacctttcaaaagctggggagcaggaggaggaggaggaagaggtggaagagaagaagccagaccccctgcaccagttggtcctgcacttcagccgcactgccctgacggaaaagagcaaactggatgaggattacctgtacatggcctatgctgatatcatggcaaagagctgccacctggaggagggaggggagaacggtgaagctgaagaggaggttgaggtctcctttgaggagaaacagatggagaagcagaggctcttgtaccagcaagcacggctgcacacccggggggcggccgagatggtgctgcagatgatcagtgcctgcaaaggagagacaggtgccatggtgtcctccaccctgaa

SEQ ID NO: 12038 - DNA, 15117 bp, Artificial Sequence
  derived and/or modified sequence
atgggcgacgccgagggcgaggacgaggtgcagttcctgagaaccgacgacgaggtggtgctgcagtgcagcgccaccgtgctgaaggagcagctgaagctgtgcctggccgccgagggcttcggcaacagactgtgcttcctggagcccaccagcaacgcccagaacgtgccccccgacctggccatctgctgcttcgtgctggagcagagcctgagcgtgagagccctgcaggagatgctggccaacaccgtggaggccggcgtggagagcagccagggcggcggccacagaaccctgctgtacggccacgccatcctgctgagacacgcccacagcagaatgtacctgagctgcctgaccaccagcagaagcatgaccgacaagctggccttcgacgtgggcctgcaggaggacgccaccggcgaggcctgctggtggaccatgcaccccgccagcaagcagagaagcgagggcgagaaggtgagagtgggcgacgacatcatcctggtgagcgtgagcagcgagagatacctgcacctgagcaccgccagcggcgagctgcaggtggacgccagcttcatgcagaccctgtggaacatgaaccccatctgcagcagatgcgaggagggcttcgtgaccggcggccacgtgctgagactgttccacggccacatggacgagtgcctgaccatcagccccgccgacagcgacgaccagagaagactggtgtactacgagggcggcgccgtgtgcacccacgccagaagcctgtggagactggagcccctgagaatcagctggagcggcagccacctgagatggggccagcccctgagagtgagacacgtgaccaccggccagtacctggccctgaccgaggaccagggcctggtggtggtggacgccagcaaggcccacaccaaggccaccagcttctgcttcagaatcagcaaggagaagctggacgtggcccccaagagagacgtggagggcatgggcccccccgagatcaagtacggcgagagcctgtgcttcgtgcagcacgtggccagcggcctgtggctgacctacgccgcccccgaccccaaggccctgagactgggcgtgctgaagaagaaggccatgctgcaccaggagggccacatggacgacgccctgagcctgaccagatgccagcaggaggagagccaggccgccagaatgatccacagcaccaacggcctgtacaaccagttcatcaagagcctggacagcttcagcggcaagcccagaggcagcggcccccccgccggcaccgccctgcccatcgagggcgtgatcctgagcctgcaggacctgatcatctacttcgagccccccagcgaggacctgcagcacgaggagaagcagagcaagctgagaagcctgagaaacagacagagcctgttccaggaggagggcatgctgagcatggtgctgaactgcatcgacagactgaacgtgtacaccaccgccgcccacttcgccgagttcgccggcgaggaggccgccgagagctggaaggagatcgtgaacctgctgtacgagctgctggccagcctgatcagaggcaacagaagcaactgcgccctgttcagcaccaacctggactggctggtgagcaagctggacagactggaggccagcagcggcatcctggaggtgctgtactgcgtgctgatcgagagccccgaggtgctgaacatcatccaggagaaccacatcaagagcatcatcagcctgctggacaagcacggcagaaaccacaaggtgctggacgtgctgtgcagcctgtgcgtgtgcaacggcgtggccgtgagaagcaaccaggacctgatcaccgagaacctgctgcccggcagagagctgctgctgcagaccaacctgatcaactacgtgaccagcatcagacccaacatcttcgtgggcagagccgagggcaccacccagtacagcaagtggtacttcgaggtgatggtggacgaggtgacccccttcctgaccgcccaggccacccacctgagagtgggctgggccctgaccgagggctacaccccctaccccggcgccggcgagggctggggcggcaacggcgtgggcgacgacctgtacagctacggcttcgacggcctgcacctgtggaccggccacgtggccagacccgtgaccagccccggccagcacctgctggcccccgaggacgtgatcagctgctgcctggacctgagcgtgcccagcatcagcttcagaatcaacggctgccccgtgcagggcgtgttcgagagcttcaacctggacggcctgttcttccccgtggtgagcttcagcgccggcgtgaaggtgagattcctgctgggcggcagacacggcgagttcaagttcctgcccccccccggctacgccccctgccacgaggccgtgctgcccagagagagactgcacctggagcccatcaaggagtacagaagagagggccccagaggcccccacctggtgggccccagcagatgcctgagccacaccgacttcgtgccctgccccgtggacaccgtgcagatcgtgctgcccccccacctggagagaatcagagagaagctggccgagaacatccacgagctgtgggccctgaccagaatcgagcagggctggacctacggccccgtgagagacgacaacaagagactgcacccctgcctggtggacttccacagcctgcccgagcccgagagaaactacaacctgcagatgagcggcgagaccctgaagaccctgctggccctgggctgccacgtgggcatggccgacgagaaggccgaggacaacctgaagaagaccaagctgcccaagacctacatgatgagcaacggctacaagcccgcccccctggacctgagccacgtgagactgacccccgcccagaccaccctggtggacagactggccgagaacggccacaacgtgtgggccagagacagagtgggccagggctggagctacagcgccgtgcaggacatccccgccagaagaaaccccagactggtgccctacagactgctggacgaggccaccaagagaagcaacagagacagcctgtgccaggccgtgagaaccctgctgggctacggctacaacatcgagccccccgaccaggagcccagccaggtggagaaccagagcagatgcgacagagtgagaatcttcagagccgagaagagctacaccgtgcagagcggcagatggtacttcgagttcgaggccgtgaccaccggcgagatgagagtgggctgggccagacccgagctgagacccgacgtggagctgggcgccgacgagctggcctacgtgttcaacggccacagaggccagagatggcacctgggcagcgagcccttcggcagaccctggcagcccggcgacgtggtgggctgcatgatcgacctgaccgagaacaccatcatcttcaccctgaacggcgaggtgctgatgagcgacagcggcagcgagaccgccttcagagagatcgagatcggcgacggcttcctgcccgtgtgcagcctgggccccggccaggtgggccacctgaacctgggccaggacgtgagcagcctgagattcttcgccatctgcggcctgcaggagggcttcgagcccttcgccatcaacatgcagagacccgtgaccacctggttcagcaagggcctgccccagttcgagcccgtgcccctggagcacccccactacgaggtgagcagagtggacggcaccgtggacacccccccctgcctgagactgacccacagaacctggggcagccagaacagcctggtggagatgctgttcctgagactgagcctgcccgtgcagttccaccagcacttcagatgcaccgccggcgccacccccctggccccccccggcctgcagccccccgccgaggacgaggccagagccgccgagcccgaccccgactacgagaacctgagaagaagcgccggcggctggagcgaggccgagaacggcaaggagggcaccgccaaggagggcgcccccggcggcaccccccaggccggcggcgaggcccagcccgccagagccgagaacgagaaggacgccaccaccgagaagaacaagaagagaggcttcctgttcaaggccaagaaggtggccatgatgacccagccccccgccacccccaccctgcccagactgccccacgacgtggtgcccgccgacaacagagacgaccccgagatcatcctgaacaccaccacctactactacagcgtgagagtgttcgccggccaggagcccagctgcgtgtgggccggctgggtgacccccgactaccaccagcacgacatgagcttcgacctgagcaaggtgagagtggtgaccgtgaccatgggcgacgagcagggcaacgtgcacagcagcctgaagtgcagcaactgctacatggtgtggggcggcgacttcgtgagccccggccagcagggcagaatcagccacaccgacctggtgatcggctgcctggtggacctggccaccggcctgatgaccttcaccgccaacggcaaggagagcaacaccttcttccaggtggagcccaacaccaagctgttccccgccgtgttcgtgctgcccacccaccagaacgtgatccagttcgagctgggcaagcagaagaacatcatgcccctgagcgccgccatgttccagagcgagagaaagaaccccgccccccagtgcccccccagactggagatgcagatgctgatgcccgtgagctggagcagaatgcccaaccacttcctgcaggtggagaccagaagagccggcgagagactgggctgggccgtgcagtgccaggagcccctgaccatgatggccctgcacatccccgaggagaacagatgcatggacatcctggagctgagcgagagactggacctgcagagattccacagccacaccctgagactgtacagagccgtgtgcgccctgggcaacaacagagtggcccacgccctgtgcagccacgtggaccaggcccagctgctgcacgccctggaggacgcccacctgcccggccccctgagagccggctactacgacctgctgatcagcatccacctggagagcgcctgcagaagcagaagaagcatgctgagcgagtacatcgtgcccctgacccccgagaccagagccatcaccctgttcccccccggcagaagcaccgagaacggccaccccagacacggcctgcccggcgtgggcgtgaccaccagcctgagacccccccaccacttcagccccccctgcttcgtggccgccctgcccgccgccggcgccgccgaggcccccgccagactgagccccgccatccccctggaggccctgagagacaaggccctgagaatgctgggcgaggccgtgagagacggcggccagcacgccagagaccccgtgggcggcagcgtggagttccagttcgtgcccgtgctgaagctggtgagcaccctgctggtgatgggcatcttcggcgacgaggacgtgaagcagatcctgaagatgatcgagcccgaggtgttcaccgaggaggaggaggaggaggacgaggaggaggagggcgaggaggaggacgaggaggagaaggaggaggacgaggaggagaccgcccaggagaaggaggacgaggagaaggaggaggaggaggccgccgagggcgagaaggaggagggcctggaggagggcctgctgcagatgaagctgcccgagagcgtgaagctgcagatgtgccacctgctggagtacttctgcgaccaggagctgcagcacagagtggagagcctggccgccttcgccgagagatacgtggacaagctgcaggccaaccagagaagcagatacggcctgctgatcaaggccttcagcatgaccgccgccgagaccgccagaagaaccagagagttcagaagccccccccaggagcagatcaacatgctgctgcagttcaaggacggcaccgacgaggaggactgccccctgcccgaggagatcagacaggacctgctggacttccaccaggacctgctggcccactgcggcatccagctggacggcgaggaggaggagcccgaggaggagaccaccctgggcagcagactgatgagcctgctggagaaggtgagactggtgaagaagaaggaggagaagcccgaggaggagagaagcgccgaggagagcaagcccagaagcctgcaggagctggtgagccacatggtggtgagatgggcccaggaggacttcgtgcagagccccgagctggtgagagccatgttcagcctgctgcacagacagtacgacggcctgggcgagctgctgagagccctgcccagagcctacaccatcagccccagcagcgtggaggacaccatgagcctgctggagtgcctgggccagatcagaagcctgctgatcgtgcagatgggcccccaggaggagaacctgatgatccagagcatcggcaacatcatgaacaacaaggtgttctaccagcaccccaacctgatgagagccctgggcatgcacgagaccgtgatggaggtgatggtgaacgtgctgggcggcggcgagagcaaggagatcagattccccaagatggtgaccagctgctgcagattcctgtgctacttctgcagaatcagcagacagaaccagagaagcatgttcgaccacctgagctacctgctggagaacagcggcatcggcctgggcatgcagggcagcacccccctggacgtggccgccgccagcgtgatcgacaacaacgagctggccctggccctgcaggagcaggacctggagaaggtggtgagctacctggccggctgcggcctgcagagctgccccatgctggtggccaagggctaccccgacatcggctggaacccctgcggcggcgagagatacctggacttcctgagattcgccgtgttcgtgaacggcgagagcgtggaggagaacgccaacgtggtggtgagactgctgatcagaaagcccgagtgcttcggccccgccctgagaggcgagggcggcagcggcctgctggccgccatcgaggaggccatcagaatcagcgaggaccccgccagagacggccccggcatcagaagagacagaagaagagagcacttcggcgaggagccccccgaggagaacagagtgcacctgggccacgccatcatgagcttctacgccgccctgatcgacctgctgggcagatgcgcccccgagatgcacctgatccaggccggcaagggcgaggccctgagaatcagagccatcctgagaagcctggtgcccctggaggacctggtgggcatcatcagcctgcccctgcagatccccaccctgggcaaggacggcgccctggtgcagcccaagatgagcgccagcttcgtgcccgaccacaaggccagcatggtgctgttcctggacagagtgtacggcatcgagaaccaggacttcctgctgcacgtgctggacgtgggcttcctgcccgacatgagagccgccgccagcctggacaccgccaccttcagcaccaccgagatggccctggccctgaacagatacctgtgcctggccgtgctgcccctgatcaccaagtgcgcccccctgttcgccggcaccgagcacagagccatcatggtggacagcatgctgcacaccgtgtacagactgagcagaggcagaagcctgaccaaggcccagagagacgtgatcgaggactgcctgatgagcctgtgcagatacatcagacccagcatgctgcagcacctgctgagaagactggtgttcgacgtgcccatcctgaacgagttcgccaagatgcccctgaagctgctgaccaaccactacgagagatgctggaagtactactgcctgcccaccggctgggccaacttcggcgtgaccagcgaggaggagctgcacctgaccagaaagctgttctggggcatcttcgacagcctggcccacaagaagtacgaccccgagctgtacagaatggccatgccctgcctgtgcgccatcgccggcgccctgccccccgactacgtggacgccagctacagcagcaaggccgagaagaaggccaccgtggacgccgagggcaacttcgaccccagacccgtggagaccctgaacgtgatcatccccgagaagctggacagcttcatcaacaagttcgccgagtacacccacgagaagtgggccttcgacaagatccagaacaactggagctacggcgagaacatcgacgaggagctgaagacccaccccatgctgagaccctacaagaccttcagcgagaaggacaaggagatctacagatggcccatcaaggagagcctgaaggccatgatcgcctgggagtggaccatcgagaaggccagagagggcgaggaggagaagaccgagaagaagaagaccagaaagatcagccagagcgcccagacctacgaccccagagagggctacaacccccagccccccgacctgagcgccgtgaccctgagcagagagctgcaggccatggccgagcagctggccgagaactaccacaacacctggggcagaaagaagaagcaggagctggaggccaagggcggcggcacccaccccctgctggtgccctacgacaccctgaccgccaaggagaaggccagagacagagagaaggcccaggagctgctgaagttcctgcagatgaacggctacgccgtgaccagaggcctgaaggacatggagctggacagcagcagcatcgagaagagattcgccttcggcttcctgcagcagctgctgagatggatggacatcagccaggagttcatcgcccacctggaggccgtggtgagcagcggcagagtggagaagagcccccacgagcaggagatcaagttcttcgccaagatcctgctgcccctgatcaaccagtacttcaccaaccactgcctgtacttcctgagcacccccgccaaggtgctgggcagcggcggccacgccagcaacaaggagaaggagatgatcaccagcctgttctgcaagctggccgccctggtgagacacagagtgagcctgttcggcaccgacgcccccgccgtggtgaactgcctgcacatcctggccagaagcctggacgccagaaccgtgatgaagagcggccccgagatcgtgaaggccggcctgagaagcttcttcgagagcgccagcgaggacatcgagaagatggtggagaacctgagactgggcaaggtgagccaggccagaacccaggtgaagggcgtgggccagaacctgacctacaccaccgtggccctgctgcccgtgctgaccaccctgttccagcacatcgcccagcaccagttcggcgacgacgtgatcctggacgacgtgcaggtgagctgctacagaaccctgtgcagcatctacagcctgggcaccaccaagaacacctacgtggagaagctgagacccgccctgggcgagtgcctggccagactggccgccgccatgcccgtggccttcctggagccccagctgaacgagtacaacgcctgcagcgtgtacaccaccaagagccccagagagagagccatcctgggcctgcccaacagcgtggaggagatgtgccccgacatccccgtgctggagagactgatggccgacatcggcggcctggccgagagcggcgccagatacaccgagatgccccacgtgatcgagatcaccctgcccatgctgtgcagctacctgcccagatggtgggagagaggccccgaggccccccccagcgccctgcccgccggcgccccccccccctgcaccgccgtgaccagcgaccacctgaacagcctgctgggcaacatcctgagaatcatcgtgaacaacctgggcatcgacgaggccagctggatgaagagactggccgtgttcgcccagcccatcgtgagcagagccagacccgagctgctgcagagccacttcatccccaccatcggcagactgagaaagagagccggcaaggtggtgagcgaggaggagcagctgagactggaggccaaggccgaggcccaggagggcgagctgctggtgagagacgagttcagcgtgctgtgcagagacctgtacgccctgtaccccctgctgatcagatacgtggacaacaacagagcccagtggctgaccgagcccaaccccagcgccgaggagctgttcagaatggtgggcgagatcttcatctactggagcaagagccacaacttcaagagagaggagcagaacttcgtggtgcagaacgagatcaacaacatgagcttcctgaccgccgacaacaagagcaagatggccaaggccggcgacatccagagcggcggcagcgaccaggagagaaccaagaagaagagaagaggcgacagatacagcgtgcagaccagcctgatcgtggccaccctgaagaagatgctgcccatcggcctgaacatgtgcgcccccaccgaccaggacctgatcaccctggccaagaccagatacgccctgaaggacaccgacgaggaggtgagagagttcctgcacaacaacctgcacctgcagggcaaggtggagggcagccccagcctgagatggcagatggccctgtacagaggcgtgcccggcagagaggaggacgccgacgaccccgagaagatcgtgagaagagtgcaggaggtgagcgccgtgctgtactacctggaccagaccgagcacccctacaagagcaagaaggccgtgtggcacaagctgctgagcaagcagagaagaagagccgtggtggcctgcttcagaatgacccccctgtacaacctgcccacccacagagcctgcaacatgttcctggagagctacaaggccgcctggatcctgaccgaggaccacagcttcgaggacagaatgatcgacgacctgagcaaggccggcgagcaggaggaggaggaggaggaggtggaggagaagaagcccgaccccctgcaccagctggtgctgcacttcagcagaaccgccctgaccgagaagagcaagctggacgaggactacctgtacatggcctacgccgacatcatggccaagagctgccacctggaggagggcggcgagaacggcgaggccgaggaggaggtggaggtgagcttcgaggagaagcagatggagaagcagagactgctgtaccagcaggccagactgcacaccagaggcgccgccgagatggtgctgcagatgatcagcgcctgcaagggcgagaccggcgccatggtgagcagcaccctgaagctgggcatcagcatcctgaacggcggcaacgccgaggtgcagcagaagatgctggactacctgaaggacaagaaggaggtgggcttcttccagagcatccaggccctgatgcagacctgcagcgtgctggacctgaacgccttcgagagacagaacaaggccgagggcctgggcatggtgaacgaggacggcaccgtgatcaacagacagaacggcgagaaggtgatggccgacgacgagttcacccaggacctgttcagattcctgcagctgctgtgcgagggccacaacaacgacttccagaactacctgagaacccagaccggcaacaccaccaccatcaacatcatcatctgcaccgtggactacctgctgagactgcaggagagcatcagcgacttctactggtactacagcggcaaggacgtgatcgaggagcagggcaagagaaacttcagcaaggccatgagcgtggccaagcaggtgttcaacagcctgaccgagtacatccagggcccctgcaccggcaaccagcagagcctggcccacagcagactgtgggacgccgtggtgggcttcctgcacgtgttcgcccacatgatgatgaagctggcccaggacagcagccagatcgagctgctgaaggagctgctggacctgcagaaggacatggtggtgatgctgctgagcctgctggagggcaacgtggtgaacggcatgatcgccagacagatggtggacatgctggtggagagcagcagcaacgtggagatgatcctgaagttcttcgacatgttcctgaagctgaaggacatcgtgggcagcgaggccttccaggactacgtgaccgaccccagaggcctgatcagcaagaaggacttccagaaggccatggacagccagaagcagttcagcggccccgagatccagttcctgctgagctgcagcgaggccgacgagaacgagatgatcaactgcgaggagttcgccaacagattccaggagcccgccagagacatcggcttcaacgtggccgtgctgctgaccaacctgagcgagcacgtgccccacgaccccagactgcacaacttcctggagctggccgagagcatcctggagtacttcagaccctacctgggcagaatcgagatcatgggcgccagcagaagaatcgagagaatctacttcgagatcagcgagaccaacagagcccagtgggagatgccccaggtgaaggagagcaagagacagttcatcttcgacgtggtgaacgagggcggcgaggccgagaagatggagctgttcgtgagcttctgcgaggacaccatcttcgagatgcagatcgccgcccagatcagcgagcccgagggcgagcccgagaccgacgaggacgagggcgccggcgccgccgaggccggcgccgagggcgccgaggagggcgccgccggcctggagggcaccgccgccaccgccgccgccggcgccaccgccagagtggtggccgccgccggcagagccctgagaggcctgagctacagaagcctgagaagaagagtgagaagactgagaagactgaccgccagagaggccgccaccgccgtggccgccctgctgtgggccgccgtgaccagagccggcgccgccggcgccggcgccgccgccggcgccctgggcctgctgtggggcagcctgttcggcggcggcctggtggagggcgccaagaaggtgaccgtgaccgagctgctggccggcatgcccgaccccaccagcgacgaggtgcacggcgagcagcccgccggccccggcggcgacgccgacggcgagggcgccagcgagggcgccggcgacgccgccgagggcgccggcgacgaggaggaggccgtgcacgaggccggccccggcggcgccgacggcgccgtggccgtgaccgacggcggccccttcagacccgagggcgccggcggcctgggcgacatgggcgacaccacccccgccgagccccccacccccgagggcagccccatcctgaagagaaagctgggcgtggacggcgtggaggaggagctgccccccgagcccgagcccgagcccgagcccgagctggagcccgagaaggccgacgccgagaacggcgagaaggaggaggtgcccgagcccacccccgagccccccaagaagcaggccccccccagccccccccccaagaaggaggaggccggcggcgagttctggggcgagctggaggtgcagagagtgaagttcctgaactacctgagcagaaacttctacaccctgagattcctggccctgttcctggccttcgccatcaacttcatcctgctgttctacaaggtgagcgacagcccccccggcgaggacgacatggagggcagcgccgccggcgacgtgagcggcgccggcagcggcggcagcagcggctggggcctgggcgccggcgaggaggccgagggcgacgaggacgagaacatggtgtactacttcctggaggagagcaccggctacatggagcccgccctgagatgcctgagcctgctgcacaccctggtggccttcctgtgcatcatcggctacaactgcctgaaggtgcccctggtgatcttcaagagagagaaggagctggccagaaagctggagttcgacggcctgtacatcaccgagcagcccgaggacgacgacgtgaagggccagtgggacagactggtgctgaacacccccagcttccccagcaactactgggacaagttcgtgaagagaaaggtgctggacaagcacggcgacatctacggcagagagagaatcgccgagctgctgggcatggacctggccaccctggagatcaccgcccacaacgagagaaagcccaaccccccccccggcctgctgacctggctgatgagcatcgacgtgaagtaccagatctggaagttcggcgtgatcttcaccgacaacagcttcctgtacctgggctggtacatggtgatgagcctgctgggccactacaacaacttcttcttcgccgcccacctgctggacatcgccatgggcgtgaagaccctgagaaccatcctgagcagcgtgacccacaacggcaagcagctggtgatgaccgtgggcctgctggccgtggtggtgtacctgtacaccgtggtggccttcaacttcttcagaaagttctacaacaagagcgaggacgaggacgagcccgacatgaagtgcgacgacatgatgacctgctacctgttccacatgtacgtgggcgtgagagccggcggcggcatcggcgacgagatcgaggaccccgccggcgacgagtacgagctgtacagagtggtgttcgacatcaccttcttcttcttcgtgatcgtgatcctgctggccatcatccagggcctgatcatcgacgccttcggcgagctgagagaccagcaggagcaggtgaaggaggacatggagaccaagtgcttcatctgcggcatcggcagcgactacttcgacaccaccccccacggcttcgagacccacaccctggaggagcacaacctggccaactacatgttcttcctgatgtacctgatcaacaaggacgagaccgagcacaccggccaggagagctacgtgtggaagatgtaccaggagagatgctgggacttcttccccgccggcgactgcttcagaaagcagtacgaggaccagctgagctag

SEQ ID NO: 12039 - DNA, 15102 bp, Artificial Sequence
  derived and/or modified sequence
atgggcgacgccgagggcgaggacgaggtgcagttcctgagaaccgacgacgaggtggtgctgcagtgcagcgccaccgtgctgaaggagcagctgaagctgtgcctggccgccgagggcttcggcaacagactgtgcttcctggagcccaccagcaacgcccagaacgtgccccccgacctggccatctgctgcttcgtgctggagcagagcctgagcgtgagagccctgcaggagatgctggccaacaccgtggaggccggcgtggagagcagccagggcggcggccacagaaccctgctgtacggccacgccatcctgctgagacacgcccacagcagaatgtacctgagctgcctgaccaccagcagaagcatgaccgacaagctggccttcgacgtgggcctgcaggaggacgccaccggcgaggcctgctggtggaccatgcaccccgccagcaagcagagaagcgagggcgagaaggtgagagtgggcgacgacatcatcctggtgagcgtgagcagcgagagatacctgcacctgagcaccgccagcggcgagctgcaggtggacgccagcttcatgcagaccctgtggaacatgaaccccatctgcagcagatgcgaggagggcttcgtgaccggcggccacgtgctgagactgttccacggccacatggacgagtgcctgaccatcagccccgccgacagcgacgaccagagaagactggtgtactacgagggcggcgccgtgtgcacccacgccagaagcctgtggagactggagcccctgagaatcagctggagcggcagccacctgagatggggccagcccctgagagtgagacacgtgaccaccggccagtacctggccctgaccgaggaccagggcctggtggtggtggacgccagcaaggcccacaccaaggccaccagcttctgcttcagaatcagcaaggagaagctggacgtggcccccaagagagacgtggagggcatgggcccccccgagatcaagtacggcgagagcctgtgcttcgtgcagcacgtggccagcggcctgtggctgacctacgccgcccccgaccccaaggccctgagactgggcgtgctgaagaagaaggccatgctgcaccaggagggccacatggacgacgccctgagcctgaccagatgccagcaggaggagagccaggccgccagaatgatccacagcaccaacggcctgtacaaccagttcatcaagagcctggacagcttcagcggcaagcccagaggcagcggcccccccgccggcaccgccctgcccatcgagggcgtgatcctgagcctgcaggacctgatcatctacttcgagccccccagcgaggacctgcagcacgaggagaagcagagcaagctgagaagcctgagaaacagacagagcctgttccaggaggagggcatgctgagcatggtgctgaactgcatcgacagactgaacgtgtacaccaccgccgcccacttcgccgagttcgccggcgaggaggccgccgagagctggaaggagatcgtgaacctgctgtacgagctgctggccagcctgatcagaggcaacagaagcaactgcgccctgttcagcaccaacctggactggctggtgagcaagctggacagactggaggccagcagcggcatcctggaggtgctgtactgcgtgctgatcgagagccccgaggtgctgaacatcatccaggagaaccacatcaagagcatcatcagcctgctggacaagcacggcagaaaccacaaggtgctggacgtgctgtgcagcctgtgcgtgtgcaacggcgtggccgtgagaagcaaccaggacctgatcaccgagaacctgctgcccggcagagagctgctgctgcagaccaacctgatcaactacgtgaccagcatcagacccaacatcttcgtgggcagagccgagggcaccacccagtacagcaagtggtacttcgaggtgatggtggacgaggtgacccccttcctgaccgcccaggccacccacctgagagtgggctgggccctgaccgagggctacaccccctaccccggcgccggcgagggctggggcggcaacggcgtgggcgacgacctgtacagctacggcttcgacggcctgcacctgtggaccggccacgtggccagacccgtgaccagccccggccagcacctgctggcccccgaggacgtgatcagctgctgcctggacctgagcgtgcccagcatcagcttcagaatcaacggctgccccgtgcagggcgtgttcgagagcttcaacctggacggcctgttcttccccgtggtgagcttcagcgccggcgtgaaggtgagattcctgctgggcggcagacacggcgagttcaagttcctgcccccccccggctacgccccctgccacgaggccgtgctgcccagagagagactgcacctggagcccatcaaggagtacagaagagagggccccagaggcccccacctggtgggccccagcagatgcctgagccacaccgacttcgtgccctgccccgtggacaccgtgcagatcgtgctgcccccccacctggagagaatcagagagaagctggccgagaacatccacgagctgtgggccctgaccagaatcgagcagggctggacctacggccccgtgagagacgacaacaagagactgcacccctgcctggtggacttccacagcctgcccgagcccgagagaaactacaacctgcagatgagcggcgagaccctgaagaccctgctggccctgggctgccacgtgggcatggccgacgagaaggccgaggacaacctgaagaagaccaagctgcccaagacctacatgatgagcaacggctacaagcccgcccccctggacctgagccacgtgagactgacccccgcccagaccaccctggtggacagactggccgagaacggccacaacgtgtgggccagagacagagtgggccagggctggagctacagcgccgtgcaggacatccccgccagaagaaaccccagactggtgccctacagactgctggacgaggccaccaagagaagcaacagagacagcctgtgccaggccgtgagaaccctgctgggctacggctacaacatcgagccccccgaccaggagcccagccaggtggagaaccagagcagatgcgacagagtgagaatcttcagagccgagaagagctacaccgtgcagagcggcagatggtacttcgagttcgaggccgtgaccaccggcgagatgagagtgggctgggccagacccgagctgagacccgacgtggagctgggcgccgacgagctggcctacgtgttcaacggccacagaggccagagatggcacctgggcagcgagcccttcggcagaccctggcagcccggcgacgtggtgggctgcatgatcgacctgaccgagaacaccatcatcttcaccctgaacggcgaggtgctgatgagcgacagcggcagcgagaccgccttcagagagatcgagatcggcgacggcttcctgcccgtgtgcagcctgggccccggccaggtgggccacctgaacctgggccaggacgtgagcagcctgagattcttcgccatctgcggcctgcaggagggcttcgagcccttcgccatcaacatgcagagacccgtgaccacctggttcagcaagggcctgccccagttcgagcccgtgcccctggagcacccccactacgaggtgagcagagtggacggcaccgtggacacccccccctgcctgagactgacccacagaacctggggcagccagaacagcctggtggagatgctgttcctgagactgagcctgcccgtgcagttccaccagcacttcagatgcaccgccggcgccacccccctggccccccccggcctgcagccccccgccgaggacgaggccagagccgccgagcccgaccccgactacgagaacctgagaagaagcgccggcggctggagcgaggccgagaacggcaaggagggcaccgccaaggagggcgcccccggcggcaccccccaggccggcggcgaggcccagcccgccagagccgagaacgagaaggacgccaccaccgagaagaacaagaagagaggcttcctgttcaaggccaagaaggtggccatgatgacccagccccccgccacccccaccctgcccagactgccccacgacgtggtgcccgccgacaacagagacgaccccgagatcatcctgaacaccaccacctactactacagcgtgagagtgttcgccggccaggagcccagctgcgtgtgggccggctgggtgacccccgactaccaccagcacgacatgagcttcgacctgagcaaggtgagagtggtgaccgtgaccatgggcgacgagcagggcaacgtgcacagcagcctgaagtgcagcaactgctacatggtgtggggcggcgacttcgtgagccccggccagcagggcagaatcagccacaccgacctggtgatcggctgcctggtggacctggccaccggcctgatgaccttcaccgccaacggcaaggagagcaacaccttcttccaggtggagcccaacaccaagctgttccccgccgtgttcgtgctgcccacccaccagaacgtgatccagttcgagctgggcaagcagaagaacatcatgcccctgagcgccgccatgttccagagcgagagaaagaaccccgccccccagtgcccccccagactggagatgcagatgctgatgcccgtgagctggagcagaatgcccaaccacttcctgcaggtggagaccagaagagccggcgagagactgggctgggccgtgcagtgccaggagcccctgaccatgatggccctgcacatccccgaggagaacagatgcatggacatcctggagctgagcgagagactggacctgcagagattccacagccacaccctgagactgtacagagccgtgtgcgccctgggcaacaacagagtggcccacgccctgtgcagccacgtggaccaggcccagctgctgcacgccctggaggacgcccacctgcccggccccctgagagccggctactacgacctgctgatcagcatccacctggagagcgcctgcagaagcagaagaagcatgctgagcgagtacatcgtgcccctgacccccgagaccagagccatcaccctgttcccccccggcagaagcaccgagaacggccaccccagacacggcctgcccggcgtgggcgtgaccaccagcctgagacccccccaccacttcagccccccctgcttcgtggccgccctgcccgccgccggcgccgccgaggcccccgccagactgagccccgccatccccctggaggccctgagagacaaggccctgagaatgctgggcgaggccgtgagagacggcggccagcacgccagagaccccgtgggcggcagcgtggagttccagttcgtgcccgtgctgaagctggtgagcaccctgctggtgatgggcatcttcggcgacgaggacgtgaagcagatcctgaagatgatcgagcccgaggtgttcaccgaggaggaggaggaggaggacgaggaggaggagggcgaggaggaggacgaggaggagaaggaggaggacgaggaggagaccgcccaggagaaggaggacgaggagaaggaggaggaggaggccgccgagggcgagaaggaggagggcctggaggagggcctgctgcagatgaagctgcccgagagcgtgaagctgcagatgtgccacctgctggagtacttctgcgaccaggagctgcagcacagagtggagagcctggccgccttcgccgagagatacgtggacaagctgcaggccaaccagagaagcagatacggcctgctgatcaaggccttcagcatgaccgccgccgagaccgccagaagaaccagagagttcagaagccccccccaggagcagatcaacatgctgctgcagttcaaggacggcaccgacgaggaggactgccccctgcccgaggagatcagacaggacctgctggacttccaccaggacctgctggcccactgcggcatccagctggacggcgaggaggaggagcccgaggaggagaccaccctgggcagcagactgatgagcctgctggagaaggtgagactggtgaagaagaaggaggagaagcccgaggaggagagaagcgccgaggagagcaagcccagaagcctgcaggagctggtgagccacatggtggtgagatgggcccaggaggacttcgtgcagagccccgagctggtgagagccatgttcagcctgctgcacagacagtacgacggcctgggcgagctgctgagagccctgcccagagcctacaccatcagccccagcagcgtggaggacaccatgagcctgctggagtgcctgggccagatcagaagcctgctgatcgtgcagatgggcccccaggaggagaacctgatgatccagagcatcggcaacatcatgaacaacaaggtgttctaccagcaccccaacctgatgagagccctgggcatgcacgagaccgtgatggaggtgatggtgaacgtgctgggcggcggcgagagcaaggagatcagattccccaagatggtgaccagctgctgcagattcctgtgctacttctgcagaatcagcagacagaaccagagaagcatgttcgaccacctgagctacctgctggagaacagcggcatcggcctgggcatgcagggcagcacccccctggacgtggccgccgccagcgtgatcgacaacaacgagctggccctggccctgcaggagcaggacctggagaaggtggtgagctacctggccggctgcggcctgcagagctgccccatgctggtggccaagggctaccccgacatcggctggaacccctgcggcggcgagagatacctggacttcctgagattcgccgtgttcgtgaacggcgagagcgtggaggagaacgccaacgtggtggtgagactgctgatcagaaagcccgagtgcttcggccccgccctgagaggcgagggcggcagcggcctgctggccgccatcgaggaggccatcagaatcagcgaggaccccgccagagacggccccggcatcagaagagacagaagaagagagcacttcggcgaggagccccccgaggagaacagagtgcacctgggccacgccatcatgagcttctacgccgccctgatcgacctgctgggcagatgcgcccccgagatgcacctgatccaggccggcaagggcgaggccctgagaatcagagccatcctgagaagcctggtgcccctggaggacctggtgggcatcatcagcctgcccctgcagatccccaccctgggcaaggacggcgccctggtgcagcccaagatgagcgccagcttcgtgcccgaccacaaggccagcatggtgctgttcctggacagagtgtacggcatcgagaaccaggacttcctgctgcacgtgctggacgtgggcttcctgcccgacatgagagccgccgccagcctggacaccgccaccttcagcaccaccgagatggccctggccctgaacagatacctgtgcctggccgtgctgcccctgatcaccaagtgcgcccccctgttcgccggcaccgagcacagagccatcatggtggacagcatgctgcacaccgtgtacagactgagcagaggcagaagcctgaccaaggcccagagagacgtgatcgaggactgcctgatgagcctgtgcagatacatcagacccagcatgctgcagcacctgctgagaagactggtgttcgacgtgcccatcctgaacgagttcgccaagatgcccctgaagctgctgaccaaccactacgagagatgctggaagtactactgcctgcccaccggctgggccaacttcggcgtgaccagcgaggaggagctgcacctgaccagaaagctgttctggggcatcttcgacagcctggcccacaagaagtacgaccccgagctgtacagaatggccatgccctgcctgtgcgccatcgccggcgccctgccccccgactacgtggacgccagctacagcagcaaggccgagaagaaggccaccgtggacgccgagggcaacttcgaccccagacccgtggagaccctgaacgtgatcatccccgagaagctggacagcttcatcaacaagttcgccgagtacacccacgagaagtgggccttcgacaagatccagaacaactggagctacggcgagaacatcgacgaggagctgaagacccaccccatgctgagaccctacaagaccttcagcgagaaggacaaggagatctacagatggcccatcaaggagagcctgaaggccatgatcgcctgggagtggaccatcgagaaggccagagagggcgaggaggagaagaccgagaagaagaagaccagaaagatcagccagagcgcccagacctacgaccccagagagggctacaacccccagccccccgacctgagcgccgtgaccctgagcagagagctgcaggccatggccgagcagctggccgagaactaccacaacacctggggcagaaagaagaagcaggagctggaggccaagggcggcggcacccaccccctgctggtgccctacgacaccctgaccgccaaggagaaggccagagacagagagaaggcccaggagctgctgaagttcctgcagatgaacggctacgccgtgaccagaggcctgaaggacatggagctggacagcagcagcatcgagaagagattcgccttcggcttcctgcagcagctgctgagatggatggacatcagccaggagttcatcgcccacctggaggccgtggtgagcagcggcagagtggagaagagcccccacgagcaggagatcaagttcttcgccaagatcctgctgcccctgatcaaccagtacttcaccaaccactgcctgtacttcctgagcacccccgccaaggtgctgggcagcggcggccacgccagcaacaaggagaaggagatgatcaccagcctgttctgcaagctggccgccctggtgagacacagagtgagcctgttcggcaccgacgcccccgccgtggtgaactgcctgcacatcctggccagaagcctggacgccagaaccgtgatgaagagcggccccgagatcgtgaaggccggcctgagaagcttcttcgagagcgccagcgaggacatcgagaagatggtggagaacctgagactgggcaaggtgagccaggccagaacccaggtgaagggcgtgggccagaacctgacctacaccaccgtggccctgctgcccgtgctgaccaccctgttccagcacatcgcccagcaccagttcggcgacgacgtgatcctggacgacgtgcaggtgagctgctacagaaccctgtgcagcatctacagcctgggcaccaccaagaacacctacgtggagaagctgagacccgccctgggcgagtgcctggccagactggccgccgccatgcccgtggccttcctggagccccagctgaacgagtacaacgcctgcagcgtgtacaccaccaagagccccagagagagagccatcctgggcctgcccaacagcgtggaggagatgtgccccgacatccccgtgctggagagactgatggccgacatcggcggcctggccgagagcggcgccagatacaccgagatgccccacgtgatcgagatcaccctgcccatgctgtgcagctacctgcccagatggtgggagagaggccccgaggccccccccagcgccctgcccgccggcgccccccccccctgcaccgccgtgaccagcgaccacctgaacagcctgctgggcaacatcctgagaatcatcgtgaacaacctgggcatcgacgaggccagctggatgaagagactggccgtgttcgcccagcccatcgtgagcagagccagacccgagctgctgcagagccacttcatccccaccatcggcagactgagaaagagagccggcaaggtggtgagcgaggaggagcagctgagactggaggccaaggccgaggcccaggagggcgagctgctggtgagagacgagttcagcgtgctgtgcagagacctgtacgccctgtaccccctgctgatcagatacgtggacaacaacagagcccagtggctgaccgagcccaaccccagcgccgaggagctgttcagaatggtgggcgagatcttcatctactggagcaagagccacaacttcaagagagaggagcagaacttcgtggtgcagaacgagatcaacaacatgagcttcctgaccgccgacaacaagagcaagatggccaaggccggcgacatccagagcggcggcagcgaccaggagagaaccaagaagaagagaagaggcgacagatacagcgtgcagaccagcctgatcgtggccaccctgaagaagatgctgcccatcggcctgaacatgtgcgcccccaccgaccaggacctgatcaccctggccaagaccagatacgccctgaaggacaccgacgaggaggtgagagagttcctgcacaacaacctgcacctgcagggcaaggtggagggcagccccagcctgagatggcagatggccctgtacagaggcgtgcccggcagagaggaggacgccgacgaccccgagaagatcgtgagaagagtgcaggaggtgagcgccgtgctgtactacctggaccagaccgagcacccctacaagagcaagaaggccgtgtggcacaagctgctgagcaagcagagaagaagagccgtggtggcctgcttcagaatgacccccctgtacaacctgcccacccacagagcctgcaacatgttcctggagagctacaaggccgcctggatcctgaccgaggaccacagcttcgaggacagaatgatcgacgacctgagcaaggccggcgagcaggaggaggaggaggaggaggtggaggagaagaagcccgaccccctgcaccagctggtgctgcacttcagcagaaccgccctgaccgagaagagcaagctggacgaggactacctgtacatggcctacgccgacatcatggccaagagctgccacctggaggagggcggcgagaacggcgaggccgaggaggaggtggaggtgagcttcgaggagaagcagatggagaagcagagactgctgtaccagcaggccagactgcacaccagaggcgccgccgagatggtgctgcagatgatcagcgcctgcaagggcgagaccggcgccatggtgagcagcaccctgaagctgggcatcagcatcctgaacggcggcaacgccgaggtgcagcagaagatgctggactacctgaaggacaagaaggaggtgggcttcttccagagcatccaggccctgatgcagacctgcagcgtgctggacctgaacgccttcgagagacagaacaaggccgagggcctgggcatggtgaacgaggacggcaccgtgggcgagaaggtgatggccgacgacgagttcacccaggacctgttcagattcctgcagctgctgtgcgagggccacaacaacgacttccagaactacctgagaacccagaccggcaacaccaccaccatcaacatcatcatctgcaccgtggactacctgctgagactgcaggagagcatcagcgacttctactggtactacagcggcaaggacgtgatcgaggagcagggcaagagaaacttcagcaaggccatgagcgtggccaagcaggtgttcaacagcctgaccgagtacatccagggcccctgcaccggcaaccagcagagcctggcccacagcagactgtgggacgccgtggtgggcttcctgcacgtgttcgcccacatgatgatgaagctggcccaggacagcagccagatcgagctgctgaaggagctgctggacctgcagaaggacatggtggtgatgctgctgagcctgctggagggcaacgtggtgaacggcatgatcgccagacagatggtggacatgctggtggagagcagcagcaacgtggagatgatcctgaagttcttcgacatgttcctgaagctgaaggacatcgtgggcagcgaggccttccaggactacgtgaccgaccccagaggcctgatcagcaagaaggacttccagaaggccatggacagccagaagcagttcagcggccccgagatccagttcctgctgagctgcagcgaggccgacgagaacgagatgatcaactgcgaggagttcgccaacagattccaggagcccgccagagacatcggcttcaacgtggccgtgctgctgaccaacctgagcgagcacgtgccccacgaccccagactgcacaacttcctggagctggccgagagcatcctggagtacttcagaccctacctgggcagaatcgagatcatgggcgccagcagaagaatcgagagaatctacttcgagatcagcgagaccaacagagcccagtgggagatgccccaggtgaaggagagcaagagacagttcatcttcgacgtggtgaacgagggcggcgaggccgagaagatggagctgttcgtgagcttctgcgaggacaccatcttcgagatgcagatcgccgcccagatcagcgagcccgagggcgagcccgagaccgacgaggacgagggcgccggcgccgccgaggccggcgccgagggcgccgaggagggcgccgccggcctggagggcaccgccgccaccgccgccgccggcgccaccgccagagtggtggccgccgccggcagagccctgagaggcctgagctacagaagcctgagaagaagagtgagaagactgagaagactgaccgccagagaggccgccaccgccgtggccgccctgctgtgggccgccgtgaccagagccggcgccgccggcgccggcgccgccgccggcgccctgggcctgctgtggggcagcctgttcggcggcggcctggtggagggcgccaagaaggtgaccgtgaccgagctgctggccggcatgcccgaccccaccagcgacgaggtgcacggcgagcagcccgccggccccggcggcgacgccgacggcgagggcgccagcgagggcgccggcgacgccgccgagggcgccggcgacgaggaggaggccgtgcacgaggccggccccggcggcgccgacggcgccgtggccgtgaccgacggcggccccttcagacccgagggcgccggcggcctgggcgacatgggcgacaccacccccgccgagccccccacccccgagggcagccccatcctgaagagaaagctgggcgtggacggcgtggaggaggagctgccccccgagcccgagcccgagcccgagcccgagctggagcccgagaaggccgacgccgagaacggcgagaaggaggaggtgcccgagcccacccccgagccccccaagaagcaggccccccccagccccccccccaagaaggaggaggccggcggcgagttctggggcgagctggaggtgcagagagtgaagttcctgaactacctgagcagaaacttctacaccctgagattcctggccctgttcctggccttcgccatcaacttcatcctgctgttctacaaggtgagcgacagcccccccggcgaggacgacatggagggcagcgccgccggcgacgtgagcggcgccggcagcggcggcagcagcggctggggcctgggcgccggcgaggaggccgagggcgacgaggacgagaacatggtgtactacttcctggaggagagcaccggctacatggagcccgccctgagatgcctgagcctgctgcacaccctggtggccttcctgtgcatcatcggctacaactgcctgaaggtgcccctggtgatcttcaagagagagaaggagctggccagaaagctggagttcgacggcctgtacatcaccgagcagcccgaggacgacgacgtgaagggccagtgggacagactggtgctgaacacccccagcttccccagcaactactgggacaagttcgtgaagagaaaggtgctggacaagcacggcgacatctacggcagagagagaatcgccgagctgctgggcatggacctggccaccctggagatcaccgcccacaacgagagaaagcccaaccccccccccggcctgctgacctggctgatgagcatcgacgtgaagtaccagatctggaagttcggcgtgatcttcaccgacaacagcttcctgtacctgggctggtacatggtgatgagcctgctgggccactacaacaacttcttcttcgccgcccacctgctggacatcgccatgggcgtgaagaccctgagaaccatcctgagcagcgtgacccacaacggcaagcagctggtgatgaccgtgggcctgctggccgtggtggtgtacctgtacaccgtggtggccttcaacttcttcagaaagttctacaacaagagcgaggacgaggacgagcccgacatgaagtgcgacgacatgatgacctgctacctgttccacatgtacgtgggcgtgagagccggcggcggcatcggcgacgagatcgaggaccccgccggcgacgagtacgagctgtacagagtggtgttcgacatcaccttcttcttcttcgtgatcgtgatcctgctggccatcatccagggcctgatcatcgacgccttcggcgagctgagagaccagcaggagcaggtgaaggaggacatggagaccaagtgcttcatctgcggcatcggcagcgactacttcgacaccaccccccacggcttcgagacccacaccctggaggagcacaacctggccaactacatgttcttcctgatgtacctgatcaacaaggacgagaccgagcacaccggccaggagagctacgtgtggaagatgtaccaggagagatgctgggacttcttccccgccggcgactgcttcagaaagcagtacgaggaccagctgagctag

SEQ ID NO: 12040 - DNA, 2031 bp, Artificial Sequence
  derived and/or modified sequence
atgaagagcggccccgagatcgtgaaggccggcctgagaagcttcttcgagagcgccagcgaggacatcgagaagatggtggagaacctgagactgggcaaggtgagccaggccagaacccaggtgaagggcgtgggccagaacctgacctacaccaccgtggccctgctgcccgtgctgaccaccctgttccagcacatcgcccagcaccagttcggcgacgacgtgatcctggacgacgtgcaggtgagctgctacagaaccctgtgcagcatctacagcctgggcaccaccaagaacacctacgtggagaagctgagacccgccctgggcgagtgcctggccagactggccgccgccatgcccgtggccttcctggagccccagctgaacgagtacaacgcctgcagcgtgtacaccaccaagagccccagagagagagccatcctgggcctgcccaacagcgtggaggagatgtgccccgacatccccgtgctggagagactgatggccgacatcggcggcctggccgagagcggcgccagatacaccgagatgccccacgtgatcgagatcaccctgcccatgctgtgcagctacctgcccagatggtgggagagaggccccgaggccccccccagcgccctgcccgccggcgccccccccccctgcaccgccgtgaccagcgaccacctgaacagcctgctgggcaacatcctgagaatcatcgtgaacaacctgggcatcgacgaggccagctggatgaagagactggccgtgttcgcccagcccatcgtgagcagagccagacccgagctgctgcagagccacttcatccccaccatcggcagactgagaaagagagccggcaaggtggtgagcgaggaggagcagctgagactggaggccaaggccgaggcccaggagggcgagctgctggtgagagacgagttcagcgtgctgtgcagagacctgtacgccctgtaccccctgctgatcagatacgtggacaacaacagagcccagtggctgaccgagcccaaccccagcgccgaggagctgttcagaatggtgggcgagatcttcatctactggagcaagagccacaacttcaagagagaggagcagaacttcgtggtgcagaacgagatcaacaacatgagcttcctgaccgccgacaacaagagcaagatggccaaggccggcgacatccagagcggcggcagcgaccaggagagaaccaagaagaagagaagaggcgacagatacagcgtgcagaccagcctgatcgtggccaccctgaagaagatgctgcccatcggcctgaacatgtgcgcccccaccgaccaggacctgatcaccctggccaagaccagatacgccctgaaggacaccgacgaggaggtgagagagttcctgcacaacaacctgcacctgcagggcaaggtggagggcagccccagcctgagatggcagatggccctgtacagaggcgtgcccggcagagaggaggacgccgacgaccccgagaagatcgtgagaagagtgcaggaggtgagcgccgtgctgtactacctggaccagaccgagcacccctacaagagcaagaaggccgtgtggcacaagctgctgagcaagcagagaagaagagccgtggtggcctgcttcagaatgacccccctgtacaacctgcccacccacagagcctgcaacatgttcctggagagctacaaggccgcctggatcctgaccgaggaccacagcttcgaggacagaatgatcgacgacctgagcaaggccggcgagcaggaggaggaggaggaggaggtggaggagaagaagcccgaccccctgcaccagctggtgctgcacttcagcagaaccgccctgaccgagaagagcaagctggacgaggactacctgtacatggcctacgccgacatcatggccaagagctgccacctggaggagggcggcgagaacggcgaggccgaggaggaggtggaggtgagcttcgaggagaagcagtag

SEQ ID NO: 12041 - protein, 405 aa, Artificial Sequence
  derived and/or modified sequence
MAASGKTSKSEPNHVIFKKISRDKSVTIYLGNRDYIDHVSQVQPVDGVVLVDPDLVKGKKVYVTLTCAFRYGQEDIDVIGLTFRRDLYFSRVQVYPPVGAASTPTKLQESLLKKLGSNTYPFLLTFPDYLPCSVMLQPAPQDSGKSCGVDFEVKAFATDSTDAEEDKIPKKSSVRLLIRKVQHAPLEMGPQPRAEAAWQFFMSDKPLHLAVSLNKEIYFHGEPIPVTVTVTNNTEKTVKKIKAFVEQVANVVLYSSDYYVKPVAMEEAQEKVPPNSTLTKTLTLLPLLANNRERRGIALDGKIKHEDTNLASSTIIKEGIDRTVLGILVSYQIKVKLTVSGMTGRQKASEVATEVPFRLMHPQPEDPGQFSYQDANLVFEEFARHNLKDAGEAEEGKRDKNDVDE

SEQ ID NO: 12042 - protein, 405 aa, Artificial Sequence
  derived and/or modified sequence
MAASGKTSKSEPNHVIFKKISRDKSVTIYLGNRDYIDHVSQVQPVDGVVLVDPDLVKGKKVYVTLTCAFRYGQEDIDVIGLTFRRDLYFSRVQVYPPVGAASTPTKLQESLLKKLGSNTYPFLLTFPDYLPCSVMLQPAPQDSGKSCGVDFEVKAFATDSTDAEEDKIPKKSSVRLLIRKVQHAPLEMGPQPRAEAAWQFFMSDKPLHLAVSLNKEIYFHGEPIPVTVTVTNNTEKTVKKIKAFVEQVANVVLYSSDYYVKPVAMEEAQEKVPPNSTLTKTLTLLPLLANNRERRGIALDGKIKHEDTNLASSTIIKEGIDRTVLGILVSYQIKVKLTVSGFLGELTSSEVATEVPFRLMHPQPEDPAKESYQDANLVFEEFARHNLKDAGEAEEGKRDKNDVDE

SEQ ID NO: 12043 - protein, 169 aa, Artificial Sequence
  derived and/or modified sequence
MAASGKTSKSEPNHVIFKKISRDKSVTIYLGNRDYIDHVSQVQPVDGVVLVDPDLVKGKKVYVTLTCAFRYGQEDIDVIGLTFRRDLYFSRVQVYPPVGAASTPTKLQESLLKKLGSNTYPFLLTFPDYLPCSVMLQPAPQDSGKSCGVDFEVKAFATDSTDAEEDKIP

SEQ ID NO: 12044 - protein, 67 aa, Artificial Sequence
  derived and/or modified sequence
MAASGKTSKSEPNHVIFKKISRDKSVSGAQVTIYLGNRDYIDHVSQVQPVDGVVLVDPDLVKGKKVS

SEQ ID NO: 12045 - DNA, 1218 bp, Artificial Sequence
  derived and/or modified sequence
atggcagcaagtgggaaaaccagtaaatctgagcctaaccatgtgatatttaagaaaatcagccgagacaagtcagtgaccatctatctcggcaacagagactacattgatcacgtcagtcaggttcaacccgttgacggagtggttcttgtagatcccgacctcgtgaagggtaagaaagtttatgtgacgctgacctgcgccttcaggtacgggcaagaagacattgacgtcattgggctgacttttcgaagagatttgtatttcagtcgggtacaagtgtaccctcctgtgggcgcggcttctactcctaccaagctgcaggagtcactcttgaagaaactcggatcaaacacatatccctttctcctgacatttccagactatctgccttgctcggttatgctccagcccgcgccccaggacagtgggaagagctgtggagtcgactttgaagtgaaagcctttgcgaccgattcaacggacgccgaagaagacaagatacctaagaagtcaagcgtgcgcctgcttatacgcaaagtacagcacgcccccttggagatgggtcctcaaccgcgggcagaggccgcatggcaattcttcatgtcagataaacctctccacctagccgtgagccttaataaagagatctacttccacggggaacccatacccgtaacagtgaccgtgactaacaacaccgagaaaaccgtaaaaaaaatcaaagcctttgtggaacaggttgccaatgtagttttatattcaagtgactattacgtgaagccagtggctatggaagaggcacaggaaaaagtccctccaaacagcacactgactaagaccttgactctacttccactgttggcgaataatcgggaacggagaggcattgcactggatggaaagatcaagcatgaagatactaacctggcaagctcgacaataattaaggaggggatcgaccgaacggtgcttggcatcctggtgagttaccagattaaggtgaaactgacggtatccggcatgacaggtagacagaaagctagtgaggtggctaccgaggttcctttcaggctgatgcacccccagcctgaagaccctggccaattctcctaccaagacgctaacttagtcttcgaggaatttgcccgccataatctgaaagacgccggcgaggccgaagaggggaagcgggacaagaacgacgtggacgaatag

SEQ ID NO: 12046 - DNA, 1218 bp, Artificial Sequence
  derived and/or modified sequence
atggccgccagtggaaaaaccagtaagtcggaacccaatcacgtcattttcaaaaagatctcgcgtgacaagtccgtcaccatctaccttggcaaccgcgattacatagaccatgttagccaggtgcaaccagttgacggagtagtgcttgtcgacccagaccttgtgaaaggaaaaaaagtctatgtgacattgacatgcgcttttaggtatgggcaagaggatatcgatgtgattggacttacgttccgcagagacctatacttctcaagggtccaggtttacccccccgtaggcgcggcttctacacccaccaagctacaggagtccctcctcaaaaaattggggtctaacacatatccgtttctcctgacttttcccgactacctgccctgttccgtgatgctccagccggcccctcaggactcagggaaaagctgcggagttgacttcgaagtcaaagccttcgctactgattctaccgacgccgaggaagataaaatccccaaaaagtcatccgtacgacttctgatacgcaaagttcagcacgcacctctggagatgggaccacagccccgcgcggaagctgcatggcagttttttatgtccgataaaccactgcacttggcagtgtcactcaacaaagagatctattttcacggcgagccaattcctgtgaccgtgacggttaccaataacacagagaaaacggtcaaaaaaattaaggcgttcgtggagcaggtcgctaacgtggtactgtacagctccgactattatgttaagccggtggccatggaagaggcacaggagaaagtcccaccaaacagcaccctgacaaagaccctgaccctactgccccttctcgccaataaccgagagagaagagggattgcgctggatggaaagatcaagcatgaggacacaaatctggcatcaagcaccattatcaaagaaggcatcgatagaacggtactgggtatcctcgtctcctaccagattaaggttaagctgacagtgtccggttttttgggagaactgacatctagcgaggtcgccaccgaggttccctttagacttatgcatccacaaccagaggacccagcaaaggagtcataccaggatgccaacttagtattcgaagagtttgcccggcacaacctgaaagatgcaggcgaagccgaggagggcaagagagacaagaatgacgtggatgagtag

SEQ ID NO: 12047 - DNA, 1218 bp, Artificial Sequence
  derived and/or modified sequence
atggccgccagcggcaagaccagcaagtctgagcccaaccacgtgatcttcaagaagatcagccgggacaagtctgtgaccatctacctgggcaacagagactacatcgaccacgtgtcccaggtgcagcctgtggatggagtggtgctggtggaccctgacctggtgaagggcaagaaggtgtatgtgaccctgacctgtgccttccgctatggccaggaggacattgatgtgattggcctgaccttccggcgggacctgtacttcagccgggtgcaggtgtacccacctgtgggcgccgccagcacccccaccaagctgcaggagagcctgctgaagaagctgggcagcaacacctaccccttcctgctgaccttcccagactacctgccctgcagcgtgatgctgcagcctgccccccaggacagcggcaagagctgtggggtggactttgaggtgaaggcctttgccacagacagcacagatgctgaggaggacaagatccccaagaagagctctgtgcggctgctgatcaggaaggtgcagcacgcccccctggagatgggcccccagcccagggctgaggccgcctggcagttcttcatgtctgacaagcccctgcacctggccgtgtccctgaacaaggagatctacttccacggggagcccatccctgtgacagtgacagtgaccaacaacacagagaagacagtgaagaagatcaaggcctttgtggagcaggtggccaacgtggtgctgtacagcagtgactactacgtgaagcctgtggccatggaggaggcccaggagaaggtgccccccaacagcaccctgaccaagaccctgaccctgctgcccctgctggccaacaaccgggagcggcggggcatcgccctggatggcaagatcaagcatgaggacaccaacctggccagcagcaccatcatcaaggagggcatcgacagaacagtgctgggcatcctggtgtcctaccagatcaaggtgaagctgactgtgtctggcatgacaggccggcagaaggccagcgaggtggccacagaggtgcccttccggctgatgcacccccagccagaagatcctggccagttctcctaccaggatgccaacctggtgtttgaggagtttgcccggcacaacctgaaggatgctggggaggccgaggagggcaagagggacaagaatgatgtggatgaatag

SEQ ID NO: 12048 - DNA, 1218 bp, Artificial Sequence
  derived and/or modified sequence
atggccgccagcggcaagaccagcaagtctgagcccaaccacgtgatcttcaagaagatcagccgggacaagtctgtgaccatctacctgggcaacagagactacatcgaccacgtgtcccaggtgcagcctgtggatggagtggtgctggtggaccctgacctggtgaagggcaagaaggtgtatgtgaccctgacctgtgccttccgctatggccaggaggacattgatgtgattggcctgaccttccggcgggacctgtacttcagccgggtgcaggtgtacccacctgtgggcgccgccagcacccccaccaagctgcaggagagcctgctgaagaagctgggcagcaacacctaccccttcctgctgaccttcccagactacctgccctgcagcgtgatgctgcagcctgccccccaggacagcggcaagagctgtggggtggactttgaggtgaaggcctttgccacagacagcacagatgctgaggaggacaagatccccaagaagagctctgtgcggctgctgatcaggaaggtgcagcacgcccccctggagatgggcccccagcccagggctgaggccgcctggcagttcttcatgtctgacaagcccctgcacctggccgtgtccctgaacaaggagatctacttccacggggagcccatccctgtgacagtgacagtgaccaacaacacagagaagacagtgaagaagatcaaggcctttgtggagcaggtggccaacgtggtgctgtacagcagtgactactacgtgaagcctgtggccatggaggaggcccaggagaaggtgccccccaacagcaccctgaccaagaccctgaccctgctgcccctgctggccaacaaccgggagcggcggggcatcgccctggatggcaagatcaagcatgaggacaccaacctggccagcagcaccatcatcaaggagggcatcgacagaacagtgctgggcatcctggtgtcctaccagatcaaggtgaagctgactgtgtctggcttcctgggggagctgaccagcagcgaggtggccacagaggtgcccttccggctgatgcacccccagccagaagatcctgccaaggagagctaccaggatgccaacctggtgtttgaggagtttgcccggcacaacctgaaggatgctggggaggccgaggagggcaagagggacaagaatgatgtggatgaatag

SEQ ID NO: 12049 - DNA, 1218 bp, Artificial Sequence
  derived and/or modified sequence
atggccgccagcggcaagaccagcaagagcgagcccaaccacgtgatcttcaaaaagatctcacgtgacaaatctgtaaccatctatctaggaaaccgcgattacatcgaccacgtctcccaggtccaacccgtcgacggcgttgtacttgtcgatccagatctggtcaagggcaagaaggtctatgttacactgacctgtgctttccggtacggccaagaggacatcgatgtgattggactgacattcaggcgggacctatactttagtcgcgttcaagtgtacccacctgtgggcgcagcctccactccgacaaagctgcaagagagcttgctgaagaaattgggctcaaacacataccctttcttgctgacgttccctgattacctgccctgctctgtaatgctgcagccagccccccaggattcagggaaatcgtgcggtgtagacttcgaagtcaaggctttcgccacagattctaccgacgcggaggaagacaaaatccccaaaaaatcatcggtgagattgctaatcaggaaagtacaacacgcccctctggagatggggccacagccacgggctgaggccgcctggcagttcttcatgtctgataagcctctgcatctcgctgtgtcgctcaacaaagagatctactttcatggagaaccaatcccagtcaccgtgacggtcactaataatacagaaaagacagttaagaaaattaaggcctttgtcgagcaagtagccaatgttgtcctctactcttcagattactacgttaagccagtagcaatggaggaggcacaggagaaagtccccccaaatagtaccctgactaaaacactgaccttgctacctcttcttgccaacaatcgagagcgccggggcatcgctctcgatggtaagataaagcatgaggatacaaacctggctagctccaccataattaaggaaggcatagaccggaccgtgctggggatattagtgtcttaccaaataaaagtgaaactgaccgtgtctggaatgaccggtcgtcaaaaagcatcagaagtggctactgaagtgccattccgactgatgcacccacagcctgaggatcccggtcaattcagttaccaggacgccaacctggtctttgaggaattcgccaggcataatctcaaagacgccggcgaggctgaggaaggaaagcgcgataaaaatgatgtcgatgagtag

SEQ ID NO: 12050 - DNA, 1218 bp, Artificial Sequence
  derived and/or modified sequence
atggccgccagcggcaagaccagcaagagcgagcccaaccacgtgatatttaaaaagatctcacgcgataaatccgtcacgatatatcttggtaatcgggactacattgatcatgtttcgcaggtacagccagtggacggcgtcgtactggtcgacccagacctggtgaagggtaagaaggtctatgtcaccctaacgtgcgcattccgatatggacaggaggatattgacgtgatcggactcacctttcggagggatctctatttctcccgtgtccaggtctaccctccggtgggcgcagccagtacgcccacaaagctccaggaatctttactgaaaaagctcggcagcaacacttacccatttttgctgacctttcccgactacctgccttgtagtgtgatgctgcaacccgcaccacaagattctggcaaatcttgtggcgtggatttcgaggtgaaggctttcgccacagactcaacggacgccgaggaggacaaaatacctaaaaagagcagcgtcaggcttctgattcgtaaagtgcaacacgcccccctagagatggggccacagccacgggccgaggcagcatggcagttctttatgtctgataagcctctgcatcttgcggtctcattgaacaaagagatttatttccacggagaaccaatccccgttacggtgaccgtaaccaacaataccgagaagacggttaagaagataaaggcttttgttgagcaggtggccaatgttgtactgtactctagcgactattacgtgaagcctgtagcgatggaggaggctcaagaaaaggtgccacccaattccacattgactaagacacttacgctcctcccgctgctcgcgaacaatcgcgaaaggcgcggcattgcccttgatggaaaaatcaagcatgaagacactaatcttgccagctcgaccataataaaagaaggcatagaccgaactgttttggggatcctggttagctatcagatcaaggttaaattgaccgtttccgggtttctgggcgaacttacctcgagcgaggtagctactgaggtcccttttaggctgatgcaccctcaacctgaggatcctgccaaggagagctaccaagacgccaacctggtgttcgaggagtttgctcggcacaatcttaaggacgctggggaagctgaggagggaaaacgagacaaaaacgacgtggacgaatag

SEQ ID NO: 12051 - DNA, 1218 bp, Artificial Sequence
  derived and/or modified sequence
atggccgcatcaggtaaaacatcaaagagcgagcccaatcacgttatctttaaaaagatttccagggacaaatctgtgaccatttacctgggcaatagggattatattgatcacgtgagtcaggtccagcccgtcgatggtgtggtgctggtggaccctgacttggtaaaaggcaagaaggtgtatgtgaccctgacttgcgctttccggtatggacaggaggatatcgatgtgatagggctaacctttcgcagggatctgtactttagccgagttcaagtgtatccacccgtgggggcagcaagcacaccaaccaagctccaggagtccttgctcaaaaaattgggctcaaatacctatccttttttactgacttttcccgactatctcccgtgttccgtgatgctccagcctgcccctcaggattcgggaaagtcttgtggagtggatttcgaagtgaaagccttcgcaacagacagcaccgacgctgaagaggacaaaatacctaagaaatcttcagttcgcctgctgatcagaaaggtgcagcacgccccactggaaatggggccacagcccagggctgaggcggcatggcagttcttcatgagcgacaaacctcttcacttagccgtgtctttgaacaaggaaatatacttccatggcgagccaatcccagttactgtcactgtgaccaataacactgagaaaacagttaaaaaaataaaggcctttgtggagcaggtggccaatgtcgtgctgtattcatctgactactatgtaaaacccgtagctatggaagaggcccaggaaaaagtgcccccaaacagcacgctaacgaaaacactgactctgctcccattgctcgccaacaaccgggagcgacgcggaattgccctggatggcaaaattaaacacgaagataccaacctcgcctcgtccacgatcatcaaagagggtattgacaggacggtacttgggatcctggtgagctaccagattaaagtgaagctgacagtgagcggaatgaccggacgccaaaaggctagcgaggttgccaccgaggtccccttcagactgatgcaccctcagcctgaggaccctggtcagttttcctaccaggacgccaacctggttttcgaggaattcgctagacacaacctgaaggatgcaggcgaggctgaagaaggaaaaagggataagaatgatgtcgacgaatag

SEQ ID NO: 12052 - DNA, 1218 bp, Artificial Sequence
  derived and/or modified sequence
atggctgcttctggcaagactagtaaatctgagcccaaccacgtgattttcaaaaaaatctcacgggataagtctgtgactatttacctcgggaacagggactatatcgatcatgtgagtcaagtacagcccgtggatggcgttgtgctggttgacccagatcttgtgaaaggcaagaaggtgtatgtgaccctgacctgtgccttccgctacggtcaagaggacattgatgtgatcggactgacattccggagggacctgtacttcagccgggtacaggtgtaccctcctgtgggcgcagcctccacacccacaaaactgcaagagtcattgttaaagaaacttggctcgaacacttaccctttcctgctgaccttccctgactatctgccatgcagtgttatgttgcagcccgcaccccaagattctggtaagtcttgcggggtggatttcgaggtcaaggcatttgctacagacagcactgatgcagaagaggataagataccaaaaaagtcttccgtccgcctcctcatccggaaagtgcagcatgcccctttagagatgggccctcagcctcgcgcagaggctgcgtggcagtttttcatgagtgataaacccctgcatctggccgtctcgctgaataaggagatctattttcacggcgagccgattccggtcactgtgactgtcacaaataacactgagaaaaccgtgaaaaaaatcaaagccttcgtcgagcaggtcgccaacgtcgtcctatacagctctgactattatgtaaagcccgtcgcgatggaggaagctcaggagaaagtgcccccaaactccacgttgaccaagacgctgacactgctgccgctgctggccaataacagagaacggagggggatcgcactcgacggtaaaattaagcacgaggacaccaatctggcatcttccactattatcaaggaaggaatagataggacagtcctcggaatcctcgtgtcgtatcagatcaaggtcaaactgacagtaagcggattcctgggtgagttgacaagctccgaagtggcaaccgaggtgccttttcgtctcatgcatccccagccagaggaccctgcaaaagaaagttaccaagacgcgaacctcgtgttcgaagagtttgccagacacaacttgaaagatgccggagaggccgaagaaggcaagcgggataagaatgatgtagacgagtag

SEQ ID NO: 12053 - DNA, 1749 bp, Artificial Sequence
  derived and/or modified sequence
gtcagctgggtgactcatacatctgtgagaccctccgtatggagaccggggcggggggtgttgcttaatgcttagaactgctgaaactaccagttcactgtctcagcactaatccaactctgctccttaagtgggatttggcttttagacattgagacctggatgctgggcatcctcgctagatcccctacaaattccccacatacgtaggccaggagcctcagcggtgccccttcaggctcatctggcaagacggtaccagcttgctcagaacaggggctggctattcatcatctcagagcatagagaccctctccttgccacccggcccttcccacctggttggtgacaaatcacaaggtggtagaagttgccagggacagataacatggcagccagcgggaagaccagcaagtccgaaccgaaccatgttatcttcaagaagatctcccgggacaaatcggtgaccatctacctggggaacagagactacatagaccatgtcagccaagtccagcctgtggatggtgtcgtgttggttgatcctgatcttgtgaagggaaagaaagtgtatgtcactctgacctgcgccttccgctatggccaagaggacattgacgtgatcggcttgaccttccgcagggacctgtacttctcccgggtccaggtgtatcctcctgtgggggccgcgagcacccccacaaaactgcaagagagcctgcttaaaaagctggggagcaacacgtacccctttctcctgacgtttcctgactacttgccctgttcagtgatgttgcagccagctccacaagattcagggaagtcctgtggggttgactttgaggtcaaagcattcgccacagacagcaccgatgccgaagaggacaaaatccccaagaagagctccgtgcgattactgatccgcaaagtacagcatgccccacttgagatgggtccccagccccgagctgaggcggcctggcagttcttcatgtctgacaagcccctgcaccttgcggtctctctcaacaaagagatctatttccatggggagcccatccctgtgaccgtgactgtcaccaataacacagagaagaccgtgaagaagattaaagcattcgtggaacaggtggccaatgtggttctctactcgagtgattattacgtcaagcccgtggctatggaggaagcgcaagaaaaagtgccaccaaacagcactttgaccaagacgctgacgctgctgcccttgctggctaacaatcgagaaaggagaggcattgccctggatgggaaaatcaagcacgaggacacaaaccttgcctccagcaccatcattaaggagggcatagaccggaccgtcctgggaatcctggtgtcttaccagatcaaggtgaagctcacagtgtcaggaatgactgggagacagaaagcaagtgaagtcgccactgaggtcccattccgcctcatgcaccctcagcctgaggacccaggtcagtttagttatcaggatgcaaatttagtttttgaggagtttgctcgccataatctgaaagatgcaggagaagctgaggaggggaagagagacaagaatgacgttgatgagtgaagatgtcggctcaggatgccggaaaatgacctgtagttaccagtgcaacgagcaaagccccacagtttagtcctttggagttatgctgcgtatgaaaggatgagtcttcttccgagaaataaagcttgtttgttctcccctgg

SEQ ID NO: 12054 - DNA, 1591 bp, Artificial Sequence
  derived and/or modified sequence
ctggatgctgggcatcctcgctagatcccctacaaattccccacatacgtaggccaggagcctcagcggtgccccttcaggctcatctggcaagacggtaccagcttgctcagaacaggggctggctattcatcatctcagagcatagagaccctctccttgccacccggcccttcccacctggttggtgacaaatcacaaggtggtagaagttgccagggacagataacatggcagccagcgggaagaccagcaagtccgaaccgaaccatgttatcttcaagaagatctcccgggacaaatcggtgaccatctacctggggaacagagactacatagaccatgtcagccaagtccagcctgtggatggtgtcgtgttggttgatcctgatcttgtgaagggaaagaaagtgtatgtcactctgacctgcgccttccgctatggccaagaggacattgacgtgatcggcttgaccttccgcagggacctgtacttctcccgggtccaggtgtatcctcctgtgggggccgcgagcacccccacaaaactgcaagagagcctgcttaaaaagctggggagcaacacgtacccctttctcctgacgtttcctgactacttgccctgttcagtgatgttgcagccagctccacaagattcagggaagtcctgtggggttgactttgaggtcaaagcattcgccacagacagcaccgatgccgaagaggacaaaatccccaagaagagctccgtgcgattactgatccgcaaagtacagcatgccccacttgagatgggtccccagccccgagctgaggcggcctggcagttcttcatgtctgacaagcccctgcaccttgcggtctctctcaacaaagagatctatttccatggggagcccatccctgtgaccgtgactgtcaccaataacacagagaagaccgtgaagaagattaaagcattcgtggaacaggtggccaatgtggttctctactcgagtgattattacgtcaagcccgtggctatggaggaagcgcaagaaaaagtgccaccaaacagcactttgaccaagacgctgacgctgctgcccttgctggctaacaatcgagaaaggagaggcattgccctggatgggaaaatcaagcacgaggacacaaaccttgcctccagcaccatcattaaggagggcatagaccggaccgtcctgggaatcctggtgtcttaccagatcaaggtgaagctcacagtgtcaggctttctgggagagctcacctccagtgaagtcgccactgaggtcccattccgcctcatgcaccctcagcctgaggacccagctaaggaaagttatcaggatgcaaatttagtttttgaggagtttgctcgccataatctgaaagatgcaggagaagctgaggaggggaagagagacaagaatgacgttgatgagtgaagatgtcggctcaggatgccggaaaatgacctgtagttaccagtgcaacgagcaaagccccacagtttagtcctttggagttatgctgcgtatgaaaggatgagtcttcttccgagaaataaagcttgtttgttctcccctgg

SEQ ID NO: 12055 - DNA, 2576 bp, Artificial Sequence
  derived and/or modified sequence
agaacaggggctggctattcatcatctcagagcatagagaccctctccttgccacccggcccttcccacctggttggtgacaaatcacaaggtggtagaagttgccagggacagataacatggcagccagcgggaagaccagcaagtccgaaccgaaccatgttatcttcaagaagatctcccgggacaaatcggtgagtggtgcacaagtgaccatctacctggggaacagagactacatagaccatgtcagccaagtccagcctgtggatggtgtcgtgttggttgatcctgatcttgtgaagggaaagaaagtttcctgactacttgccctgttcagtgatgttgcagccagctccacaagattcagggaagtcctgtggggttgactttgaggtcaaagcattcgccacagacagcaccgatgccgaagaggacaaaatccccaagaagtaagagtatggttgcggaataggtgaggggtctgcggtgggggtggagagaagagacgacctccaccttgtctctgtgggacagacctcttcccatagggctggcacggctggggtaccatctgcatgtgggatggaggtcaaaggttgatcatttttggggaaaaaaaagaaaacaagaaaatgacagggaagttagcaacctccagggctcacgtaagccccgaaaagctcccgggtttcccctttgttgaagttttgttgttgttgtttgtttgtttgtttgtttgttttttgtggtaaaatgtacacaacatgaagtttgccattttaaccacttttttttctttttttcttttattttttgaaatggagcctcgctctgtcccccaggctggagtgcaatgtgacctcggctcactgcaacctccgcctcccaggttcaagcgattctcctgcctcaatctcccgagtagctgggattacaggcgtgcgccaccacgcctggctaatttttttttttttgtatttttagtagagatgggtttcaccatgttggccaggctggtcttgaactcctgacctcaagtgatccgcccgccttggcctcccaaagtgctgggattacaggcgtgagccactgtgcccggcccattttaaccacttttaaatgtaccattcagtggcttaagtacattccgaatgttgtgtagccttcaccgctgtctatacccaaaactttcccattgcctgagcaggaactctacaaccattgagcctaccgctccatccttcccattctcccaccccctgtgctgttttttttttacctaaacaagatttccgcctggcccttcgcactgtctccttgtgccccatgtacacatctctggaggcgcaggatagtgagctgcagtaatggagctcgcatgtatatggcagctattccatgaggcccttgacgccctcacaccttagccttgctgacaggaggcagagctgggaatccacggagcctaaggggctaagcttggccctcgggatgttgcctggccccacagcttcccccacagggaagggaccaggacccagacccccaggctcttccaccgtcagggctgcctcaggctctgaccagtgtcgttgccctcttcccgtccaccctgtctccatggggagcattcctggagaatctccatgtgacagtggggagagaacagaagcctccctaaagcggcctgggtgccaatccctggcttgtctgtggctgtttcccacaggagctccgtgcgattactgatccgcaaagtacagcatgccccacttgagatgggtccccagccccgagctgaggcggcctggcagttcttcatgtctgacaagcccctgcaccttgcggtctctctcaacaaagagatctatttccatggggagcccatccctgtgaccgtgactgtcaccaataacacagagaagaccgtgaagaagattaaagcattcgtggaacaggtggccaatgtggttctctactcgagtgattattacgtcaagcccgtggctatggaggaagcgcaagaaaaagtgccaccaaacagcactttgaccaagacgctgacgctgctgcccttgctggctaacaatcgagaaaggagaggcattgccctggatgggaaaatcaagcacgaggacacaaaccttgcctccagcaccatcattaaggagggcatagaccggaccgtcctgggaatcctggtgtcttaccagatcaaggtgaagctcacagtgtcaggctttctgggagagctcacctccagtgaagtcgccactgaggtcccattccgcctcatgcaccctcagcctgaggacccaggtcagttatcaggatgcaaatttagtttttgaggagtttgctcgccataatctgaaagatgcaggagaagctgaggaggggaagagagacaagaatgacgttgatgagtgaagatgtcggctcaggatgccggaaaatgacctgtagttaccagtgcaacgagcaaagccccacagtttagtcctttggagttatgctgcgtatgaaaggatgagtcttcttccgagaaataaagcttgtttgttctcccctgg

SEQ ID NO: 12056 - DNA, 1218 bp, Artificial Sequence
  derived and/or modified sequence
atggccgccagcggcaagaccagcaagagcgagcccaaccacgtgatcttcaagaagatcagcagagacaagagcgtgaccatctacctgggcaacagagactacatcgaccacgtgagccaggtgcagcccgtggacggcgtggtgctggtggaccccgacctggtgaagggcaagaaggtgtacgtgaccctgacctgcgccttcagatacggccaggaggacatcgacgtgatcggcctgaccttcagaagagacctgtacttcagcagagtgcaggtgtacccccccgtgggcgccgccagcacccccaccaagctgcaggagagcctgctgaagaagctgggcagcaacacctaccccttcctgctgaccttccccgactacctgccctgcagcgtgatgctgcagcccgccccccaggacagcggcaagagctgcggcgtggacttcgaggtgaaggccttcgccaccgacagcaccgacgccgaggaggacaagatccccaagaagagcagcgtgagactgctgatcagaaaggtgcagcacgcccccctggagatgggcccccagcccagagccgaggccgcctggcagttcttcatgagcgacaagcccctgcacctggccgtgagcctgaacaaggagatctacttccacggcgagcccatccccgtgaccgtgaccgtgaccaacaacaccgagaagaccgtgaagaagatcaaggccttcgtggagcaggtggccaacgtggtgctgtacagcagcgactactacgtgaagcccgtggccatggaggaggcccaggagaaggtgccccccaacagcaccctgaccaagaccctgaccctgctgcccctgctggccaacaacagagagagaagaggcatcgccctggacggcaagatcaagcacgaggacaccaacctggccagcagcaccatcatcaaggagggcatcgacagaaccgtgctgggcatcctggtgagctaccagatcaaggtgaagctgaccgtgagcggcatgaccggcagacagaaggccagcgaggtggccaccgaggtgcccttcagactgatgcacccccagcccgaggaccccggccagttcagctaccaggacgccaacctggtgttcgaggagttcgccagacacaacctgaaggacgccggcgaggccgaggagggcaagagagacaagaacgacgtggacgagtag

SEQ ID NO: 12057 - DNA, 1218 bp, Artificial Sequence
  derived and/or modified sequence
atggccgccagcggcaagaccagcaagagcgagcccaaccacgtgatcttcaagaagatcagcagagacaagagcgtgaccatctacctgggcaacagagactacatcgaccacgtgagccaggtgcagcccgtggacggcgtggtgctggtggaccccgacctggtgaagggcaagaaggtgtacgtgaccctgacctgcgccttcagatacggccaggaggacatcgacgtgatcggcctgaccttcagaagagacctgtacttcagcagagtgcaggtgtacccccccgtgggcgccgccagcacccccaccaagctgcaggagagcctgctgaagaagctgggcagcaacacctaccccttcctgctgaccttccccgactacctgccctgcagcgtgatgctgcagcccgccccccaggacagcggcaagagctgcggcgtggacttcgaggtgaaggccttcgccaccgacagcaccgacgccgaggaggacaagatccccaagaagagcagcgtgagactgctgatcagaaaggtgcagcacgcccccctggagatgggcccccagcccagagccgaggccgcctggcagttcttcatgagcgacaagcccctgcacctggccgtgagcctgaacaaggagatctacttccacggcgagcccatccccgtgaccgtgaccgtgaccaacaacaccgagaagaccgtgaagaagatcaaggccttcgtggagcaggtggccaacgtggtgctgtacagcagcgactactacgtgaagcccgtggccatggaggaggcccaggagaaggtgccccccaacagcaccctgaccaagaccctgaccctgctgcccctgctggccaacaacagagagagaagaggcatcgccctggacggcaagatcaagcacgaggacaccaacctggccagcagcaccatcatcaaggagggcatcgacagaaccgtgctgggcatcctggtgagctaccagatcaaggtgaagctgaccgtgagcggcttcctgggcgagctgaccagcagcgaggtggccaccgaggtgcccttcagactgatgcacccccagcccgaggaccccgccaaggagagctaccaggacgccaacctggtgttcgaggagttcgccagacacaacctgaaggacgccggcgaggccgaggagggcaagagagacaagaacgacgtggacgagtag

SEQ ID NO: 12058 - protein, 631 aa, Artificial Sequence
  derived and/or modified sequence
MPRYGASLRQSCPRSGREQGQDGTAGAPGLLWMGLVLALALALALALALSDSRVLWAPAEAHPLSPQGHPARLHRIVPRLRDVFGWGNLTCPICKGLFTAINLGLKKEPNVARVGSVAIKLCNLLKIAPPAVCQSIVHLFEDDMVEVWRRSVLSPSEACGLLLGSTCGHWDIFSSWNISLPTVPKPPPKPPSPPAPGAPVSRILFLTDLHWDHDYLEGTDPDCADPLCCRRGSGLPPASRPGAGYWGEYSKCDLPLRTLESLLSGLGPAGPFDMVYWTGDIPAHDVWHQTRQDQLRALTTVTALVRKFLGPVPVYPAVGNHESTPVNSFPPPFIEGNHSSRWLYEAMAKAWEPWLPAEALRTLRIGGFYALSPYPGLRLISLNMNFCSRENFWLLINSTDPAGQLQWLVGELQAAEDRGDKVHIIGHIPPGHCLKSWSWNYYRIVARYENTLAAQFFGHTHVDEFEVFYDEETLSRPLAVAFLAPSATTYIGLNPGYRVYQIDGNYSGSSHVVLDHETYILNLTQANIPGAIPHWQLLYRARETYGLPNTLPTAWHNLVYRMRGDMQLFQTFWFLYHKGHPPSEPCGTPCRLATLCAQLSARADSPALCRHLMPDGSLPEAQSLWPRPLFC

SEQ ID NO: 12059 - DNA, 2482 bp, Artificial Sequence
  derived and/or modified sequence
agctgtcagagatcagaggaagaggaaggggcggagctgctttgcggccggccgcggagcagtcagccgactacagagaagggtaatcgggtgtccccggcgccgcccggggccctgagggctggctagggtccaggccgggggggacgggacagacgaaccagccccgtgtaggaagcgcgacaatgccccgctacggagcgtcactccgccagagctgccccaggtccggccgggagcagggacaagacgggaccgccggagcccccggactcctttggatgggcctggtgctggcgctggcgctggcgctggcgctggcgctggctctgtctgactctcgggttctctgggctccggcagaggctcaccctctttctccccaaggccatcctgccaggttacatcgcatagtgccccggctccgagatgtctttgggtgggggaacctcacctgcccaatctgcaaaggtctattcaccgccatcaacctcgggctgaagaaggaacccaatgtggctcgcgtgggctccgtggccatcaagctgtgcaatctgctgaagatagcaccacctgccgtgtgccaatccattgtccacctctttgaggatgacatggtggaggtgtggagacgctcagtgctgagcccatctgaggcctgtggcctgctcctgggctccacctgtgggcactgggacattttctcatcttggaacatctctttgcctactgtgccgaagccgccccccaaaccccctagccccccagccccaggtgcccctgtcagccgcatcctcttcctcactgacctgcactgggatcatgactacctggagggcacggaccctgactgtgcagacccactgtgctgccgccggggttctggcctgccgcccgcatcccggccaggtgccggatactggggcgaatacagcaagtgtgacctgcccctgaggaccctggagagcctgttgagtgggctgggcccagccggcccttttgatatggtgtactggacaggagacatccccgcacatgatgtctggcaccagactcgtcaggaccaactgcgggccctgaccaccgtcacagcacttgtgaggaagttcctggggccagtgccagtgtaccctgctgtgggtaaccatgaaagcacacctgtcaatagcttccctccccccttcattgagggcaaccactcctcccgctggctctatgaagcgatggccaaggcttgggagccctggctgcctgccgaagccctgcgcaccctcagaattggggggttctatgctctttccccataccccggtctccgcctcatctctctcaatatgaatttttgttcccgtgagaacttctggctcttgatcaactccacggatcccgcaggacagctccagtggctggtgggggagcttcaggctgctgaggatcgaggagacaaagtgcatataattggccacattcccccagggcactgtctgaagagctggagctggaattattaccgaattgtagccaggtatgagaacaccctggctgctcagttctttggccacactcatgtggatgaatttgaggtcttctatgatgaagagactctgagccggccgctggctgtagccttcctggcacccagtgcaactacctacatcggccttaatcctggttaccgtgtgtaccaaatagatggaaactactccgggagctctcacgtggtcctggaccatgagacctacatcctgaatctgacccaggcaaacataccgggagccataccgcactggcagcttctctacagggctcgagaaacctatgggctgcccaacacactgcctaccgcctggcacaacctggtatatcgcatgcggggcgacatgcaacttttccagaccttctggtttctctaccataagggccacccaccctcggagccctgtggcacgccctgccgtctggctactctttgtgcccagctctctgcccgtgctgacagccctgctctgtgccgccacctgatgccagatgggagcctcccagaggcccagagcctgtggccaaggccactgttttgctagggccccagggcccacatttgggaaagttcttgatgtaggaaagggtgaaaaagcccaaatgctgctgtggttcaaccaggcaagatcatccggtgaaagaaccagtccctgggccccaaggatgccggggaaacaggaccttctcctttcctggagctggtttagctggatatgggagggggtttggctgcctgtgcccaggagctagactgccttgaggctgctgtcctttcacagccatggagtagaggcctaagttgacactgccctgggcagacaagacaggagctgtcgccccaggcctgtgctgcccagccaggaaccctgtactgctgctgcgacctgatgctgccagtctgttaaaataaagataagagacttggactccagaaaaaaaaaaa

SEQ ID NO: 12060 - DNA, 1893 bp, Artificial Sequence
  derived and/or modified sequence
atgccccgctacggcgccagcctgcgccagagctgcccccgcagcggccgcgagcagggccaggacggcaccgccggcgcccccggcctgctgtggatgggcctggtgctggccctggccctggccctggccctggccctggccctgagcgacagccgcgtgctgtgggcccccgccgaggcccaccccctgagcccccagggccaccccgcccgcctgcaccgcatcgtgccccgcctgcgcgacgtgttcggctggggcaacctgacctgccccatctgcaagggcctgttcaccgccatcaacctgggcctgaagaaggagcccaacgtggcccgcgtgggcagcgtggccatcaagctgtgcaacctgctgaagatcgccccccccgccgtgtgccagagcatcgtgcacctgttcgaggacgacatggtggaggtgtggcgccgcagcgtgctgagccccagcgaggcctgcggcctgctgctgggcagcacctgcggccactgggacatcttcagcagctggaacatcagcctgcccaccgtgcccaagcccccccccaagccccccagcccccccgcccccggcgcccccgtgagccgcatcctgttcctgaccgacctgcactgggaccacgactacctggagggcaccgaccccgactgcgccgaccccctgtgctgccgccgcggcagcggcctgccccccgccagccgccccggcgccggctactggggcgagtacagcaagtgcgacctgcccctgcgcaccctggagagcctgctgagcggcctgggccccgccggccccttcgacatggtgtactggaccggcgacatccccgcccacgacgtgtggcaccagacccgccaggaccagctgcgcgccctgaccaccgtgaccgccctggtgcgcaagttcctgggccccgtgcccgtgtaccccgccgtgggcaaccacgagagcacccccgtgaacagcttccccccccccttcatcgagggcaaccacagcagccgctggctgtacgaggccatggccaaggcctgggagccctggctgcccgccgaggccctgcgcaccctgcgcatcggcggcttctacgccctgagcccctaccccggcctgcgcctgatcagcctgaacatgaacttctgcagccgcgagaacttctggctgctgatcaacagcaccgaccccgccggccagctgcagtggctggtgggcgagctgcaggccgccgaggaccgcggcgacaaggtgcacatcatcggccacatcccccccggccactgcctgaagagctggagctggaactactaccgcatcgtggcccgctacgagaacaccctggccgcccagttcttcggccacacccacgtggacgagttcgaggtgttctacgacgaggagaccctgagccgccccctggccgtggccttcctggcccccagcgccaccacctacatcggcctgaaccccggctaccgcgtgtaccagatcgacggcaactacagcggcagcagccacgtggtgctggaccacgagacctacatcctgaacctgacccaggccaacatccccggcgccatcccccactggcagctgctgtaccgcgcccgcgagacctacggcctgcccaacaccctgcccaccgcctggcacaacctggtgtaccgcatgcgcggcgacatgcagctgttccagaccttctggttcctgtaccacaagggccacccccccagcgagccctgcggcaccccctgccgcctggccaccctgtgcgcccagctgagcgcccgcgccgacagccccgccctgtgccgccacctgatgcccgacggcagcctgcccgaggcccagagcctgtggccccgccccctgttctgc

SEQ ID NO: 12061 - DNA, 2039 bp, Artificial Sequence
  derived and/or modified sequence
gggaaataagagagaaaagaagagtaagaagaaatataagagccaccatgccgcgatacggcgcatcacttcggcagtcgtgtccgagatcgggaagggagcaagggcaggatgggaccgccggagcgcctggactcttgtggatggggctcgtcctggctctggcgctcgctctggcccttgcattggctttgtccgacagccgagtcttgtgggcaccggcagaggcccacccactgtcgccccaagggcaccccgcgagactccatcgaatcgtgcccagattgcgggatgtgttcggttggggtaacttgacatgccccatttgcaaagggctctttacagcgatcaacttgggtttgaagaaggagcccaacgtcgccagagtcgggtcggtggcgatcaagttgtgcaatctcctcaagatcgcacctcccgcagtctgccagtcaattgtgcacttatttgaggatgacatggtagaggtgtggcgccgaagcgtgctgtcgccaagcgaggcgtgtgggctgctgctcggatcaacgtgtggccactgggacatcttctcatcgtggaatatctcattgccgacggtcccaaaaccacctccaaagcctccttccccgcctgcccctggagcgccggtgtcgcggattctgttcttgacagaccttcactgggatcacgactatcttgagggtacagatcccgactgcgcggacccgctttgctgccgcaggggatcggggttgccccctgcatcgcgacccggtgctggttattggggcgaatactcaaagtgtgaccttcccctgcgcaccctcgaatcgcttttgagcggccttggacccgcggggcccttcgatatggtgtattggactggcgacattccggcgcatgatgtgtggcaccagactcgacaggaccagcttcgagcgctcacaacggtgacagcactggtgcggaaatttctcggaccagtgccagtataccctgcggtaggtaaccatgaatcgacgcctgtcaatagcttccctccgccttttatcgagggcaatcatagctcgcggtggctctacgaggcgatggcgaaggcgtgggaaccgtggcttccggcggaggcgttgagaactcttagaatcggtggtttttacgcgcttagcccataccctggtctgaggctcatctcactgaacatgaatttctgttcacgggaaaacttctggcttctgatcaattcgacagacccggcagggcagctccagtggctggtcggagaattgcaggccgcagaggatcgcggagacaaagtacacatcattgggcacattcctcccggacactgtctcaaaagctggtcgtggaattactatcgcatcgtcgctagatacgagaacacgcttgcggcgcagtttttcgggcacacccacgtcgatgagtttgaggtattctatgatgaagaaacgttgtcccgacccctggcggtcgcattcttggcgccctcggccacgacgtacattgggctcaaccctggataccgcgtatatcagattgatggaaactatagcggaagcagccacgtcgtacttgaccacgaaacgtacattctgaatctgacccaggccaatatccctggggccattccccattggcaacttctgtacagggctagggaaacatatggtctgcctaacactttgcccacggcgtggcataacctcgtgtatcgcatgcgcggtgatatgcaattgttccagacgttctggtttttgtaccataaggggcacccaccgtccgagccgtgcggaaccccctgccgcctcgcgacactgtgcgcccagttgtcggctagagcagactcccccgctctctgtcggcatcttatgcccgacgggtccctccccgaagcgcagtcgctttggcccaggccgctgttttgttaatgagctgccttctgcggggcttgccttctggccatgcccttcttctctcccttgcacctgtacctcttggtctttgaataaagcctgagtaggaag

SEQ ID NO: 12062 - DNA, 1893 bp, Artificial Sequence
  derived and/or modified sequence
atgcctaggtatggagccagtctgcgacagagttgccctaggtccggaagggagcagggccaggacgggacagctggggcccctgggctgctatggatgggactggtactggctctggcgcttgcactggcccttgccctggcactttccgacagcagggtgctctgggcaccagctgaggcccacccgttgtcgccacaaggccaccccgcccgactgcataggattgtgcctcgattgagagatgtctttggttggggtaatctgacttgtcctatctgcaagggcttgtttacagcaatcaatcttggactgaaaaaggagcccaatgttgcacgtgtaggctctgtcgctattaagctttgtaacctgctgaaaattgccccgcctgctgtgtgccaatcgattgtccaccttttcgaggatgacatggttgaagtttggagaaggtctgttctatcaccgtccgaggcctgtggcctgttgctaggcagtacttgtggccactgggacatcttctcttcttggaacatctctcttccaaccgttccgaagcctccgccaaagccgccgagccctccagctcctggcgctcctgtatcacggattctctttctcacggatctccactgggaccacgattacctggagggtaccgaccccgattgtgcagacccactctgttgcagacggggtagtggcctgcctcccgcttcacgccctggcgcaggatattggggagaatacagtaagtgcgacctgccgttgaggacgctcgagtctctgcttagcggtctcggccccgcggggcccttcgatatggtgtattggaccggcgacatcccagcgcacgacgtatggcatcagacacgccaggatcagctgcgcgccttgacaactgtgaccgctttagtgaggaaattcctcggccctgtgccagtctatcccgccgttggaaatcatgagtccacaccagtaaatagcttcccgccgcccttcatcgagggtaaccactctagcagatggttgtacgaagccatggccaaagcctgggagccttggctcccggccgaggctctgcggactctgcgcatcggtggattttatgccctgtctccttaccccggccttagattgatttccctgaatatgaatttttgttccagggagaacttttggttactgatcaactctactgatcccgctgggcagcttcagtggttagtgggagagctccaggcagcagaggatagaggggacaaggtgcacattatcggccatattccgccagggcattgccttaagtcttggagctggaattattaccggattgtagcccggtatgagaatacacttgcagcccagttcttcggacacacacacgtggatgaattcgaggtattctatgatgaggaaaccttatcaagacctctggcggtcgcgttcttagctccatcagccaccacgtatattggactgaatcctggctaccgcgtttatcagattgacgggaattacagcggttcctcacatgtagtgttggaccatgagacatatatcttgaatttaactcaagcaaacattcccggagcgattccgcattggcagctgctgtaccgcgctcgagagacctatggcctacccaatacactgcctaccgcgtggcataacctggtgtatagaatgagaggagatatgcagttatttcagacgttttggtttctgtaccacaagggacatcccccatctgaaccctgtggaaccccttgtagattggcaaccctttgtgcgcagctatccgcgagagccgatagccctgctctatgcagacacctcatgcccgacggctcacttccagaggcacagagcctgtggcctagacccctgttctgc

SEQ ID NO: 12063 - DNA, 1893 bp, Artificial Sequence
  derived and/or modified sequence
atgcctcgttacggcgctagcctccggcaatcatgccctcggtcgggacgggagcaaggacaggacggcactgccggagcccctggtctgctttggatggggctcgtgctggccctcgcgctggctctcgccctggctctggccctgagcgattccagggtgctgtgggcgcccgcggaggcccacccgctgtcgccacagggccaccctgcccgcctgcacagaattgtgccccggctcagggacgttttcggatggggaaacctgacttgtccaatttgcaagggacttttcaccgccattaatctcggccttaagaaggagccaaacgtcgctcgcgtgggttccgtggcgatcaaactgtgcaacctgctgaagatcgccccgcccgccgtttgtcagtcgatcgtgcatcttttcgaggatgatatggtcgaggtgtggcgccgcagcgtgctgtcaccgtctgaagcctgcggcctgctgcttggatccacgtgcggtcactgggatatcttctcaagctggaacatctctctgcccaccgtcccgaagccgccaccaaaaccgccgtcgcccccggctccaggagcgccagtgtcgagaatcctgtttctcaccgatctccactgggaccacgactaccttgagggcactgatccagactgcgctgacccactgtgctgtagacgcggctctggactcccgccggcgtcacgcccaggagcaggatactggggggaatactccaagtgcgacctcccgctcaggaccctggagtcactgttgtctggactgggccctgccggacctttcgacatggtgtactggactggggacattccggcgcacgacgtgtggcaccaaacccgccaagatcagcttcgggcactgaccactgtgactgctttggtgcggaaattcctcggacctgtgccagtgtatcccgcagtcgggaatcacgaatcaaccccggtgaattccttcccgccaccctttatagaaggtaaccactcatcacggtggctctacgaagcaatggctaaggcatgggaaccttggttgcccgccgaggcccttcgcacgctcagaatcggaggcttctacgcgcttagcccgtatccggggctgaggctgatctcgctgaatatgaacttttgtagccgggaaaacttttggctgctcatcaactcgacggatccggccggacagctgcagtggctggtcggcgagcttcaggccgcggaagatcgaggcgataaggtccacattatcggacatatcccccctgggcattgcctgaaatcgtggtcctggaactactaccgcatcgttgcacgttatgaaaatactttggccgcacaattcttcgggcatacccatgtggacgagttcgaagtcttttacgacgaggaaacgctgagccgccctctcgcagtggcgttcctggccccatccgcgaccacttacatcggcctgaatccgggataccgcgtgtaccaaatcgacggtaactattccggatcctcccatgttgtcttggaccatgaaacttacatactcaatctcacccaagccaacattcctggtgcgattcctcattggcaattgctgtaccgcgcgcgagaaacctacggacttcctaacactttgccgactgcctggcacaacctggtctaccggatgagaggcgacatgcaactctttcagaccttttggttcctgtaccacaaggggcacccgccgtcggaaccgtgtggaaccccatgcagactcgcaaccctctgtgcccagctgtcagcgagagcggattcaccggccctgtgtcgacatctgatgcccgacggctctctgccggaagcccagtcgctctggccgcggcctcttttttgc

SEQ ID NO: 12064 - DNA, 1893 bp, Artificial Sequence
  derived and/or modified sequence
atgcctagatacggtgcgtccctccggcagtcgtgtccccggagcgggcgagaacaagggcaggatggaaccgcgggagctccggggctgctgtggatgggactggtccttgcactcgccttggcacttgccctggccctcgccttgtcagactcacgtgtgttgtgggcaccggctgaggctcacccgctctcaccgcaaggacaccctgcgaggcttcacagaatcgtccctcgcctccgcgatgttttcggctggggcaacctcacttgtccgatttgtaagggactgtttaccgctattaacctcggtctgaagaaggagccaaatgtggcccgggtgggatcggtcgccatcaagctgtgcaatcttctgaaaatcgccccgccggctgtgtgtcagtcgatcgtgcatctgttcgaggatgacatggttgaggtgtggaggcgctcagtgctctccccgagcgaggcttgcggactgctgttgggaagcacttgcggacactgggacatcttttcgtcctggaacatctcactgcctacggttccgaagccgccgccgaagcctcccagcccgccagcacctggcgcacctgtcagccggatcctgtttctgactgacctgcactgggatcacgactacctcgaaggaaccgatccggattgcgcggatccgctgtgctgtcggagaggaagcggattgccccccgcgagccgccccggcgctggatactggggcgaatactccaagtgcgatcttccactccgcaccctggaatcactcctgtcgggactcggaccagcagggccgttcgacatggtctactggaccggcgacatcccggcgcacgatgtctggcatcaaactagacaggaccagctgagggctctgaccactgtcactgcgctcgtcagaaagttcctcggaccggtacctgtttacccagcagtggggaatcatgagtccacccctgtcaatagctttcccccaccattcatcgaaggaaaccattcgtcgaggtggctgtacgaagcaatggctaaggcttgggaaccgtggctgcctgccgaggcgctgcgcacgctcagaatcggaggattctacgctctgagcccatacccgggacttagactgatctccctgaatatgaacttctgctcaagagaaaacttctggctgctgatcaacagcaccgatccggcggggcaactgcagtggttggtgggcgaactgcaggctgcggaagatagaggagataaggtgcacatcatcgggcacatcccgccgggacactgtcttaaatcctggtcgtggaactactaccgcatcgtcgctcgctacgaaaatactctcgcggcacagtttttcgggcacacccacgtcgatgagttcgaagtcttttacgacgaagaaaccctgagccggccacttgcggtcgccttcctcgcaccgtcagctactacttatatcggactcaacccaggataccgcgtgtaccaaatcgatggcaactactccggttcatcacatgtcgtgctggaccacgaaacctacatcctgaatctgacccaggccaatatcccgggcgccatcccacactggcaactgctctaccgggcgagggaaacttatggactgccaaacaccctgcctacggcatggcataacctggtctaccgcatgaggggcgatatgcagttgtttcagactttctggttcctgtaccataagggacatcctccgtcggaaccatgcggtaccccgtgccgcctggcgactctctgcgcccagctgagtgcccgcgccgattccccggccctctgccgccacctgatgccggacggatcacttccagaggcccaatcgctgtggccgcgcccgcttttctgc

SEQ ID NO: 12065 - DNA, 1893 bp, Artificial Sequence
  derived and/or modified sequence
atgccaagatatggagccagcctgcgccagtcctgcccacggtctggccgcgagcagggacaggatggaacagcgggcgcccctggcctgctttggatgggcctggtgctggcactggcactggctctggcactggcactggcattgagcgatagccgcgtgctgtgggcgccggcggaggcccacccactgagcccccaggggcaccccgctcgattgcatagaatcgtaccaagactaagagacgtgttcggttggggcaatctcacctgtccaatctgcaaaggcctgtttaccgcgatcaacctgggcctgaaaaaggagccaaatgttgcgcgcgtaggtagcgtggctattaaactatgtaatctgctcaaaatcgcccctcctgccgtctgtcagagcatagtgcatctgtttgaggatgacatggttgaagtgtggcgtcgcagcgtgctgagcccatctgaggcgtgtggcctgcttcttgggtccacctgcggccattgggacatcttttccagctggaatattagtctgccgacggtcccgaaaccgccaccaaaaccaccgtccccacctgccccaggagcaccggtttcacgtattctgtttctgacggacctgcactgggatcatgattacctggagggtaccgatccggactgcgctgacccgctgtgttgccgacgcggttccggtctgccacctgcgagccgcccaggagctgggtactggggtgagtatagcaaatgtgatttgcctttacgaactctggagtccctgctgagcggcctgggcccggccggtccgtttgacatggtctactggactggtgatattccggcgcatgatgtgtggcaccagacgaggcaagaccagctgcgcgccctcactacagtcactgctctggtgaggaaattcctgggtcctgtccctgtttaccctgctgtgggtaatcacgagagcacacctgttaactcctttcctcccccgtttatcgagggcaaccactcaagccggtggttgtacgaggcgatggctaaagcgtgggaaccatggctgccagcggaggccctgaggacgctgcggattggtggcttttatgccctgtccccgtatcctggtctacgtttaataagcctgaacatgaacttttgctctcgcgagaatttttggctgctgatcaattctaccgatccagcgggtcaattgcaatggctggtaggcgaactccaggcggcggaggatagaggtgataaggtccacattatcggccatattcctcccgggcactgtcttaagagctggtcttggaattactaccgcatcgtggcccgctatgagaacactctcgctgctcagttctttggccacactcatgtagacgagtttgaggtgttttacgatgaggagaccctgtcacggccactggctgtggcgtttcttgccccgagcgcaacgacgtacatcggtctgaatccaggttatcgcgtttaccagatcgatggtaactacagcggtagcagccacgtagttctggatcacgagacttacatccttaatttgacgcaggcgaatattccgggagccatccctcactggcagttgttatatcgggctcgtgagacctacggcctcccaaacaccctgccgacggcctggcataatttggtctacaggatgcgtggagatatgcaactgttccagacgttctggtttctgtaccacaaaggtcatcctccgagcgagccttgtggtaccccatgtcgccttgcaaccctgtgcgcgcagcttagtgccagggcggacagcccagccctgtgccgccatctgatgccggacggtagcctgccggaagcccaatctctgtggccacgcccgttgttctgc

SEQ ID NO: 12066 - DNA, 1893 bp, Artificial Sequence
  derived and/or modified sequence
atgcctcgctacggtgcaagcctgagacaatcttgcccgagaagcggaagggagcaggggcaggacgggactgcaggggcgccaggattgctgtggatgggtctggtgcttgctctggcattggcgctcgcgctggcactcgcattgagcgattcgcgagttctgtgggccccggcagaagcccatccactctcaccacagggccaccctgcgaggttgcataggattgtccccaggctccgcgacgtgttcgggtgggggaatcttacctgcccgatctgtaagggactgtttacggccatcaatctgggactcaaaaaagaaccaaacgtggcaagagtcggttcggtggctatcaagctgtgtaacctgcttaagattgccccaccggcagtctgccagtcgattgttcatctttttgaagatgatatggtggaagtctggcggagaagcgtcctctcgcccagcgaggcatgcggacttctccttggttcgacctgtgggcattgggacattttcagctcgtggaatatctctctcccgaccgtccctaagccacctccaaagccccctagtccacccgcacccggagcaccagttagcagaatcctttttctgactgatttgcattgggaccacgattacctcgagggcacggatccagattgcgctgatcctctctgttgtagacgtggatcagggcttcctcctgcttcacgcccaggtgcaggttattggggtgaatactcgaagtgtgatctccctcttcgaactctggaatcgctgctcagtgggttgggacctgcaggaccatttgacatggtgtactggaccggcgatatcccagcccatgacgtgtggcatcaaacgagacaagatcaacttagggccctgactactgtgactgcactggtcagaaagttcctgggaccagtcccggtgtacccggcagtggggaaccacgaatcgactccagttaattcatttccacccccctttattgaagggaaccattcgtcccgatggctttacgaagctatggcgaaggcttgggaaccctggctgcctgcagaagcccttagaactctccgaataggaggcttctacgcactgagcccttatcctggtctgcgccttatttccctgaacatgaatttctgcagcagggagaacttttggctcctgatcaactcaaccgatccggcaggacagttgcaatggcttgtgggtgagctccaagctgcagaagatagaggcgacaaagtccacataattggacacatccctccgggacactgtctcaagagctggtcctggaactactacagaattgtggcgcgctacgagaacacccttgcggcgcagtttttcggccatactcacgtcgacgagttcgaggtcttttacgatgaagaaactctgtcgcgcccacttgcagttgcattcctggccccctcggccaccacgtacataggactgaatccaggttacagagtctaccaaattgatggtaactactctggctcgtcccacgtggtgcttgatcatgaaacctatatacttaacctgacccaagcaaacatccctggtgcaattcctcattggcagctcctttaccgcgcccgcgaaacctacgggctgccaaataccttgcctaccgcctggcataatctcgtgtacagaatgaggggagacatgcagctcttccaaactttttggtttctgtaccataaaggtcaccctccttccgaaccgtgtggaaccccttgtcgcctggcaaccctttgcgcgcaactgtctgcaagagccgatagccctgcgctgtgtagacacttgatgccagacggttcacttcctgaggctcagtcgctttggcctcgacctctcttttgt

SEQ ID NO: 12067 - DNA, 1893 bp, Artificial Sequence
  derived and/or modified sequence
atgcctaggtacggcgccagcctgagacagtcttgtcctcgctcaggcagagaacaggggcaggatggtactgcaggcgcccctggattactgtggatgggtctggttctcgccctagctctggccctcgccctggccctggccctatcagattcaagagttctgtgggccccagccgaggctcacccactgagcccccagggacaccctgcccggttacacagaatcgttccccgcctacgcgatgtgtttggctggggaaacctgacttgcccaatatgtaaaggcttattcaccgctataaaccttggcctgaagaaggaacctaatgttgcaagagtcggctccgtggcaatcaagctatgtaatctgctgaaaatcgctcccccagctgtttgtcagtccatagtgcacttattcgaggatgacatggtcgaggtgtggcgtcggagtgtcctgtccccctccgaagcatgcgggctgttgctgggctccacatgtggtcattgggatatcttctcttcctggaacattagcctgcccaccgtccccaaacctccacctaagccaccatctccaccggccccaggcgcccccgtgagccggatcctattcctgacagatttgcactgggatcacgattacctagagggtacagatccagactgtgccgatcccctatgctgtagaagaggtagcggccttccacccgctagccgtccaggggctggctattggggcgaatactcaaagtgcgatctgcccttacggaccctggagagtcttctctctggtctgggtccagcaggacccttcgacatggtatattggactggggacattcctgctcatgatgtgtggcaccagaccagacaagaccagcttagggccctaaccacagtgacagcactggttcgaaagttccttggccctgtgccagtctaccctgctgtggggaatcatgagagtacccctgtgaactccttccctcctccatttatcgaaggcaatcattctagccggtggctatatgaagccatggcaaaggcctgggaaccatggctccctgctgaggctctacggacactgagaattggtggattctatgctcttagtccttatcctgggttgcgcctcatctccctgaatatgaacttttgctctagagaaaacttctggctgctcataaacagtactgatcctgccggccagctgcaatggctcgttggcgagctccaagccgcagaagacagaggcgacaaagtgcacataatcgggcatataccccccggccactgcctgaagagttggagttggaattactaccgcattgtggctcggtatgaaaacactctggccgctcagttctttggacatactcatgtcgacgagttcgaggtgttctacgacgaggagacactctctcggcccctggcagtggccttcctggccccttcagcaacaacctatataggactaaaccctggttaccgggtctaccagatagacggtaactactctgggagctcccacgtggtgctggaccacgagacctatattctgaatctgacccaagcaaacatccccggtgccatcccccactggcaactgctctaccgggctagggagacctatggactgcctaacaccctacccaccgcctggcacaatttagtttataggatgaggggggatatgcagctgtttcagacattctggttcctgtatcacaaagggcatcctccttccgagccctgcggcacaccttgcagacttgcaaccttgtgtgctcaactgagcgccagagctgacagtcctgctctgtgcaggcacctgatgccagatgggtctctacctgaagcacagtccctatggccaagacctctgttctgt

SEQ ID NO: 12068 - DNA, 1893 bp, Artificial Sequence
  derived and/or modified sequence
atgccaaggtatggagcatccctgcggcagtcctgtccccggagtggccgggagcaaggccaggacggcactgctggggcgcccggactcctgtggatgggtctggtcctggccctggcgttggccttagctttagccctggctctgagcgatagccgggttctctgggcaccggctgaggctcaccccttgagccctcaggggcatcccgctcgcctgcatagaattgtgccccgcctcagggacgtatttggttggggaaatcttacgtgtccaatctgtaagggcctcttcaccgctattaacttgggactcaagaaggagccgaacgtcgcccgcgtcgggagcgtagcgataaaactctgcaacctcctcaaaatcgctcctcctgccgtctgccagtcgatcgtgcatctcttcgaggacgatatggtggaagtgtggagacgctccgtcctcagcccgtctgaggcttgcggcctcctactcggttccacgtgcgggcattgggatatttttagcagctggaatatttcgctgccaacggtgcctaaacctccacccaaaccacctagtccacccgcaccaggcgcccccgtgagtcgtatcctgtttctcacagacttgcactgggatcacgattatctggagggcactgatcctgattgtgccgatccactatgctgccggaggggctctggcttgccaccagcctccagacccggcgccggctattggggcgagtactcaaagtgcgacctaccattgcgcactcttgagagtcttctttctggcctcggccctgcggggcctttcgatatggtgtattggaccggagatattccagcccacgacgtgtggcatcagacccgacaagatcagttgagagcgctcacaacagttacggcactagtacggaagttcttgggcccagttcctgtgtatccagccgtggggaaccacgagtccacgcctgtcaattccttcccaccccccttcattgaggggaatcactcatcccgttggctctacgaggcaatggctaaagcttgggaaccctggttacctgcagaggcccttcgtaccctccgaatcgggggattctacgcgctgagcccttaccctggactgagactcatctccctcaatatgaacttctgctccagggagaacttctggttactgatcaactctaccgacccggccggtcaattgcagtggttggtgggagaactccaagccgccgaggaccggggcgacaaagtacatattataggacacatcccaccagggcactgtcttaagagctggtcttggaattactacagaattgtggcacgttacgagaacactcttgcagctcaattcttcggccacacacatgtggacgaatttgaggtcttttacgacgaggagactctgagcagacccttggccgttgcgtttctagcgccatcggctaccacttacatcgggctgaacccgggctatagagtctaccagatcgacgggaactacagcggcagctctcacgtggtgttggatcatgaaacatatatactcaacctaacccaggctaatattccaggggccattcctcattggcagcttctgtatagggcccgagagacctacgggctccccaacactctcccaactgcctggcataacctggtctaccgcatgcgcggcgacatgcagttattccagactttctggtttctctatcataaagggcaccccccatcagagccttgtggcaccccatgccgtctcgcaaccctttgcgcacaactatccgcccgcgcggattcaccagcactctgtagacatctaatgcctgacgggtcgctccctgaggcccagagcctgtggccacgcccactgttttgc

SEQ ID NO: 12069 - DNA, 1893 bp, Artificial Sequence
  derived and/or modified sequence
atgcctcgctacggcgcatctctccggcagtcgtgccccagatccgggcgggagcagggacaagacggaaccgctggagcaccagggctgctgtggatgggactggtgctggctctggcactggcccttgcccttgccctcgctctgtcagactcaagggtcctgtgggcacctgcagaagcccatcctctgtcacctcagggacacccggctagactgcaccgcatcgtgccaaggctgcgggatgtctttggatggggaaacctgacctgtccaatttgtaagggacttttcaccgccatcaatctcggcctgaaaaaagagcctaacgtggcccgcgtgggctcggtcgccatcaaactgtgtaacttgctgaagatcgccccaccagctgtgtgccagagcattgtccacctgttcgaggacgacatggttgaggtctggcgcaggtccgtcctgagcccgtccgaggcgtgcggactgctgctcggctcgacctgtggtcattgggacatcttctcgtcatggaacatctccttgcccactgtgccgaaaccgccaccaaaacctccgtccccgcctgcgccaggggcacctgtgtcaaggatcttgttcttgactgaccttcactgggatcacgattacctggaggggactgatccggactgcgcagacccgctctgctgtcgcagggggtcaggccttccaccggcatcaagaccaggcgcaggctactggggagaatactcgaagtgcgacctgccgctgagaacgctcgagtccctgctctcgggcctgggaccggcaggcccattcgatatggtctactggactggtgatatcccggctcacgacgtgtggcaccaaaccaggcaggaccagttgagggcgctcaccaccgtgaccgcgctcgtgcgcaagttcctgggacctgtgcctgtctacccggccgtgggaaaccacgagtccaccccggtgaacagctttccaccaccgttcattgaagggaaccatagctcacggtggctgtatgaagctatggcgaaagcatgggagccatggcttccagccgaagccctccgaaccctgcgtatcggcggattctacgccctgtcgccataccccggactgcgcctcatttccctgaatatgaatttctgttcgcgcgagaatttctggctgctcatcaatagcaccgacccagcgggacaactgcaatggctcgtgggggaactgcaggcggctgaggatcggggagacaaggtgcacatcatcggccatatcccgccggggcattgcttgaagtcgtggtcctggaactactaccgcatcgtcgcccgatacgagaacaccctcgcagcccagttcttcggacatactcacgtcgatgagttcgaagtcttttacgatgaagaaaccctgtcccgccctcttgcagtcgccttcttggcgccgtccgcgaccacctacattggactgaatcccggctaccgggtctaccagatcgacggaaattactctggctcgtcacacgtggtgcttgaccatgaaacctacatcctgaacttgactcaggctaacatccctggtgccattccgcattggcaactcctgtatagagcgcgggaaacctacggcctgccaaacaccctgcctaccgcctggcacaacctcgtgtacaggatgaggggcgacatgcagttgttccagaccttctggttcttgtaccacaagggtcatcccccatcggaaccatgcgggaccccgtgccggctggccactctctgcgcccagcttagcgcgcgcgcggactccccggcactgtgccgccacctcatgcctgacggatcactccctgaagcccaatccctctggcctcggcccctgttctgc

SEQ ID NO: 12070 - DNA, 1893 bp, Artificial Sequence
  derived and/or modified sequence
atgccaagatacggtgcttccctgagacaatcctgtcctaggtccggacgcgaacagggtcaagatgggacggccggagctcctggactcctttggatgggccttgtccttgccctggcgctggcattggcgctggccctcgcactgtcagattcgcgcgttttgtgggctccagccgaagcacatcccctctcgcctcaaggtcaccccgcacgcctgcacaggattgtccctcggctccgggatgtgtttggatggggaaacctcacctgccccatctgcaagggattgttcactgcgattaacctgggactgaaaaaagaacccaatgttgccagagtgggctctgtggctatcaagctctgcaatctgcttaagattgcgccgccagctgtctgccagagcattgtgcacctgttcgaagatgatatggtggaggtgtggaggcggtccgtgctgtcgccctccgaggcgtgcggactgcttctgggctcgacctgcggccattgggacatctttagctcgtggaacatctccttgccgaccgtcccaaagccgccacccaagccgccgagccctccggcaccgggagccccagtctcgagaatcttgttcctcacggacctgcattgggaccacgactacttggaaggcactgacccggactgcgcggacccgctgtgctgtcgacgcggatcgggactccctccagcttcgcggccgggagccggatactggggcgagtacagcaaatgtgatctcccactgcgaactctggaatccttgctgtcaggtctggggccggcgggcccttttgatatggtgtactggactggcgacatcccagcgcacgatgtgtggcatcagactcggcaggatcaactgagggctcttactaccgtgactgcgctggtcaggaagttcctgggacctgtgcccgtgtaccccgccgtcggaaaccatgagtccacgccagtgaactcatttccgccaccattcatcgagggaaaccattcctcccggtggctgtacgaggcaatggccaaagcgtgggaaccgtggctgccggctgaggcgctgaggaccctgcgcattggcggtttctacgcactctcaccgtaccctggactcagactgatttccctgaatatgaacttttgctcgcgggagaatttctggctgctgatcaattcgactgaccctgctggacagctgcagtggctggtcggggaactgcaagcagcagaggaccggggggacaaggtgcacatcatcggccacatccctcccggacactgcctgaagtcatggtcgtggaattactaccgaatcgtcgcgcggtacgaaaacaccttggccgcccaattcttcggacacacccacgtcgacgagttcgaagttttctatgatgaagaaaccctgtcacgccccctggcagtcgcattcctcgcaccgtcagccaccacctacatcggactgaacccgggctacagagtgtaccaaatcgacggtaattactcagggtcctctcacgtggtcctggaccacgagacttacatcctcaatctcacccaggctaacatcccaggcgccatcccgcattggcagttgctgtaccgcgcccgagaaacttatggactgccgaatacgttgccaaccgcgtggcataacctggtctatcggatgcgtggggatatgcaactgtttcagaccttctggttcctttaccataagggacacccaccgtcggaaccgtgtgggacgccctgccgcttggccactctctgtgcacagctgagcgcccgggccgattccccagcattgtgcagacacctcatgccagacggcagcttgccagaagcgcagtctctgtggccgcgtccgctgttctgc

SEQ ID NO: 12071 - DNA, 1893 bp, Artificial Sequence
  derived and/or modified sequence
atgcctaggtatggcgcaagcctgaggcagagctgccctaggtctggcagagaacagggacaggatggaaccgcaggtgccccaggcctgctttggatgggactggtccttgcactggcactcgccctggccctcgctctcgctctgagtgactcacgcgtgctgtgggcccccgctgaagctcaccctctctcaccccaaggacacccggcgagattgcaccgcattgtacccaggctgagagatgtattcggctggggaaatcttacatgccccatatgcaagggactgttcactgccatcaatctgggcctgaagaaggaaccgaatgtggctcgcgtcggttccgtcgctatcaaactgtgcaatctccttaagattgcaccgcccgccgtctgccagagtatcgtgcacttgttcgaggacgatatggtggaagtctggaggagatctgtgttgtccccttcagaagcctgtggactgctgctgggctccacgtgtggtcactgggatatcttctccagttggaacatcagtttgcctactgtccccaagcctccacctaaaccaccctcacctccagcccctggcgcccctgtctctcgcatcttgtttttgactgatttgcactgggaccacgactaccttgagggaacagatcctgattgcgctgacccactgtgctgccgcagaggctccggcctcccaccagcctcccgcccgggagccggttactggggagagtactccaaatgtgacttgcccctcaggacacttgagagcctgctgagcggtttgggacctgccggtcccttcgacatggtgtattggaccggcgatatccccgcccatgatgtgtggcaccaaacaagacaggatcaactgagagctctgactaccgtgaccgcactggtaaggaagttcctgggccccgtgccagtatacccggctgtgggaaaccacgaaagcaccccagtcaacagtttcccccctccatttatcgagggaaatcactccagcagatggctgtatgaggcaatggctaaggcatgggagccatggttgccagcggaggcgcttcgcacactgaggattggcggtttctacgctttgtctccctaccctggcttgaggttgatcagtttgaatatgaacttctgtagcagggagaatttctggctgttgataaattctacagatccagcaggtcaactccagtggttggttggcgagctccaagccgccgaagataggggtgataaggtgcatattattggacacatcccccctggtcattgcttgaaatcctggtcctggaactattatagaatcgtggctcgctacgaaaacacacttgctgcgcagtttttcggtcacacccacgtggacgaattcgaagtgttttacgacgaagagacactgagccgcccgcttgccgtggcatttctggccccttctgcgacgacctatatcggtcttaacccgggctatagggtctaccagatcgatggaaactactcaggaagcagccatgtggttctggatcacgaaacatacattctgaacctgacccaagctaatattcccggagcgatcccacactggcagctcctttaccgcgcccgcgagacttacggcttgcccaacacgttgccgacggcttggcacaacctggtgtatcgcatgagaggcgacatgcagttgtttcagaccttttggttcctttaccacaaaggacacccaccgtccgagccatgtggaacaccatgccgccttgctacgttgtgcgcacagctttctgcaagggctgactctccggcactctgcaggcatttgatgccagatggttcactgccggaggcccagtcactctggcctagacctctgttctgt

SEQ ID NO: 12072 - DNA, 1893 bp, Artificial Sequence
  derived and/or modified sequence
atgcctcgctatggcgcgagcctgaggcagtcctgtccaagatccggcagggagcagggtcaggatggtaccgctggtgcacctggacttctctggatgggactggtgttggccctggcgcttgccctggcacttgctctggcgctctccgacagccgggtattatgggctcctgctgaagcacaccctctgtctccccagggacaccccgcacggctgcacaggatcgtgccacgcctaagggacgtttttgggtggggcaatctcacttgtccgatctgcaagggactcttcactgccatcaatctaggattgaaaaaagagcccaacgtggcacgggtgggtagcgtagcaataaaactgtgcaacctgctgaaaattgctccgcccgcagtctgccagagcatcgtccatctgtttgaagatgatatggtggaagtgtggcgtcggagcgtactgtctccctctgaagcctgtgggcttctccttggcagtacatgcggccactgggacatattcagcagctggaacatttctctgcccaccgtgcccaagcccccccctaagccacccagcccgcctgcccccggggctccagtttcacgtatcctgtttctcactgatctgcactgggaccacgattacctcgaaggcacggatccggactgcgcagaccctttgtgctgccggcgaggttcgggtctgcctcccgccagtcgacccggcgctggttactggggcgaatattcaaagtgtgaccttccacttagaacgctggagtccctgttaagcggactgggccctgccggcccattcgatatggtatattggactggagacattcccgctcatgacgtgtggcaccagacaagacaggaccagctgcgggccctcaccactgtcacagctttagtgcgcaagtttttgggccctgtaccggtctatcccgctgtcggcaaccacgagtccacgcctgtgaattctttccccccaccctttatcgagggcaatcactcttccagatggctttacgaagctatggcaaaggcatgggagccttggttgcccgctgaagcgctccgaaccctgaggatcggcggattctacgctttgtccccatatccaggcctgaggctcatctcgctgaatatgaatttctgtagccgggaaaatttctggctcctgatcaattccacagatcctgccggccaactccagtggctggtgggggaactccaagccgccgaagatcggggcgacaaggttcatatcattggacacataccccctgggcattgtctgaaaagttggagctggaactactaccgcattgtagcacggtacgaaaatacccttgccgcacagtttttcggccatacacatgttgacgaatttgaggtgttctatgacgaagaaacactgtccaggcctctagcagtggccttcctggcgcccagcgctacaacttatatcggcctgaacccaggctaccgggtgtaccaaatcgatgggaactattctggaagctctcatgttgtgttggaccacgagacttacatattaaatctgacgcaggcaaacatacctggagccatcccccattggcagctgttgtaccgggcccgtgagacttacggtcttcccaatacactccccactgcctggcacaacctggtctaccggatgaggggcgacatgcagctgttccaaactttctggttcttgtatcacaagggtcaccccccaagtgagccatgcgggacaccctgtagactggccactctttgcgcccagctttccgcaagagctgattcaccggccctatgtcgccatttgatgccagatggaagtctgccggaggcgcagtctctgtggccgcgtccactcttctgc

SEQ ID NO: 12073 - DNA, 1893 bp, Artificial Sequence
  derived and/or modified sequence
atgccgaggtacggggcctcactgaggcagagttgtccccgatcaggtagggagcagggccaagatgggactgccggcgctccgggcctgctgtggatggggctcgtgctggccctcgctctggccctggcgctcgctctggcactgagcgatagccgggtgctgtgggcccccgccgaggcgcatcctctctcaccgcagggccaccccgcccgacttcaccgaatcgtgcctagactgcgtgacgtattcggctgggggaatctaacctgccctatatgtaaaggactgttcacggccataaacctcgggttgaagaaggagcccaacgtagcgcgggtgggcagtgtcgcgatcaaactatgcaacctactaaagatagctcctcctgcagtctgtcagagtatagttcacctctttgaagacgatatggtagaggtctggcgcagatctgtgcttagcccaagtgaagcttgtggcctgctactgggttctacttgcgggcattgggacatcttctccagctggaacataagtctgccgacagtgcctaagcctcctcccaaaccaccaagcccccctgcacccggtgcacctgtttcgagaatcctcttcctcacggacctgcactgggaccatgactacctggaaggtacagatcccgattgtgcagatcccctttgttgcagacgtggctcaggcctgcctcctgccagccggcctggtgccggttactggggagagtactctaaatgtgacttgcccctgagaacactagagagcctgctctctggactgggacccgctggaccgttcgacatggtgtactggaccggtgacattcctgcacacgacgtgtggcatcagactcgacaggaccaactgcgagccctaactactgtaaccgcactagttcgtaagttcctggggcccgttccagtttatcccgctgtgggcaaccatgaaagtactcccgtgaatagcttcccaccccccttcattgaaggcaaccactcttcccgatggctatacgaggcaatggccaaggcatgggaaccttggctaccggccgaagccctgcggaccctgcgtattggagggttctacgctcttagcccctaccctgggctgcgcctgatttcccttaacatgaacttctgctcccgggagaatttctggttgctcatcaattctaccgatcccgcaggccaactacagtggctggtgggtgagctgcaggcagccgaagaccgaggggacaaggtacatatcatcggtcacatcccccctggtcactgtttaaagagttggtcctggaactactaccgcattgtcgcccgttatgaaaacactctggcggcacagttttttggccacactcatgtcgatgagtttgaggtgttctatgacgaagaaaccctgtctagacctttagctgtcgcatttctggccccgtctgcaaccacatacatcgggctgaaccctggttaccgcgtgtatcagattgacgggaactactccgggagctcacacgttgtgctggatcatgaaacctacattctaaatttgacccaggctaacatacccggggctattccccattggcaattgctgtatcgagccagagagacatacgggctacctaataccttgccgacagcttggcacaatcttgtttatcgaatgcggggtgatatgcagttatttcaaaccttttggttcttataccataaaggccacccgcctagcgagccctgcgggacaccatgtaggctggccacgctctgtgcccagctgtctgccagagctgactcaccggccttgtgcaggcatttaatgcccgacggtagcttgcctgaggcccaatctctctggcctcggccccttttctgt

SEQ ID NO: 12074 - DNA, 1893 bp, Artificial Sequence
  derived and/or modified sequence
atgcccagatacggtgcttcactgaggcaatcctgcccgcggtcggggcgcgagcagggacaggacggtactgctggcgcccccgggctgctgtggatgggacttgttctagctcttgcccttgccctagcattagcgttggcgttgtcggatagtagagtcctctgggctcctgctgaagcgcatccattgtctccacaaggacaccccgcacgattacataggatagtaccgcgcttacgcgacgtattcggatggggcaatttgacatgccccatctgtaagggactttttaccgctatcaatttgggactgaagaaggagcctaatgtcgctcgcgtcggctcggttgccatcaagctatgcaacttgctgaaaattgctccacccgcggtctgtcagtctatcgttcacctttttgaggatgatatggtggaagtttggcgtcgttccgtactcagccccagcgaagcctgcggtcttcttctcggttccacttgtggtcattgggatatcttttcgagttggaacatctctcttcccacggtccccaagccccctcctaagcctccgtcgccgccggcccctggggctccggtttcccgcattctattcctaactgacctgcattgggatcatgactatctggaggggaccgatccggactgcgctgatcccttatgttgccgccggggcagtggtctcccccctgcttcccggccaggagcgggctactggggagaatactcgaaatgcgacctgcccctacgaacattggaatctctcctgtccggtttgggtcccgccggcccattcgacatggtctattggaccggggacatccccgcgcatgacgtttggcatcaaacacgtcaagaccaactccgcgctctgacaacagttaccgctctcgtccgtaagtttcttgggcctgttcctgtgtatccagcagtcggaaaccacgagtcaactccagtgaacagtttccctcctcctttcatagaaggtaaccactcttctcggtggctgtacgaggcgatggcgaaagcgtgggaaccatggctaccagccgaagccttgcgaacactccgaatcggcggattctacgcgttgtctccatacccaggtcttagactcatctctctcaacatgaatttttgctcccgggagaatttctggctgctcataaattcgaccgaccctgcgggacaactgcaatggctggtgggggaactccaggcagcagaggataggggggacaaggtgcatattatcggacatatccctccaggacattgccttaaatcatggagctggaactattatcgaattgtagctcgttacgaaaacactctcgcagcacaattcttcggtcatacgcatgtcgatgagttcgaggtattctatgatgaagagaccctttcgcgaccattagcggtggccttcttggcaccttcggctactacttatatcgggctcaacccaggatatcgtgtgtatcaaatagatggcaattattcaggtagttcccacgtagtgctggatcatgagacctatattcttaatcttacccaggcaaatatccccggtgcaattccacattggcaattgctgtacagagctagggagacctacgggctgcccaatacactaccaacggcatggcacaacttggtgtaccgtatgcgcggtgacatgcaactcttccaaactttttggttcttgtatcacaagggccatccaccttctgaaccttgcgggacgccgtgtcggctggcaactctgtgtgctcaactcagtgcccgggcggattcgccggcattgtgtcgacacctgatgcctgatgggtcgttgccggaggcacagagcctatggccgcgtcccttgttctgc

SEQ ID NO: 12075 - DNA, 1893 bp, Artificial Sequence
  derived and/or modified sequence
atgccgagatacggtgctagcctgaggcagtcctgccctagatcggggagagaacagggccaggatgggactgcgggagcaccaggccttttgtggatgggtcttgtcctggcgctggcacttgcattggcgcttgcactggcactttcggactcgcgcgtgctgtgggcaccagcagaagcacatcctctcagcccacaaggtcacccagccagactgcaccgaatcgtgcctaggctccgggatgtgtttggatggggaaatcttacctgtccaatctgtaaggggctcttcactgctatcaacttgggacttaagaaggaacccaacgtggcaagggtgggttcggtcgccataaaactttgcaacctgctgaagattgcaccgccagcagtctgccaaagcatcgtgcacctcttcgaagatgacatggtcgaagtgtggagaagatccgtgcttagtcctagcgaggcctgtggtctgcttcttggctccacctgtggacactgggatatcttctcctcgtggaacatatccctgcctactgtgcctaagccacctccaaaacctccatcgccacctgcaccaggagcaccagtgagcaggatactgttccttaccgatctgcactgggaccatgattaccttgagggcaccgacccggactgtgcagatcctctgtgttgtagacgaggatcgggactgcctccggcgtcccgccctggggctggatactggggggaatatagcaagtgcgatctgccacttaggaccttggaatcgctcctcagcgggctcggccctgctggcccgttcgacatggtctactggaccggagatatcccggcacacgatgtgtggcaccagacccggcaagatcaactgagagcacttaccactgtgaccgcgctggtcaggaaattcctgggtcctgtcccggtttatcctgcggtgggaaaccatgaaagcacgccagtgaacagctttccaccaccgtttattgaaggcaaccattccagccggtggctgtacgaagctatggcaaaggcatgggagccatggctgcctgcggaggcactgagaactctgagaatcgggggattctacgcgctgagcccttaccctgggttgagacttattagcctcaatatgaacttctgttccagagaaaacttctggctgctgattaactctactgaccctgcaggacagctgcagtggctcgttggagaactgcaggccgccgaagatcgcggagataaggtgcacatcattggtcatattccccccggccattgtctcaagtcctggtcatggaattactacagaattgtggcgcggtacgaaaacactctggcagctcagttttttggacacactcacgtggatgagtttgaagtgttttacgatgaggaaacccttagcaggcctctggcagttgccttcctcgcaccatcagcaactacgtatatagggcttaatcctggctaccgtgtgtaccaaatagacggaaactactcgggttcgtcacatgtcgtccttgatcacgaaacttacatcctcaatctcacccaagccaatatacctggagccattcctcattggcaattgctgtacagagcccgtgagacttacggattgccaaatactcttcccacggcatggcataacctggtctaccgcatgcggggagatatgcagctgtttcaaaccttttggttcctttaccacaagggtcatccgccaagcgagccttgtggcaccccatgccgccttgccaccctttgtgcacaactgtccgcgcgggcagactccccggcactgtgtcggcaccttatgccagacggttcgcttccggaggcccaatccctgtggcctcgcccactgttttgt

SEQ ID NO: 12076 - DNA, 1893 bp, Artificial Sequence
  derived and/or modified sequence
atgcccaggtatggagcaagcttacggcagtcatgtccaaggtcgggccgagaacaggggcaggatggcactgctggggcacccgggctgctgtggatggggctggttttagccctggcgctggccttggccctcgcattagcactctctgactctagagttctgtgggcgcccgctgaagcccacccattatctccccagggccatccagctcgactgcaccgaattgtgcccaggctccgggatgtgtttggatgggggaatctcacctgccctatttgcaaaggccttttcactgcaatcaacttgggcctgaaaaaagaacctaatgtggcaagggtaggttcagtggctatcaaactgtgtaacctgctaaagattgctccccccgccgtgtgccagtcgattgtccacctgttcgaagacgacatggttgaggtctggaggagatccgtgttatcgccgtcagaggcctgcggcctgctgcttgggtctacctgtggacattgggatattttttcgagctggaacattagtttaccgaccgtgcctaagcctcctccaaagccccccagcccgcctgcccccggtgctcccgtttcaagaatcctgttcctgaccgacttgcattgggaccacgattacttggaaggcacagaccccgattgcgctgaccccctgtgttgcaggagggggtccggactgccacctgctagtcgtccgggcgctggatactggggcgaatactccaaatgcgacctgccactgaggactctggaatccctactgtcaggcctgggccccgctggcccttttgacatggtgtactggacgggagacatcccagcccatgatgtctggcatcaaactcgacaagaccagcttcgagcactgactacagtcacagcactcgtaaggaagtttctcgggcctgtccccgtatatcctgcggtgggtaaccacgaaagtactccagtgaatagctttccccctccgtttatcgagggaaatcatagcagccgttggctgtacgaagcaatggccaaagcctgggaaccctggttaccggccgaagcactgaggacgctcaggataggaggcttttacgcgctgtctccctaccctgggctgcgattgatcagcttaaatatgaatttttgctccagggaaaatttctggctgctgattaattccaccgaccctgccggccagttgcagtggctcgtgggagaacttcaagccgccgaggacaggggggataaagtgcatattatcggtcacatccctccaggacactgcctgaagtcatggagctggaattactacaggattgtagctaggtacgagaacaccctggccgcacagttctttggacacacccatgttgacgagtttgaggtgttttacgacgaggaaactctgtctcgtccactggcagtggcattcctcgcaccttcagcgaccacgtatatcggtctgaatcctgggtatagagtgtaccagatcgacggaaattactctggctcctcacacgtagtccttgaccatgagacgtacatcctgaatctcacacaggctaatatccccggggcaatcccccactggcagctactatatcgagcacgggaaacttacggtctgccaaatacgctgcccacagcctggcacaacctggtttaccgtatgagaggggacatgcagttgtttcagaccttttggtttttatatcacaaaggacacccaccctccgaaccttgtggcacgccttgtcgtctggctacactctgtgctcagctctccgccagagccgatagtcctgctctgtgtcgtcatctgatgcccgacggaagcttgcctgaagcccagtccctgtggccacgaccgctgttttgc

SEQ ID NO: 12077 - DNA, 1893 bp, Artificial Sequence
  derived and/or modified sequence
atgcctcgttatggggcgagccttcgccaaagttgccccaggagcggtagagaacaaggtcaagatggcaccgcaggtgcaccagggctgctgtggatgggtcttgtccttgcccttgcactggcacttgccctcgcgttggccttgtccgacagccgggtgctgtgggcccccgctgaggcacatcccctgtcccctcaaggccatcctgcacggctgcatcgaatagtccctcggctgcgtgatgtattcggatggggcaatctgacttgtccaatttgtaagggccttttcactgcaatcaacctgggcctcaaaaaagaacctaacgtggcacgggtcggatcagtggccatcaaactttgtaacttgttgaagatcgctcctcctgccgtgtgtcaaagcattgtgcatctgttcgaagatgacatggtcgaggtgtggcgccgctcggtgttgtcaccctcggaagcatgcggacttctgctcggctccacctgcggccactgggatatcttttcctcatggaacatctcgctgcctactgtgcctaagccgcctcctaagcctccttcccctcctgccccgggagcaccagtgtccagaatcctgtttcttaccgaccttcattgggaccacgactatctggaaggaactgatcccgactgtgcagatccattgtgttgccgtagaggctccggacttccaccagccagcaggcctggggcaggatactggggcgagtactccaagtgtgatcttcctctgagaactcttgaaagcctgctgtcggggcttggtcctgcgggaccatttgatatggtctactggaccggcgatattccggcccatgatgtgtggcatcaaaccagacaggaccagcttagagcgcttaccaccgttactgccctggtccggaagtttctggggccagtcccagtgtatcctgcagtgggcaaccacgaatcgacgccagtcaactcgttcccacctccattcattgagggaaatcattcgtcacgatggctgtacgaagcaatggcaaaggcatgggagccttggcttccagcagaagcactgcggacccttagaataggtggcttttacgccctttccccatacccaggacttcggctgatttccttgaacatgaatttctgctctcgcgaaaacttttggctcttgatcaattctaccgacccagcgggccagcttcagtggctcgtgggcgaattgcaagcggcagaagatagaggcgataaagtgcatatcatcgggcatattcctcccggtcattgtcttaagtcatggtcgtggaactactacagaatcgtggcaagatacgaaaatactctggcggcgcaattctttgggcatactcacgtcgatgagtttgaggtgttctacgatgaggaaactctttcccgccctctggcagtggcattcctggctccttccgcgactacctacatcggtcttaaccccgggtaccgcgtctatcagattgatggaaactactccgggtcgtcgcatgtggtgctcgaccacgagacttacatcttgaatcttactcaggcaaacattccgggagcgatcccccattggcagctgctgtacagggcgcgcgaaacctacggactgcctaatactctccccactgcgtggcataatctggtctacagaatgcgtggagatatgcaactcttccaaaccttttggtttctgtaccataagggtcaccccccgtcagaaccttgtgggactccttgccgtctggcaactctctgtgcacagcttagcgcacgtgcagattcgccggctctctgtaggcatcttatgccagatggctcccttccagaagcacagagcctgtggccaagaccccttttctgc

SEQ ID NO: 12078 - DNA, 1893 bp, Artificial Sequence
  derived and/or modified sequence
atgcctaggtatggggcctccctgaggcagagttgcccaaggtccggacgcgaacaggggcaggacggcactgccggagctcccggactgctctggatgggactcgttcttgcacttgcgcttgcactggctcttgctctggcattgagcgactcaagggtgctgtgggctcccgccgaggcccatccactctctcctcaggggcaccccgcccggctacataggatcgtgccaagactgcgcgatgtctttgggtggggtaacctgacgtgtcccatttgcaaaggcctcttcaccgccattaacctggggctgaaaaaagagcccaatgtagcccgagttggatcagtagcgattaagctatgtaacttactcaagatcgccccccccgccgtttgccagtctattgtgcacttgtttgaagacgacatggtggaggtatggcgcagatccgtgctgtctccatcggaagcttgtggactcctcctgggatctacctgcggccattgggacatcttctctagctggaacataagtctgcctaccgtgcctaagcccccgcccaaacccccttctccacctgctccgggcgcacccgtctctcggatcctgttcctgacagatctgcattgggaccatgactatctggagggcacggatcccgactgtgcggatcccctctgctgcagacgagggagcggacttccgcccgcctcgcggcccggagctggctattggggagagtatagcaaatgtgaccttcctctgcgaaccctggaatctctgctttcaggactcggccccgctgggccttttgacatggtatactggactggcgatatccctgcgcacgacgtatggcatcagaccaggcaggatcagttgcgggctctgaccacagtaaccgccctcgtccggaagtttctgggtcccgtccctgtctatcccgccgtcgggaatcacgagtctaccccagtcaacagcttcccacctcccttcattgagggaaaccactcatcaaggtggttatacgaggctatggctaaagcatgggagccatggcttccagccgaggctctccgaacacttcgtattggaggcttctacgctttgagcccgtaccctggcctgcgactgatatcgcttaacatgaatttctgctcaagagaaaatttttggctgttaatcaattcaacagacccagccgggcagctgcagtggttggtcggcgaattacaggctgcggaggaccgcggagataaggtgcatatcattggccatattcctcccggccactgtctcaagtcctggtcttggaactattaccgcattgtggcacgttacgagaatactcttgccgcacagttttttggccatacgcacgtcgacgagttcgaagtcttttacgatgaggaaaccctctcgagacctctcgctgtggcctttctcgcaccttcagctactacttatattgggctgaatccaggctatagagtctaccagattgacggcaattactcaggtagtagtcatgtggttctggatcatgagacctacatactcaacctgactcaggcgaatattccaggcgccattcctcactggcaactgttgtacagagctcgggagacgtacgggctcccaaataccctgcctacagcatggcacaaccttgtctaccgaatgcggggggacatgcagctcttccagacattttggtttctctatcataaaggccatccaccatctgagccttgcggaacgccctgtcggcttgccactctgtgcgcccagcttagtgctcgcgcggattcccccgcgctctgccgacacctcatgcctgatgggagtttgcctgaagcccagagtctgtggccaaggcctctgttttgc

SEQ ID NO: 12079 - DNA, 1893 bp, Artificial Sequence
  derived and/or modified sequence
atgccaaggtacggagcttcactgagacagagttgcccgaggagtggccgggagcaggggcaagacggaacagcaggcgcacctggccttctttggatgggcctagtgctggctctggctttagctctggccctggcattggccctcagcgatagcagggtattgtgggcaccagctgaagctcatccactatcccctcagggccatcccgccagactccaccgaatcgtcccccgtcttcgagatgtgtttggttggggtaacttaacttgtcctatctgtaagggtctctttaccgccattaacctggggctcaaaaaggaacccaacgtcgcccgtgtggggtcagtagccataaaactgtgcaacctactcaaaattgcgccgcctgcagtgtgtcaatctattgtgcatctgttcgaggacgacatggttgaagtctggagaagatctgttctgagcccgagcgaggcttgcggtctgctgctaggctccacctgcgggcactgggacatattcagttcatggaacatctcgctccctacagtaccgaagccccctcccaaaccaccatctcccccagcacccggggcacctgtctctaggatactgttccttactgacttgcattgggatcatgattatttggaaggaacagaccccgactgtgctgacccactgtgctgccgaagaggctcaggcctgccgcctgcatcccgtcctggtgcaggttattggggggagtacagtaaatgcgatctccctcttagaacgctggagtccctcctgtctgggctggggcccgctggtccatttgacatggtttattggacaggcgacatccctgctcatgacgtgtggcatcagactcggcaggaccaactacgagccttgactaccgtgacagcactggtgcggaagttcctgggccctgtgcctgtttacccggcagtgggtaatcacgagagtacaccggtgaattccttcccgcctccctttatagagggtaaccacagttcacgatggctttatgaagcgatggccaaggcttgggagccctggctgccagcagaggctttaaggacattacgaatcgggggcttttatgcgctctctccatatcctggccttcgtctgatcagccttaatatgaatttctgctccagagagaacttctggcttctaataaactccaccgatccagccgggcaacttcagtggttggtgggcgagttgcaggccgcggaggacaggggcgataaagtccatatcattggccatatccctcctgggcactgcctgaagtcctggagctggaactattatagaattgtggcacgttatgaaaacactctggccgcccagttcttcggccatacccacgtcgacgaattcgaagtcttctacgatgaagaaaccctgtcacggcccctggccgtcgcattcttggctccatctgcaacaacttacatcggactgaaccctggataccgcgtctaccagatcgacggcaattactccgggtcgtcccatgtggttctggatcacgagacttatatactgaatctgacacaggctaatattccgggagccatccctcactggcagctcttgtaccgagctcgggagacctatggcctgccgaataccttaccaactgcatggcataatctcgtttaccggatgagaggcgatatgcagctgtttcagactttctggtttctataccataagggccaccctccttccgaaccatgtgggaccccttgtaggctggccacgctatgcgcacagctgagcgctcgagccgactcaccagctctctgccggcatctgatgcccgatgggtctctcccagaggctcagtctctgtggccccggccgctcttctgc

SEQ ID NO: 12080 - DNA, 1893 bp, Artificial Sequence
  derived and/or modified sequence
atgcctcgttatggagcatctcttcggcaatcgtgcccgaggagcggcagagaacagggccaagacgggaccgcgggagcgccgggattattgtggatgggacttgtattagctcttgccttagcgttggctctcgcactcgcccttagcgatagccgtgtgctgtgggctcctgctgaggctcatcctttgtcccctcagggtcacccggcccggttgcatagaatcgtgcccagactgcgtgatgtcttcggctggggtaatttaacctgcccgatctgcaaaggtttgttcaccgccattaatttgggccttaaaaaggaacctaatgtggccagagttggaagtgttgcgatcaaactatgtaatctgctgaaaattgcaccaccggcggtctgccaaagcattgtacacttatttgaagatgacatggtcgaggtttggcgtaggtctgtcttatccccgtctgaagcgtgcggactgttactcggaagtacatgtggccattgggatatattttcttcctggaatatttcgcttccgacggttccgaaaccgccgccaaaaccgccgtccccgcctgcaccaggcgcacctgtcagcaggatacttttccttacggaccttcattgggatcatgactatctcgaaggcactgatcctgactgtgctgatcccctgtgttgcagacgtggctcaggtttaccgccggcttcgcggcctggagcgggctattggggcgaatattccaaatgcgacctgcccctgcgtaccttggaaagccttctctccgggctgggtccagccggaccgttcgatatggtctactggacgggcgatatccctgcacatgacgtgtggcatcagacccgtcaagaccagctgcgggccttaacaactgtgactgcccttgtgcgtaaatttttgggaccggtaccagtatacccggcggtgggcaaccatgaatctaccccggtgaactcttttcctcccccgttcatagagggcaatcattccagccgctggctttatgaagcgatggctaaggcttgggaaccatggttgccggctgaggcactgcggacgctgagaattggcggattctacgcactcagtccttatcctgggctgcggcttatttctctcaatatgaacttttgttcccgggaaaatttctggttgctgatcaacagcacagatccggctggccaattacaatggcttgtaggcgagttgcaggccgcagaagatcgcggcgataaggtacatattatcggccacatacccccaggtcattgtcttaaatcatggtcatggaactattatcggatagttgctcgttatgaaaacacactggcagcacaattctttggacacacacatgtcgatgaatttgaagtgttctacgatgaagaaacgctgtccaggcctttggctgtcgcattcctggccccttcggcaactacatacattggtttgaatccgggctacagggtctaccaaattgacggaaactatagcgggtcatctcacgtagttcttgatcacgaaacttatattcttaaccttacgcaagcgaacattcctggagcaatcccgcactggcagcttctttatcgggcacgtgaaacttacgggttgccgaacaccttacctactgcttggcacaacttggtctatagaatgcgtggggacatgcaactattccaaactttctggtttttatatcacaaaggacacccaccgtccgagccatgtggcacaccgtgtagacttgctacattatgtgcccaacttagcgctcgagccgattcgcctgctctttgccggcatttaatgccggatggctctttgcccgaggctcagtcactttggccacgaccgttattctgc

SEQ ID NO: 12081 - DNA, 1893 bp, Artificial Sequence
  derived and/or modified sequence
atgccccgatatggggcctctctccgccagtcatgtccacgctcaggacgagaacaggggcaagatggcacagcgggcgctcctgggctgctgtggatgggactagtcctggccttagcattggccctggctttggctttggctctgtcggacagcagggtgctttgggcccccgcagaggctcaccccctgagccctcagggccaccccgcccgccttcatcggattgttccacgtctgagggatgtctttggatggggaaacctaacgtgtccaatttgtaagggcctttttactgcaataaacctcggacttaaaaaggagcctaacgtcgccagagtgggctcggtggccatcaagctctgtaatctgctgaaaattgcacctcccgcagtgtgccagagcatagtgcatttgttcgaggatgacatggtggaagtctggcggcgatcggtacttagccccagcgaggcgtgcggccttctgttgggttccacatgtggccactgggacatcttctcatcatggaacattagcctgccaaccgtgcccaagcctccgcctaaaccaccgagtcctccagcgcccggcgctcctgtgtctaggatcttgttccttactgacctgcactgggatcacgactatctggagggcacagacccagattgtgctgaccctctctgttgcaggcgcggaagcggcctgccccctgcctcaaggccgggcgctggttattggggagagtatagcaagtgcgaccttccgctgaggactttggagagccttctcagcggactaggacctgccggtccattcgatatggtatattggacaggcgatatccctgctcatgatgtgtggcatcagaccaggcaagaccaactgcgggcgttgaccacggtgaccgcgctggtgaggaagtttttaggtcctgtccctgtgtatccagccgtgggaaaccatgagagcacgcccgtgaattcttttcctcctcccttcatcgagggtaaccatagctctagatggctatatgaggccatggcaaaagcctgggaaccctggctgccggccgaagctctgaggacgcttcgcatagggggattctatgccctaagtccttaccccggcctgagattgatttcccttaatatgaacttttgcagccgagaaaatttttggcttctgataaattctacagaccccgctggtcagttacagtggctggtgggggaactccaagccgctgaagatagaggtgataaggtccacatcatcggacatattccgcccggtcattgtcttaaatcctggtcttggaactactaccgtattgtggccaggtacgaaaacactctcgctgcacaattcttcggacatacccatgtggatgaatttgaggttttttacgatgaggaaactctgagcagacccctggctgtggccttcctagccccctcagccaccacttacattggcctgaacccggggtaccgagtgtaccagattgacggtaattactcaggtagtagccacgtggtgctggatcatgagacttatatcttgaacctcacccaggccaacattcctggagcaatcccccactggcagctcttgtacagagctagggagacttatggcctaccgaatacgctgcctaccgcttggcataacttggtgtataggatgcggggtgacatgcagctcttccagaccttttggttcctttatcataaaggccacccgccatccgagccttgcgggacaccatgtagactcgctaccctgtgcgcccaactgagcgcaagagcagacagccccgcactgtgcaggcatctgatgcccgatggaagcctgcccgaagctcaaagcctctggccaaggcccttgttttgt

SEQ ID NO: 12082 - DNA, 1893 bp, Artificial Sequence
  derived and/or modified sequence
atgccacgatatggcgcgtctctgcggcagtcttgccctagatcggggcgcgaacaaggtcaagatggaacagccggtgctcctggtctcctctggatggggctggtgctcgcccttgctcttgcgctggctctggccctcgctctttccgattcaagggtcctctgggccccagccgaggcccatccactgtcaccgcagggacaccccgcccgtctgcaccggattgttccccgactgagagacgtgttcggatggggaaatctcacttgcccaatttgcaagggactgttcaccgccatcaatctcggcctgaagaaagagccaaatgttgccagggtgggaagtgtcgccattaaactgtgtaatcttctaaaaattgctcctccagccgtctgtcagtcaatagtgcatctgtttgaagacgacatggtggaggtttggagacggtctgtgctgtcaccttctgaggcttgtgggctgctactgggtagtacttgtgggcattgggatatttttagttcttggaatattagtttgccgactgtgcccaagccccctcctaagcctccaagcccccccgccccaggtgcacctgtgagccgaatactgtttctaacggacctgcactgggatcatgactatttggaaggtacagaccctgactgtgcggatccactgtgttgtcgacgaggttccgggctgccaccggcatctcgaccgggagccggatactggggtgagtactcaaaatgtgacctaccgttgcgcactctggagtctctgctctcggggcttggcccagctggacctttcgatatggtctactggaccggagacattcccgcccacgacgtctggcaccagacaagacaagaccagttgcgagctctcacaacagtaacagccctggtgagaaagtttctgggtcctgttccggtctatcccgctgtcggaaaccatgagtcaactccagtgaatagcttcccccctcccttcatcgaggggaatcacagttctaggtggctgtatgaggccatggccaaggcttgggaaccatggctgccggcggaagccctgcgcacgctccggattggggggttttatgctctgtcaccttaccccggattgcggctgatcagcctcaatatgaacttctgcagcagggagaacttctggttgttgatcaattctacagatccagcaggccagttgcagtggttggtaggggaattgcaggctgccgaagacagaggggataaggtgcacataatcgggcacatccctcctgggcactgcctcaaatcgtggagctggaattactatcggatagtcgcgcgatacgagaacacgctggccgcccagtttttcggccatacccatgtagacgagtttgaggtcttttacgacgaggagaccctgagccggcctctggctgttgccttcttagccccatctgccacgacctacattgggcttaacccaggctatagagtgtatcaaattgatggcaattactccgggtctagccacgtggtgctggatcatgaaacctatatactgaatctgactcaggctaatattcccggagctattccgcattggcaactgttgtacagagcccgcgaaacttatgggctgcctaacacacttcctactgcttggcataatctcgtgtacagaatgcgcggggatatgcagctgtttcaaaccttctggtttctgtatcataaagggcatccgccttcggaaccttgtggtaccccatgtagattagcaactctttgcgcacagctctcagctagagccgatagcccagctttgtgcagacatcttatgcctgatgggagcctccccgaagcccagtcactatggcctcgcccccttttctgc

SEQ ID NO: 12083 - DNA, 1893 bp, Artificial Sequence
  derived and/or modified sequence
atgccacgctacggcgctagccttaggcagtcatgtccaaggagtggacgtgaacagggacaggatggaacagcgggagctcccggacttctctggatgggacttgtgcttgccctcgctcttgcgttagcacttgcactcgctctgagcgattccagagtcctttgggctcctgcagaggcacacccgctgtccccgcaaggacatcctgctcgcctccaccggatagtgccccggcttcgggacgtcttcggatggggaaatttaacctgcccaatctgtaaaggattgttcaccgccatcaaccttggattaaaaaaggaaccaaacgtggccagagtgggatctgtggccatcaaattatgcaacctgctgaagatcgcccctccagctgtgtgtcagtcgatcgtgcaccttttcgaagatgacatggtcgaggtttggaggcggtccgtactttccccatccgaggcatgcggcttgttactgggctccacatgcgggcattgggatatcttcagctcttggaacatttccttgcctactgtccccaaaccacctccaaagccaccctctccacctgcacctggagcccccgtcagcagaatcctgttcttgacagatctccactgggaccacgattacctcgagggaacggatcctgactgtgccgacccattgtgctgtaggcgggggtcaggactgccaccagcgagccgcccaggcgctggatactggggcgagtacagcaaatgcgatttgccactcagaaccctcgaaagcctgctctctgggctgggacctgctggaccgtttgacatggtatactggaccggcgatatccccgcccacgatgtgtggcaccagaccagacaagatcagctcagagccctcactaccgtgacagctctggttcggaaattcctgggccctgttcccgtgtatcccgcagtgggaaatcatgagtcaacccctgttaacagtttccctcccccgtttatcgagggcaaccattcttcaaggtggttatacgaagctatggctaaagcttgggaaccctggttgcccgcagaagcccttcggacactgaggataggaggtttctatgcacttagtccatacccaggacttaggctgatcagcctgaacatgaacttctgctcaagagaaaatttctggctgcttataaactctaccgacccggcgggccagttgcagtggcttgtaggcgagctgcaggctgctgaggaccggggagataaggtccacatcataggccacatccctcctggacactgtctcaagagttggagttggaattactacaggattgtggcacggtacgagaacaccctcgcagcgcagttcttcggtcatactcatgtggacgagttcgaagtcttctacgacgaggagaccttgtcacgcccgctggctgttgctttcctggccccctctgcaacgacatacatcggtttgaacccggggtacagagtgtatcagattgacgggaactatagcgggagttctcatgttgttctggatcatgagacttatatactaaacttgacccaggctaatatccctggcgctatcccccactggcaactgctctacagagctagggagacctacggcctgccaaacactctacccacagcgtggcacaatctcgtatacagaatgcgcggagacatgcagctttttcaaactttttggttcctttatcacaagggccatccgccaagcgagccatgcggaacaccctgccgtctggctactttgtgtgctcaactgagcgcaagagctgatagcccagccctttgccgccacctgatgcctgacggcagcctgcccgaggcccagtcactttggcccagaccactgttctgt

SEQ ID NO: 12084 - DNA, 1893 bp, Artificial Sequence
  derived and/or modified sequence
atgccacggtatggagcatctctccgccagtcttgcccacgctccggccgcgagcagggacaggatggtaccgctggcgctcctggtctcctttggatgggcctcgttctcgctttagccctggcattggcccttgcgctggcactgtctgatagccgggtgctgtgggcaccagccgaggcccacccgctaagtccacaaggacatccggcccgcctgcatcgaatagtgcccaggctccgggatgtctttggttgggggaacctgacttgtccgatctgtaaaggccttttcacggctattaacctcggtctgaagaaagaacccaacgtggccagagttggatcggttgccatcaagctttgcaatttactgaaaatcgctcctccagcagtttgccagagtattgtgcatttattcgaagatgacatggtggaggtttggcgaagatccgtgctgtccccttccgaggcttgcggtttgctgctgggctcgacctgtggacactgggatatattttcgagttggaacatttcactcccgaccgttcccaaacctccccccaagcctccctcacccccggccccaggcgctcccgtttctcgcattcttttccttactgacttacattgggatcacgactatctcgaaggcaccgatccggattgtgcggatcctttatgctgcagacggggtagtgggctgcccccggcttcccggccaggagctggttactggggcgaatatagcaagtgcgatctccccctgagaacactagagtcgcttctttccgggctgggccccgcagggcccttcgacatggtgtactggacaggtgacatccctgcacatgacgtgtggcaccagacccggcaggaccagctaagggcccttactacagtaactgccctggtgagaaagttccttggtcccgtgcccgtttatcctgcggtgggcaaccatgaatcgacgccagttaactcttttcctccacccttcattgagggcaaccacagcagccgatggttgtacgaggctatggccaaagcctgggagccctggctgcccgccgaggccttaaggacattgcggattggcggattttatgccctcagtccttatccaggcctccggctgataagtctgaacatgaatttttgtagccgagaaaacttttggctcttgatcaatagcaccgacccagctgggcagttgcagtggttggtcggtgaactccaagctgccgaagataggggcgataaggtgcacataataggacacatacctcccggacattgtctgaagtcttggagttggaactattatcgaattgttgccagatatgaaaacacgctcgccgctcagtttttcggtcacactcacgtggatgagtttgaagtattttacgacgaagaaaccttgtctcgcccccttgcagtggcatttttagctccttctgccaccacctatattggactgaatccaggataccgggtgtaccagatagatggcaactattctggcagcagtcatgtggttctggatcatgagacgtacattctaaatttgacacaggcgaatatcccaggagcaataccgcactggcagctgctttatcgggcccgcgagacatatggactgcctaacaccctccctacagcctggcacaacctggtgtatcggatgaggggagacatgcagctgttccagactttttggttcctatatcataaaggccatcccccttcggaaccatgtggaacgccgtgcaggctggccactctttgtgctcaactctccgccagagccgactctcccgccctgtgtagacatctaatgccagacggatccctccccgaggcacaatccctctggcctcggcccctgttttgt

SEQ ID NO: 12085 - DNA, 1893 bp, Artificial Sequence
  derived and/or modified sequence
atgccacgctacggagcttcgcttcgccaatcctgtccccgctccggacgtgagcaagggcaggacgggacggcaggcgcaccaggtctgctgtggatgggtcttgtgctggcgcttgcattggctctggccctggctctggcactttcggattcgcgagtcctgtgggcccctgcagaggcccatcctttgagcccacaaggtcatccagcccgccttcatcgcatcgtgcccagactgagagatgtctttggatggggcaacctgacgtgtccaatatgcaaggggcttttcactgccattaaccttggactgaagaaggagccaaatgtcgcccgtgtgggtagcgtggcgataaagctgtgtaatctgctgaagatcgcgccgcccgcggtctgtcaatcaatcgtgcaccttttcgaagatgacatggtggaagtgtggaggcgctcagtgctttccccttcggaagcatgtggcctccttttgggcagcacctgcggacactgggacattttcagctcctggaacatttctcttccaacggtgccaaagcctccccctaagccaccatcacctccggcacctggggcacccgtgtcacgcattctgtttctcactgacctgcattgggatcatgattaccttgaaggtactgacccggattgcgcagatccactgtgttgcagaagaggatcaggcctcccacctgcatcacgacctggagcaggatactggggggaatactccaagtgcgatctccccctgcgtaccttggaatccctcctttcgggacttggtcctgccggcccgttcgacatggtgtactggactggagatatacccgcacatgacgtgtggcatcaaactcggcaagatcaacttagagcattgaccactgtgaccgccctcgtgaggaaattcctcggacccgtgccagtttaccctgcagtgggaaatcacgaatccactcctgttaattcattccctccaccgtttattgaaggaaaccattcctccagatggctttacgaagcaatggcaaaggcatgggaaccatggctgcctgctgaggccttgcggaccctgcgaattggcggtttttacgccctttcgccctacccgggacttcgtcttatctcccttaacatgaacttttgtagccgtgagaacttttggcttttgatcaattcgaccgaccctgccgggcaactgcaatggcttgtgggagaacttcaagccgcagaagatcgaggtgataaggtccatatcatcggccatatcccaccgggacactgcctgaaaagctggagctggaattactaccggattgttgcaagatacgagaacactcttgcagcacagtttttcggtcatacccatgtggatgaattcgaagtgttctacgatgaggagacgctctcgcgcccgcttgcagtggcatttctggcgccttcagcaactacttacatcgggctcaatcctggttaccgcgtgtaccaaattgatggtaactactcaggttcgagccatgtggtgctcgatcatgagacttacattctgaaccttactcaggcaaatatcccaggggcaatacctcactggcagctgctgtacagagcaagagaaacctacggacttccgaacactctgcctactgcgtggcacaatctcgtttacaggatgcggggtgatatgcagctttttcaaaccttctggtttctgtaccataaagggcaccctccaagcgaaccttgcggaaccccttgtcggctggcaactctgtgcgcgcaacttagtgcgagagcagacagccccgcgctttgccgccatctcatgcctgacggatccctcccagaagcacaatcgctttggccaagacctctcttctgc

SEQ ID NO: 12086 - DNA, 1893 bp, Artificial Sequence
  derived and/or modified sequence
atgcctcgatatggcgcctccctcaggcagagctgcccacgaagtggtcgcgagcaagggcaggacggcaccgccggagcccccggattattatggatgggcctggtactggcgctggccttggcgttggcactggctctggccttgagcgactcccgggtcctttgggccccagccgaagcccacccgctgagcccacagggccaccctgctagactacatagaattgttccgcggctgcgagatgtctttgggtggggaaatctcacgtgtccgatctgcaaaggcctcttcaccgctatcaacctgggcttgaaaaaggagcctaatgtggcccgagtagggtcagttgccatcaaactctgtaacttgcttaaaatagctccgcccgccgtttgccagtcgatcgtgcacttgttcgaagacgatatggtcgaggtttggcgacgaagcgtccttagcccgtccgaggcatgtggactgttgctggggtccacctgtggccactgggatatcttttcttcttggaacatatctctgccgacagtgcccaagccaccccccaaacctccctctcccccggcacccggtgcccccgtcagtagaattctgtttctgaccgacttacactgggaccacgactatcttgaaggaacagacccagattgcgctgatcctttatgttgccggaggggctccggcctgccacccgcaagcagaccaggtgcgggctactggggagagtactccaaatgtgacctccctctgcgcacccttgaaagcctcttgagtggattaggccccgccggaccatttgatatggtgtactggacaggagacatcccagcacatgatgtctggcaccaaacacgccaggatcagctgcgggccctcactacagtcaccgccttggtgcgcaaatttctcggtccagttccggtgtatcctgctgttgggaatcacgagtcgactccagtgaactcgtttccaccgcccttcatagagggcaaccattcgtcaaggtggctttatgaagccatggctaaggcttgggaaccctggctacccgcagaggccctgagaaccctgaggatcggaggcttctacgcgctctccccatatcccgggctgcgactgatctctctgaatatgaatttctgttcgagggagaatttctggctgcttatcaatagcaccgatccagccggacagctgcaatggctcgtgggagaattgcaggccgctgaagatcgcggagacaaggttcacatcattggccacatccctcccgggcactgcctgaaatcctggtcctggaattattacagaatagtggcccggtatgagaatacactggccgcacagttcttcggtcacacgcatgtggatgagtttgaagtgttctacgacgaggagaccctgtccaggcctttagccgtggcttttcttgcacccagtgccaccacttacataggcctgaaccccgggtatcgggtctaccagattgatggtaactatagcggaagcagtcacgtggtgctagaccatgaaacctatatccttaatttgacccaggccaacatccccggcgccatcccacactggcagctgctttatcgcgcccgcgagacctacggcctgccaaacaccttacccacagcctggcacaaccttgtgtatcgaatgcgcggagacatgcagttgtttcagacattttggtttctgtatcacaaagggcatcccccttccgaaccttgcggaactccatgtagattggccaccctgtgtgctcagctgtcggctcgggccgacagtcccgctctctgtcgacacctcatgcccgatgggagcttgcccgaagcccaatccctctggcctaggcccttgttctgc

SEQ ID NO: 12087 - DNA, 1893 bp, Artificial Sequence
  derived and/or modified sequence
atgccacgctacggcgcaagtctccgccagtcttgtcccagaagcggtcgggagcaaggccaggatggaacagcgggcgctcccggtttgttgtggatggggctggttctggccctcgccctggcactcgcattggcccttgcgctgtcagactcacgcgtgctgtgggccccagcggaggcgcatcctctgagtccccaaggtcatccagctagattgcaccggatcgtcccacgcctcagggatgtcttcggctgggggaacttgacctgccctatctgcaaggggctttttactgcgattaatctgggactgaaaaaggagcccaacgtagcccgagtggggtcagtcgccatcaagttgtgcaacctgctcaaaatcgccccccccgcagtctgccagagcattgttcacctgttcgaagatgacatggtcgaggtgtggagacgaagtgtgcttagcccctctgaagcctgtgggctgcttctcgggtccacatgtggccactgggacatatttagctcatggaacatttcacttcccacagtgccaaaaccaccgccaaagcctccttcaccgcctgctccaggcgcccccgtctctagaatcctgtttttgaccgatctccattgggatcatgactacctggagggaactgacccagattgcgctgatcctctctgttgtcggcggggttctggtctcccgccagcctccaggcccggcgccggctattggggggaatatagcaaatgtgatctccctcttcgcaccctggagtctcttctcagcggacttggacctgctggccctttcgacatggtgtattggaccggtgacatccctgcccatgatgtttggcatcagacccggcaagatcagcttcgggccctcaccacagtgactgcccttgttaggaagttcctgggccccgtgcccgtctacccggccgttggcaaccatgagagtacccccgtcaattccttcccgcctcctttcatcgaagggaatcattccagtcgatggctctatgaagctatggccaaagcttgggaaccctggctgcccgctgaggcactgaggaccttgagaatcggcgggttttacgcactgtctccatatccaggtctgcgactgatcagtctgaatatgaatttctgctccagggagaacttttggttgctcatcaatagcaccgatcccgccggacagctgcaatggctggtgggagagttgcaggctgccgaggatcggggggataaagtccacataatcggccacatacctcctgggcattgtctgaagtcttggtcttggaactattaccgaatcgtggcccggtatgagaacaccctggccgcccagttttttgggcacacgcacgtggatgagttcgaagtgttctacgacgaggaaactctctcacgacccctggctgtggccttcttggccccttcagctactacctacatcggtcttaatccaggctatcgggtgtaccaaattgatgggaattattccggctcttcccacgtcgtcctcgatcacgaaacgtacatccttaacctgacccaggccaacatcccaggagccatcccccattggcagctgctttacagagctcgagaaacctacggtctgcctaatacactcccaaccgcgtggcacaatctggtataccggatgcggggcgacatgcagctctttcagaccttctggtttttgtatcacaagggacaccccccatccgagccctgtgggacgccctgtcgcttggccacactgtgcgcccagctcagtgcccgggctgatagccctgccctttgccggcatctcatgcctgacgggtcactgcccgaagcccagagcctgtggccacgaccgcttttctgc

SEQ ID NO: 12088 - DNA, 1893 bp, Artificial Sequence
  derived and/or modified sequence
atgcctagatacggcgcgtcactgcggcaaagctgcccacgctcaggacgcgagcaaggacaggacggtactgcaggcgccccaggtctgctctggatgggactggtcctggccctcgctttggcgctcgcgctcgccctggccctcagcgatagccgggtgctgtgggccccggcggaggcgcaccctctgtccccgcaggggcatccggcgcgccttcaccggattgtcccgcggttgcgagatgtctttggatggggaaacctcacctgtcctatatgcaagggcctctttaccgcaatcaacctggggctcaagaaggaaccaaatgtggcaagagtgggatcagtcgcgatcaagctgtgtaatctgctgaagatcgcaccgccagccgtgtgccaaagcatcgtccatctgtttgaggacgatatggtggaggtctggcggcgctctgtgcttagcccttccgaagcgtgcggattgctgctgggaagtacttgcggacactgggatatcttctcgtcatggaatatctcactgcccactgtaccaaagccgccacctaagccgccgtcgccgccggcccccggcgcccctgtgtcaagaatcctgttcctgaccgacctccattgggatcacgattacctggagggcacggatcctgactgcgcggaccctctgtgttgcagacgagggtccggactcccaccagcttcaagaccgggtgctggctactggggtgaatactcaaaatgtgatttgccgctgcgcacccttgaaagcctgctttccggactcggacctgcaggaccattcgatatggtgtactggaccggggacatcccggctcatgacgtctggcaccagaccagacaagatcagctgcgggccttgacgacggtgaccgctctggtgagaaagttcctcggtcctgtgcccgtgtacccagcagtgggtaaccacgaaagcaccccagtgaactccttcccgccgccgttcattgagggaaaccactccagcagatggctgtacgaagcgatggctaaagcctgggagccctggctcccggccgaggctctccgcactcttcggatcggtgggttctacgctctgtccccgtaccccggactgaggctgatctcgctgaatatgaatttctgttcacgggaaaacttctggcttctgattaactcaaccgacccggccggccagcttcaatggctggttggggaacttcaagcagcagaagataggggagacaaagtgcacattatcggacacatcccaccgggacactgcttgaagtcgtggtcatggaactactaccggatagtggccaggtacgagaacaccttggcggcacagttctttggacacactcatgtcgacgaattcgaagtgttctacgatgaagaaactctgagccgcccattggccgtggcgttcctggcgccgtccgccaccacctacatcggactgaacccgggataccgggtgtaccaaatcgatggaaattactccggatcatcgcacgtggtgctcgaccacgaaacctacattctcaatctcactcaagctaatatcccaggagccatcccccattggcaactgctgtacagagcgcgcgaaacgtacgggttgccaaatactcttccgactgcctggcacaacctggtgtatcggatgagaggagatatgcaactgtttcagactttttggttcctgtatcacaaaggacacccgccatcggaaccgtgcggaaccccatgccgcctcgccaccctgtgtgcacaactgtcagcccgggcggactcccccgccctttgcaggcaccttatgccagatggtagcctccctgaagctcagagcctctggccgcggccgctcttttgc

SEQ ID NO: 12089 - DNA, 1893 bp, Artificial Sequence
  derived and/or modified sequence
atgcctcgctatggcgcgtcactgcgccagtcctgtcctcgttccgggagagaacagggacaggacggaacggcgggcgccccgggtctcctttggatgggcttggtgctggctttagcgcttgcacttgccttggcactcgctctgagtgattcaagggtactttgggcccccgctgaagctcacccactgagccctcaggggcaccctgcacgcctgcataggatcgtgccccgattgagagatgtgtttggatggggcaatctgacatgccctatttgcaagggtctttttactgctatcaacctaggactgaaaaaagagccaaacgtagctcgggtggggagcgtcgcaatcaaactatgtaatcttcttaagatcgcccccccagcggtctgtcagtcaattgtgcacctttttgaggacgacatggtggaggtatggaggcggtctgtgttgtcaccttctgaggcatgtggcctgttactgggctccacctgcggtcattgggatatttttagttcctggaacatctctcttcctaccgtgcctaaaccccctccgaaacccccgagcccaccggcccctggagctccagtgtccagaatcctgtttctgaccgacttgcactgggaccatgactacctcgaaggcaccgatccagactgcgctgatccactttgctgtcggcggggatccggtctgccacccgcctctaggcccggcgccggttattggggcgaatactctaaatgcgacctgcccctgcgtacccttgaaagtcttctcagtggactagggcctgccggtccgttcgatatggtctattggacaggcgatattcctgcccatgatgtgtggcaccagacccgccaagatcagttgagagctctgacaaccgtgactgctctggtccgaaaatttctcgggcccgtgccggtgtaccccgccgtaggtaaccatgaaagcacccccgtgaactcctttccacctcccttcattgaaggaaaccatagtagtaggtggctttatgaggccatggctaaggcctgggagccctggctgccggctgaagccctcagaaccctgcgcatcggagggttttatgccctctctccttaccccggtctgagattgatatcacttaacatgaacttctgcagccgggagaacttttggcttctcataaacagcacagaccccgctggtcagctccagtggttggtaggagaactccaggccgccgaagatcggggagacaaagtacatataatcgggcacatccctccaggacattgcttgaaaagctggtcttggaattattaccggatcgtcgctcgctacgaaaatacgttggccgcccagttcttcggacatacccatgtggatgaattcgaggtgttttacgacgaagagactctctccagacccttggccgtggcatttctggctcccagtgccaccacgtacataggactcaaccctggctatagagtttatcagattgatggcaattatagtggttcatcccatgtggtcctggaccacgagacgtatatcttaaacctgactcaggccaacatcccaggagctatcccacattggcagctactgtaccgggcacgcgaaacgtacgggctgccaaatacgctgcccaccgcctggcacaatctagtgtatcgcatgcgcggtgatatgcagctgtttcaaacattctggtttttgtatcacaaggggcaccctccttctgaaccatgcggtacaccctgcaggctcgctaccctgtgtgcacaattatctgcccgcgccgatagtcctgctctgtgccgtcacttgatgcccgacgggtccctgcctgaagcccagagcctatggccccggcccctgttctgc

SEQ ID NO: 12090 - DNA, 1893 bp, Artificial Sequence
  derived and/or modified sequence
atgccgcggtacggcgcttcgctgcgccaatcctgcccacgctccggacgggagcaaggccaggacggaaccgccggagctcccggactcctttggatgggactcgtgctggcgcttgctctggccctcgctcttgctcttgccctctcggattcgagagtgttgtgggcgcccgcagaagcgcacccgttgagcccgcagggccacccagcacggctgcacaggatcgtgccgcgcctgagagacgtgtttggctgggggaacctcacttgcccgatttgcaagggactgttcactgcaatcaacctgggcctcaagaaagaacccaatgtggcccgcgtggggtccgtcgccatcaaactgtgcaacctgctcaaaatcgccccaccggccgtgtgccagagcattgtccacctgtttgaggatgacatggtggaagtgtggcggcggtccgtgctgagcccgagcgaagcatgcggactcctgctgggatccacttgcggacactgggatatcttctcgtcgtggaacatttccctccctacggtgccaaaaccaccacctaaacccccttccccgccggccccgggtgcaccggtgagcaggattctcttccttacggacctccactgggatcacgactacctggaggggaccgaccctgactgcgccgatcctctgtgttgccggagaggatccggactgccccctgcgtcccggcctggagcaggttactggggagaatactcgaagtgtgatctcccccttcggaccctggaatccttgctgagcggattgggacccgcgggcccgttcgatatggtgtactggaccggcgatatccctgctcacgacgtctggcaccagactagacaggaccaactccgggcgctgaccaccgtcaccgcacttgtgcgaaagtttctcggtccagtaccggtgtacccggccgtgggcaatcacgagtcaacgcccgtcaattccttcccgccaccgttcatcgagggtaaccactcctcgcgctggctgtacgaggcaatggccaaggcttgggagccgtggctcccagccgaagccctcagaactctccggattgggggcttctacgcactgtcaccataccctggcctgcgattgatctctctgaacatgaacttttgcagcagagagaacttctggctgctgatcaacagcaccgacccagcagggcagctgcaatggctggtgggagagttgcaggcggcggaggatcgcggagataaggtccatatcatcggccatatcccaccaggacactgcctgaaaagttggtcgtggaattactaccgcattgtggcccgctacgagaatactctcgcggcccagttcttcggacacacgcacgtggacgaattcgaagtgttttacgatgaggaaactctgagccgcccactggctgttgcgtttctcgctccttcagcgaccacttacattggcctcaaccctggatacagggtgtaccaaatcgatggcaactattcgggaagctcccatgtggtgctcgaccacgaaacctacatcctgaatctgacccaagccaatatcccaggtgcaatcccgcattggcagctcctgtaccgcgcccgtgaaacctacggactcccaaacactcttccaaccgcgtggcacaacttggtctaccgcatgcggggagatatgcagctcttccagaccttctggttcctgtaccacaaagggcacccaccgtcggagccctgcggcaccccatgtcggttggccactctgtgcgctcagttgagcgcacgcgccgactcgcctgccctctgccggcatctcatgccggatggaagcctgcctgaagcccaatcgctgtggccaagacctctgttttgt

SEQ ID NO: 12091 - DNA, 1893 bp, Artificial Sequence
  derived and/or modified sequence
atgccccggtacggggcctccctacgccagtcttgcccacgcagtggtcgggaacaaggccaggatggaaccgctggggcaccaggacttctgtggatgggactggtactggctctggcactagctctggccttagcgctggccctgagcgacagccgggtactctgggcccctgccgaggcccaccccctctccccgcagggccacccggcaagacttcaccggattgtgcctaggcttcgggatgtgtttggctggggtaacctcacttgccctatctgcaaaggtcttttcaccgctattaacctgggcctgaagaaggagccaaacgtcgcaagggtcgggtccgtggccattaaactctgcaatctgcttaaaatcgctcctccagcagtctgccagtcaatagtgcacctatttgaagacgatatggtagaggtgtggagaaggtcagtcctgagcccttctgaggcatgcggcttattgctgggatccacctgtgggcactgggatattttctcctcttggaatataagcttgcctaccgtcccaaagcctcctcccaagccccccagtccccctgcgccaggcgcaccagtgtcgcggatcctgtttctgacggatctccactgggatcacgactacctggaggggactgaccctgattgtgccgaccccctgtgctgtcggcggggttccggacttccgcccgccagccgacccggcgcaggctattggggcgagtattcaaaatgtgatcttccacttcgaacgctggagagcctcctgtctggcctgggaccggccggccccttcgacatggtttactggaccggagacatccccgcccatgacgtgtggcatcagaccaggcaggaccaactgcgtgcattgacaaccgtcacagcccttgtgagaaagtttctcggacccgtgccagtatatcccgccgtaggcaaccacgaatctaccccagttaactcatttcccccgcctttcatcgagggaaatcatagtagccgctggctgtatgaggccatggctaaagcctgggagccctggctccccgccgaggccttgaggaccctgaggattggcgggttttacgctctctccccgtacccaggactaagactgatctccctgaacatgaacttctgctcgcgggagaatttttggctactgatcaacagtacagatccggccggtcaactgcagtggctcgtgggcgagctgcaggccgcagaggaccgcggcgataaagttcacatcatcggccacatcccgcccggtcactgcctcaagtcctggagttggaattactaccggatagtggcgagatacgagaacactctagccgcccagttttttgggcacacacacgtggatgagttcgaggtcttttatgacgaggaaacactctcacgccccctggcagtcgctttccttgctccatccgccaccacatacattggactcaaccctggctaccgcgtctatcagatcgatggaaactacagcgggtcctcacatgtggttttggaccacgagacttatattctgaatctgacccaggcgaacatccctggcgccatccctcattggcagctgctctatcgggctcgggagacctatggcctgccaaatacattgccaaccgcctggcacaatctggtttatagaatgcggggcgatatgcaactcttccagacgttctggttcctgtatcacaaagggcaccccccatcagagccatgcggtacaccttgtagacttgccacactatgtgcacagctttccgcccgcgcggacagccccgcactatgcagacatctgatgccagatggcagtctgcctgaggcccagtcactgtggcccagacctctcttctgt

SEQ ID NO: 12092 - DNA, 1893 bp, Artificial Sequence
  derived and/or modified sequence
atgcccaggtatggagcatcattaaggcagtcatgcccaagatccggacgcgaacaggggcaggatggaacggctggagctcctggacttctatggatgggactagtgttggccttggcactcgctttggcccttgccttggcactttctgactctcgggttctgtgggctcccgccgaagcccacccacttagtccacagggacaccccgcaaggctccaccgaattgtccccaggctgcgggatgtctttgggtggggaaacttaacttgtcctatatgcaagggactctttactgctattaacttaggactcaaaaaagaaccaaacgtggctcgggtcgggtcagtagctattaaattatgtaatctcctgaagatcgcccctccagctgtctgtcaaagtatcgtgcatctttttgaggatgatatggtcgaagtctggagaaggtccgtactgagtccatctgaggcctgcgggttactgcttggatccacttgtgggcactgggatatattttcttcctggaacatttctttacctactgtcccaaaacccccacctaaaccaccttctccacctgcgcccggagcccccgtatctcggatcctattcctcacagatctccattgggatcacgattacctcgaaggaacagatccagattgtgcagatcccctgtgctgtaggcgcggaagtggactccctcctgcctctaggcctggagcaggatattggggggaatacagtaaatgtgatctgcctcttagaactctcgaatcgctgctgtcagggctggggcctgcaggacccttcgacatggtgtattggacaggagatatacctgcacatgatgtgtggcatcagacaagacaagatcagctgagggccttgacaacagtcacagctctggttaggaaatttctcggacccgtgccagtatatcccgccgtggggaaccacgagagtacaccagtgaatagtttcccgcctccttttatagaggggaaccatagttccagatggctctacgaggctatggcaaaagcttgggaaccttggcttccagccgaagctcttcgcacactaagaattgggggattctatgctctatctccctatcccggactgaggcttatctcattgaacatgaatttttgttcccgagaaaacttctggcttttgatcaattctactgaccccgctgggcagctccagtggctggtgggagagctccaggccgccgaggatagaggggacaaagtacatatcatagggcacattccccccggacactgtcttaaatcatggtcatggaattattatagaatcgtggccagatacgaaaatacactggcggcacaattctttggacatactcatgttgatgaattcgaagtgttttacgatgaagaaacattaagtcggccattagccgtggcgtttctagccccatcagcaacaacttacattgggctgaacccaggataccgggtgtatcagatcgatgggaattattccgggtcttctcatgtcgtgctggatcatgagacttatatcctaaatctcactcaggccaacattcccggagccatcccccattggcagctactctaccgggcccgagaaacttatggactacccaatactcttcccacagcttggcacaaccttgtttatagaatgaggggagatatgcagctcttccagactttctggtttctctaccacaaagggcatcccccctccgaaccatgcggaacaccatgccggcttgcaacactctgcgctcagctttcggctcgggccgattcaccagccctatgtaggcacctgatgcctgatggatcactgccagaagctcagtccctatggcctaggcctctattctgt

SEQ ID NO: 12093 - DNA, 1893 bp, Artificial Sequence
  derived and/or modified sequence
atgcctcggtatggtgcctcgctgcggcaatcgtgtccaaggagcggtcgggagcaagggcaggacgggacggcaggtgcgcccggcctgttgtggatgggactcgtcctggccctggctcttgccctggctctagcattagcgctctccgactcgagagtcctgtgggcaccagcagaggcccatccattatcgcctcaggggcatcccgcaagattgcatcgaattgtgccccggctccgcgacgtcttcggatggggcaaccttacatgccctatctgcaaaggactgttcacagctatcaacctaggccttaaaaaggagcctaacgtggctagggttggttccgtggcaataaagctatgcaaccttctgaagatcgctccgccagcggtgtgtcaatctatagtccacttgtttgaggatgatatggtggaagtgtggagaaggtctgtgctctctccttctgaggcatgtggcctgctgctcgggtcaacatgtggtcactgggacatcttcagcagctggaatatatctctaccaactgtgcctaagcctccacctaagcccccgtcccccccagcccccggcgcgcctgttagccgaatcctgtttctgacagacctccactgggaccacgattacctggagggcactgaccctgattgtgccgatccgctgtgttgccgacgcggatccggccttcctccggcaagccggcccggagcgggctactggggagaatattcgaaatgcgacctccctcttaggaccctcgagtctctgctatctggccttggccccgctggaccgttcgatatggtgtactggactggcgatatacctgcacacgatgtgtggcatcagactagacaggatcagctcagagccctgactacagtgacggcccttgtgcggaagttcctggggcccgtgccagtctatcccgccgttggcaaccatgagtcaacccccgtgaattccttcccccccccctttattgagggaaaccactcctctcgctggctatatgaagctatggctaaggcctgggaaccatggcttccagcagaagcgcttagaaccctgcggattggaggtttttatgccctttccccctacccgggcctgcgtcttatatccctcaatatgaatttctgcagtcgcgaaaacttctggctcctcatcaactcgaccgacccggctgggcaactgcaatggcttgtgggggagcttcaagccgccgaggaccgcggcgataaggtgcacatcatcggacacattccccccggtcactgcctgaaatcttggagttggaactactaccgcattgtggctagatacgaaaataccctggccgcccagttcttcggccatacccatgtggatgagttcgaggttttttacgatgaggaaaccctgtcccgaccactcgccgtcgcttttcttgcaccttctgccaccacttatataggcctgaacccagggtaccgcgtctaccagatagacggtaattattccggatcctctcacgttgtcctggaccacgagacatatattctcaacctcactcaggctaacatccctggcgctataccccactggcagctgttgtatcgggccagagagacctacggcctcccaaatacactcccgactgcgtggcacaaccttgtctaccgaatgcggggtgatatgcagctgttccagacgttttggtttctctaccataaaggacacccaccgagcgagccttgcggcacaccctgtcgcttagcgacgctctgtgcacagctctctgctagagcggacagtcccgctttgtgtaggcacttaatgccagacggctcactcccggaagctcaatctctctggccaagacccctgttctgt

SEQ ID NO: 12094 - DNA, 1893 bp, Artificial Sequence
  derived and/or modified sequence
atgcccagatacggcgcgtctctgcgccaaagctgcccgcgcagcggacgcgaacaaggtcaagatggcaccgccggagcgcccggactcctctggatggggctcgtcctcgcacttgccctcgcgctcgcactcgcgttggccctgtcagactccagggtcctctgggcaccagccgaggcccacccactttccccacagggtcatccagccagacttcaccgcatcgttccacggctgagagacgtgttcggatggggaaacctgacctgccctatctgtaaaggcctgttcactgcgatcaacctcggcttgaagaaggaaccaaatgtggcgagggtgggatcggtggccatcaaactgtgcaacctgttgaaaatcgcaccaccagcggtgtgccagtcgatcgtccacctctttgaggatgatatggtggaggtgtggcggcggtcagtgctctccccctcggaagcgtgtggacttctcctgggaagcacttgtggccattgggacattttcagcagctggaacatttcgctcccaacggtgcctaagcctcctccgaagccgccttccccaccagcacctggagcccctgtatccagaatcctgttcctgaccgatctgcattgggatcatgattaccttgagggaaccgacccggattgcgctgacccactctgctgccgccggggatccgggctccccccggcctcccgcccgggcgccggctactggggcgaatacagcaaatgcgacctcccactgagaaccctcgaatcgctgctgtctggccttggcccagcggggccgtttgacatggtgtactggacgggagacatcccggcgcatgatgtgtggcaccagacccggcaagaccaactgcgcgcgttgactacggtcactgctctggttcggaagttcttggggccggtacctgtgtacccggccgtcggaaaccacgaatcgaccccggtgaactccttcccgcctccgttcatcgaaggaaatcattcatcaagatggctgtatgaggccatggcgaaggcttgggaaccatggctgccggctgaagccttgaggacccttagaataggcggattctacgcgctctcaccttacccgggccttagactcatctctctgaatatgaatttctgtagccgagaaaacttttggttgctgatcaactcaactgaccccgccggccagttgcagtggcttgtgggtgaacttcaagcagccgaggaccggggtgacaaggtgcacattatcggccacatcccaccaggacattgcctgaagagttggtcatggaactattaccgcatcgtcgctaggtacgagaataccctggccgcacagtttttcgggcacactcacgtggacgagttcgaagtcttttacgatgaggaaaccctgtcccgcccgctggccgtggctttcctggctccatcggcgactacctacataggactgaatccaggttaccgcgtctaccagatcgacggtaactacagcggctcgtcacacgtggtgttggaccacgaaacttacattctgaatctcactcaggctaacatcccgggagcaatcccacattggcaactgctctaccgggcgcgagaaacctatggccttccgaacacgctccccactgcctggcataacttggtctacaggatgagaggggatatgcagttgtttcagactttctggttcctgtaccacaagggacacccgcccagcgagccatgcgggaccccgtgccggcttgcgactttgtgcgctcagctgtcggcacgcgcagatagtccagctctgtgccggcacctgatgccagacgggtcactgcccgaagcccagtccctttggcctcggccactgttctgt

SEQ ID NO: 12095 - DNA, 1893 bp, Artificial Sequence
  derived and/or modified sequence
atgcctcgatacggagcatcgctgagacaatcatgccctcgaagcggccgggaacagggacaggacggaactgcaggagcaccaggacttttgtggatggggctcgtcctcgcgctcgcacttgcgcttgccctggcacttgcactttccgattcgcgcgtgctttgggcccctgcagaagcacaccctctttctcctcaaggtcatcccgcaagactccacagaattgtccctcggcttcgggacgtgtttggatggggaaatctgacctgcccgatttgtaagggcctgtttaccgcgattaacctggggctgaagaaggaacccaacgtggcacgggttggttcggtggctataaagctctgtaatcttctgaaaatcgcccctcccgcagtctgccagtccatcgtccatctgttcgaggatgatatggtggaggtgtggaggcgctcggtgctgagtccgtcggaagcgtgcggattgctgttgggaagcacctgcggtcattgggacattttctcgtcgtggaacatatcacttccgaccgtgcctaagccacctcctaagcctccgtcccctcccgcaccgggtgcacctgtgtcgcggattctgttcctgaccgatctgcactgggatcatgattatctggagggtaccgatcctgattgtgcagaccccctctgctgtaggagaggaagtggactcccacccgcaagccgcccaggagcaggctactggggtgaatactcgaaatgtgatcttcccttgcgcaccctggagtctcttctttccggtctgggcccagcggggccctttgatatggtgtactggaccggagatattccggcgcatgacgtgtggcatcagactcgacaggatcagcttcgggcccttaccaccgtcactgcactggtgcgaaagtttcttgggccagtgcccgtttacccagcagtgggtaaccacgagtcgacccctgttaattccttccctcctccctttatcgagggtaatcattcttcacgctggctgtacgaagcgatggcgaaggcttgggaaccttggcttcctgccgaagcgctgagaacgctccgcattgggggtttttacgctctttcaccttacccgggattgcgcctcatctccctcaacatgaacttttgttctcgcgaaaacttctggcttctgattaacagcactgatcctgccggacagttgcagtggctggtgggtgaactccaagcagccgaggatcgaggtgataaggtccacattatcggccatatccctcctggccattgtcttaagtcttggtcatggaactactatcgcatcgtggcccggtacgaaaacactcttgcagcacaattcttcggtcacactcacgtcgatgaatttgaagtgttttacgatgaagagactctttccagaccccttgcagtggcattcctggccccatcggccactacttacattggactgaatcccggctatagagtgtaccagatagacggcaactacagcggatcctcgcatgtggtgctcgaccacgaaacttacatcctcaaccttactcaagccaacatacctggagccataccacattggcagctgttgtacagagcccgcgaaacttacggactgccaaacaccctgccgacggcgtggcataaccttgtgtacagaatgcgcggggacatgcaattgtttcaaaccttttggtttctttaccataaaggacatcctccatcagagccatgtggaaccccttgccgcctcgcaactttgtgtgcacaactctcagcaagagctgattcacccgctctgtgtaggcacttgatgcccgatggatccctgccagaagcacagtccctttggcctagaccactgttttgt

SEQ ID NO: 12096 - DNA, 1893 bp, Artificial Sequence
  derived and/or modified sequence
atgcccaggtacggtgcgtcgcttcgtcaaagctgcccccgttctggaagagaacaaggtcaagatggaacggctggcgcaccggggttgctctggatgggtctcgttcttgccctcgcattggctctcgctctggccctcgctttatctgactcccgagttttgtgggcacctgctgaggcacatcctttgtctcctcaggggcacccagcgcgtctgcaccgcatcgtgccacgacttagggacgttttcggttggggtaacttgacatgtcctatttgtaaaggattgtttaccgccatcaacctgggtcttaagaaagaaccgaacgtcgctcgtgttgggtccgtcgctattaaactctgcaacttgctcaagattgcacctccagcagtttgtcagtcaatagtgcacctttttgaagatgatatggttgaggtctggaggcgctcggttctcagtccctccgaagcctgcggcttgctgcttggttctacgtgtggccactgggatatcttctcttcttggaatatcagcctaccaactgttccaaaacctcccccgaagcctccttcacctcctgctcctggggcacctgtttccagaattctgtttctgacagacttacattgggaccatgactacctggagggtactgatcccgattgcgctgacccgctttgttgcaggcgtggttccggactaccccctgcatcaaggccaggagcagggtactggggtgaatatagtaagtgtgatctgcccttgcgtactttggagtcattgctctccggtttgggacccgcaggacccttcgatatggtttattggactggagatatccctgctcacgacgtgtggcatcaaacgaggcaagatcaactacgcgcactcacaacagttactgcccttgtgcgaaagttcctcgggcctgtccccgtttacccagccgtcggtaaccacgaaagcaccccagtgaatagcttcccccctccctttattgaaggaaatcacagttctagatggctctatgaggccatggctaaagcctgggaaccatggttacccgctgaggctttacgtacattgcgcattggaggtttctatgcccttagtccctatcctggtttgagattgatttctcttaacatgaatttttgcagtcgggaaaatttttggttacttataaactcaacggacccagctggacagctccaatggctggtcggcgaacttcaggcggctgaggacaggggggacaaagttcatataattggccacatcccacccggacattgtttaaaatcttggtcatggaattattatcgaattgtcgccagatacgaaaacactttagccgcccaattttttggccatactcatgttgatgaatttgaggtgttttatgatgaagagactttatctcgccctcttgctgtagcatttcttgccccgtctgctacgacctatatcggattgaatccagggtacagagtatatcaaatcgacgggaactatagcggctcatcacatgtcgtcttggatcatgagacgtatattttgaacctaacgcaggctaacattcctggcgcaattccgcattggcaactcttgtaccgggctcgggaaacatacggcttgccaaatacgcttcctacagcctggcacaacctagtttacagaatgaggggagatatgcaattgtttcaaactttttggttcctttatcacaaggggcatccgccaagtgagccatgtgggaccccttgcagacttgcaaccttgtgcgcacaactgtccgctcgagcggacagcccggccctctgcagacacctcatgccggatggcagtttgcccgaggcccagtcattatggccaagaccacttttctgc

SEQ ID NO: 12097 - DNA, 1893 bp, Artificial Sequence
  derived and/or modified sequence
atgcctagatacggcgcgtcccttcggcaatcgtgccctcgctcaggtagagagcagggacaggatggcactgcaggtgcccctggattgctgtggatgggactcgtgcttgccttggctttggctcttgcactcgccctcgccctttctgatagccgcgtgctgtgggccccggcggaagcacacccgctgtccccacagggacaccctgccaggctgcatcggatcgtgccgcgcctgcgggacgtctttggctggggaaacctcacctgcccgatctgtaagggtctgttcaccgcaatcaacctgggcctgaagaaggaaccaaacgtcgctagggttggctccgtggcgatcaagctgtgtaatttgctcaaaatcgcgcccccagccgtctgccagtcgattgtgcatttgtttgaggacgacatggtggaagtgtggcgcaggtcggtgctgtcaccatccgaggcgtgcggactcctcctgggaagcacctgcggacactgggatatcttctcgagttggaatatctccctgccaaccgtgccgaagccaccacctaagccgccgagcccacctgccccgggggccccggtatcccgcatcctgttcctgacggatctgcactgggaccacgattacctcgagggcactgatccagactgtgcggacccgctgtgctgcaggagaggatccggcctccctcccgcctcgcgccctggagctggatactggggcgaatacagcaagtgcgacctgcccttgcggactctcgaatcgctgctctcgggacttggaccggcgggaccattcgatatggtctactggactggcgatatccctgctcacgatgtgtggcaccagaccagacaagaccaactgcgggcccttaccaccgttactgcactggtcaggaaattcctgggaccagtgcccgtctacccggcagtgggtaaccacgagtcaactccagtcaacagcttcccaccgccgttcatcgagggaaaccatagcagcaggtggctgtatgaggcgatggccaaggcatgggaaccttggcttccagcagaagcattgcgtacccttcgtatcggaggcttctatgccctctcaccgtaccccggcctgcgcctgatctcgctgaatatgaatttctgctcacgagaaaacttctggctcctgatcaactccacggacccagcgggacaactgcagtggttggtgggtgaactgcaggcggccgaggacaggggcgacaaagttcacatcataggacatatccctcctggccattgtcttaagagttggtcctggaactactatagaattgtcgcacgctacgagaacaccctggcggcacagttcttcggacatacccatgtggatgagttcgaggtgttttacgacgaggaaacgctgtcacgcccgctggccgtggctttcctcgccccgtcggcaactacttacatcggactcaatcctggataccgcgtttaccaaatcgatggaaattactcgggatcatcgcatgtcgtgctggatcacgaaacgtacattctgaacctcactcaggctaacattcctggagccatccctcactggcagctcctgtaccgtgcccgggaaacttacgggctcccaaatacccttccaaccgcttggcataacctggtgtaccggatgcgcggcgacatgcagctgttccaaactttttggtttctttaccataaaggacaccctccttccgaaccttgcggtactccctgtagactggctaccctctgtgcgcagctgtccgcacgggccgactcgccggccctctgtcgacacctgatgcctgacgggagtctgcccgaagcacaatcgctgtggccgcggccgctgttttgc

SEQ ID NO: 12098 - DNA, 1893 bp, Artificial Sequence
  derived and/or modified sequence
atgccacgttatggagcctcattgagacagtcgtgcccaagatcaggaagagaacagggacaagatgggacggccggtgcacccgggctgctttggatgggtttggtgcttgcattggcacttgcacttgcgcttgcgctggcactttcggattcccgagtgctttgggcccctgcagaagcacatcctctcagcccgcaagggcatcccgcccgactccaccgcattgtcccccgactccgggacgtgtttggttggggaaatctcacctgtcccatctgtaagggtttgttcacggcaatcaatcttggcttgaagaaagagccaaacgtcgcacgggtcggatcggtggccataaaactgtgcaaccttctgaagattgcccctcccgcagtttgtcagagcattgtgcacctttttgaggatgacatggtggaggtttggcgtcggagcgtgcttagcccttcggaagcctgtggcttgcttttgggatcgacctgtggacactgggacatcttttcatcttggaacattagccttccaaccgtcccaaaaccgccacctaagccaccatcaccacctgcacctggtgcgcctgtgtcaaggattcttttcttgaccgatctgcattgggatcatgactacctggaagggacggaccctgattgcgcagacccactgtgctgcaggcggggcagcggcctcccacccgcctcccgtcccggggccggctactggggagaatactccaagtgtgacctcccgcttagaaccctggaatcgctgctgtctggacttggaccagcaggtccttttgatatggtgtactggacgggagacatcccggcacatgatgtctggcatcaaactcggcaagatcaattgcgagctctcacgactgtgactgcactcgtgcggaagttcctggggcctgtccctgtgtatcctgcagtcggaaatcacgaatctactccggttaattcgtttcccccacctttcattgaaggcaaccactcgtcaagatggctctatgaggcgatggcaaaggcttgggagccttggcttccagccgaagcccttcggacgctgcgaattggaggcttctacgccctgtctccctacccgggactgaggctgattagtctcaatatgaacttctgttctagggagaatttctggctccttatcaacagcacggatccagctggccaacttcaatggctggtgggagaactgcaggcagccgaggatcgcggtgataaagtgcacattataggccacataccacccggacattgtctgaagtcatggtcgtggaactactaccggatagtggcccgctacgaaaacaccctggcagcgcaattctttggtcacacccatgtggatgagtttgaagtcttttacgatgaagaaaccctctccaggcccctggctgtagcatttctcgcaccgagcgcaactacttacatcggactgaaccctgggtatcgagtgtaccagattgatggcaattactccgggtcgtcccatgtcgtgctcgaccatgaaacctacattctcaaccttacccaggcaaacatcccgggtgcgatcccacattggcagctgctctaccgtgcccgggagacttacggcctccccaacaccctccctaccgcgtggcataatctggtgtacagaatgcgcggtgatatgcaactgtttcagaccttttggttcctgtaccataaggggcatcctccatcggaaccttgtgggactccctgtaggcttgcaactctctgcgcacaactttccgcccgagcagactctccagcactgtgtcggcacctgatgcctgatggatccctgcccgaggcacagtcactgtggccacggccacttttctgc

SEQ ID NO: 12099 - DNA, 1893 bp, Artificial Sequence
  derived and/or modified sequence
atgcctaggtacggtgcatcactgagacagtcctgtccacgatcaggacgggaacagggccaagatggaactgcaggagcacctggccttctgtggatgggtctggtgttggcgctggccctggctcttgcccttgctctcgcgctctcagattcgcgggtcctctgggcaccggcagaggcgcatcctctgtcgcctcaagggcatccggctagactgcatcgcatcgttccacggttgcgagatgttttcggttggggcaatctcacctgccctatttgtaagggcctgtttactgcaatcaatctgggccttaagaaggagcctaacgtggcccgagtgggtagcgtcgcgatcaaactctgcaacctgctgaaaatcgcacctcccgcagtctgtcaatctattgtgcacctgttcgaagatgatatggtggaagtgtggagacggtctgtcctgagcccatcagaggcctgtggcttgctcctgggttcgacttgtggacattgggatatctttagctcctggaacatttcccttcctaccgtgcccaagccccctccaaaacccccctcgccacctgccccaggtgctccggtcagcaggatactttttctgactgatctgcattgggaccatgactacctcgaagggactgacccggactgtgccgacccgctgtgctgccgtaggggttccggactccctccagcgtcgcgcccaggtgcaggatactggggcgaatactccaagtgtgatctgcctcttcgaaccctcgagtcccttttgtcgggacttggtcctgccggaccttttgatatggtgtactggacgggcgacattccagcgcatgacgtgtggcatcaaacccgccaggatcaactcagagcccttactactgtgacggcacttgttcgaaagtttctgggacctgtgccagtgtaccccgcagtgggaaaccatgaaagcacccctgtcaacagcttcccacctccctttatcgagggtaatcattcgagccgctggctctacgaggcaatggcaaaggcttgggaaccgtggctgccagctgaagcattgcggacgctccgcatcggaggtttctacgcactgtcgccatacccaggacttcgactcatttcactcaacatgaacttctgtagcagagagaatttctggcttcttatcaactcaactgatccagccgggcaactccaatggcttgtgggggaactgcaggcagccgaggacagaggcgataaggtgcacattattggacatatacccccgggtcactgtctgaaatcatggtcttggaactattaccgtattgtggcgagatacgaaaatacccttgcagcccagtttttcggacatacgcatgttgatgaatttgaagtgttctacgatgaagagactctctcaagaccacttgctgtggcatttcttgcaccatcagcaacgacttacatagggctgaatcctggataccgggtgtatcagattgacggcaactactccggatccagccatgtcgtccttgatcatgaaacctacattctgaacctgactcaagcaaacatccctggcgctattcctcattggcaattgctgtaccgagcacgcgaaacttatgggttgccgaataccctgccaactgcttggcataatctggtgtaccggatgaggggtgatatgcaactttttcagaccttttggtttctttaccataaaggtcatcccccctcggagccctgcggcaccccatgccgtctcgctactctttgcgcacagctttccgcgagggcggactcgccagccctctgcagacatcttatgcctgacgggagcctccctgaggcacagtcactgtggccgcgccccctgttttgc

SEQ ID NO: 12100 - DNA, 1893 bp, Artificial Sequence
  derived and/or modified sequence
atgcccagatacggagcatccttgaggcagtcgtgcccacgatccggtcgcgagcaggggcaagacggcactgccggagcccccggactcctgtggatggggctggtcttggccctcgccttggcgctcgcgcttgcgctggccttgtccgactccagagtgctttgggctccggccgaagcccaccccctgtcgcctcaaggtcacccggcccggctccatcggatcgtcccacggctccgcgacgtgttcggatggggaaacctgacttgcccgatctgcaagggactttttactgcgatcaacctgggcctcaagaaggaaccgaacgtggcacgcgtcggaagtgtcgctatcaaattgtgcaacctgcttaagattgccccgccggccgtgtgccaatcgattgttcacctctttgaggacgatatggtggaggtctggagacgttcggtgctgtcgccgtccgaagcgtgcggactcttgctgggatcgacttgcggacactgggacatcttttcgtcatggaatatctcgctgccgacggtcccaaagcctccgcctaagccaccgtccccacctgcgcccggagcaccggtgtcccgcatcctgttcctgaccgacctgcattgggatcatgattacctggagggaactgatccggactgcgcagacccactttgctgtcgccggggctcgggcctcccgccggcgagtcgccctggagccggttactggggagaatacagcaagtgtgacttgcctctgaggactctggaatccctcctgtcgggccttggtccggctggcccttttgacatggtttactggaccggcgacatccccgctcatgacgtctggcatcagacccggcaagaccaactccgggccctcaccaccgtgacggccctcgtcagaaaattccttggacctgtgcctgtgtatcctgctgtgggcaaccacgagagcactccggtgaacagcttcccgccaccgttcatcgaaggtaatcactcatcacgctggctgtacgaggctatggcgaaggcctgggagccgtggttgccggccgaagctctgcgcactcttcggatcggcggtttctacgccctgtcaccgtacccaggtctgcggctcatctcgctgaacatgaacttctgttcccgggagaacttttggctcttgattaactcgactgacccagcgggacagttgcagtggctggtcggagagctgcaggctgccgaggaccggggagacaaagtgcacatcatcggccatatcccgccggggcactgcctgaagagctggtcgtggaactactacaggatcgtggccagatacgaaaacaccctggctgcgcagttcttcggacacacccacgtggatgaatttgaagtgttttacgatgaagagactctgtcccgcccacttgctgtggcctttctggccccatcagcgaccacctacatcggactgaatccgggctaccgcgtctaccagatcgacggcaactactccggatcctcccacgtggtcctggaccacgagacgtacatcctgaacctgacgcaggcaaacattccaggggctataccacattggcaattgctttacagggcacgggaaacctacggcctgccaaataccctcccgaccgcctggcataacttggtgtacagaatgcgaggcgatatgcagctgtttcagactttttggttcctgtaccacaagggtcatcctccgtcagaaccgtgtggaactccgtgtcggctggcgaccctttgcgcgcagttgtcagcccgagctgactcaccggcgctgtgcagacatcttatgccggacgggagcctgcccgaagcccagagcctgtggccacgcccgctgttttgt

SEQ ID NO: 12101 - DNA, 1893 bp, Artificial Sequence
  derived and/or modified sequence
atgccaagatacggcgccagtcttcgtcaatcttgtcctagatcaggacgcgagcagggacaagatggcaccgccggcgcacccgggctactgtggatgggcctggtacttgctttagccctggcgcttgctctcgctcttgccctgtcagactcgagggttttgtgggcgcctgcagaggcgcacccactcagtccccagggacaccctgcgagactacacagaattgtcccaaggctgcgggatgtgttcggctggggtaatttgacctgtccaatctgtaaaggcctgttcacggcgatcaacttgggcctgaaaaaagagccaaatgtggcaagggtgggatcagtggccatcaaattatgcaatctcctgaagattgccccccctgcagtttgtcagagcattgtgcacctttttgaggacgatatggtggaggtttggaggaggtccgtgctgagccctagcgaagcctgtggactacttctgggatccacctgtggtcattgggatatcttttcgtcttggaatatctcgctccccaccgtgcctaaacccccaccaaagccacctagtcctcccgcccctggcgccccagtgagtcggatccttttccttacagatcttcactgggatcacgactacctcgaggggacagaccccgactgtgccgacccactctgttgcagacgcgggtcaggacttcccccagcatcacgtccgggcgccggctattggggcgaatacagcaagtgcgatctccctctgcgcactctcgagtctcttctttccggtctgggcccagccggtccttttgatatggtctactggacgggggatattccggcacacgacgtttggcaccagacaaggcaggaccaactgcgagcgttaaccacagttaccgccctggttaggaagttcctgggcccggtgccagtttaccccgctgtgggcaaccatgagagcactccagtcaatagctttcctccgccctttatcgagggtaaccactcttcccggtggttgtacgaggccatggcaaaggcctgggagccatggctgcctgcggaggccttgcgtactttgagaattggcggcttctacgccctctctccctatcccggattgcggctgattagtctcaatatgaatttttgcagcagagaaaacttctggctgcttatcaattcgactgacccagcaggccaattgcagtggctggtgggagaacttcaggccgcagaggataggggggataaggtgcacatcatcgggcacatcccacccggacactgcctgaaaagttggagctggaattactaccgcatcgtcgctcggtatgagaacaccctggcggcccagttttttggccacacgcatgtggatgagttcgaagtgttctatgatgaagagacactgagccgccccctcgcagtagcctttctggcccctagcgccaccacctatatagggttgaatcctggataccgcgtatatcagattgacgggaattacagtgggtccagtcacgtggtgctcgaccacgagacctacatcctgaacctcacccaagccaacatccctggggctatcccgcattggcagctcttgtatagggcccgcgagacctatggcttaccaaacaccctccctactgcctggcacaatcttgtatacaggatgcgtggagatatgcagttgttccagacattctggtttctctatcataagggccatccaccgtctgagccatgtggcaccccctgtcgcttagctacactctgtgcccagctctctgctcgggctgattcaccggcactgtgtcggcatctgatgcctgacggctccctgcccgaagctcaaagcctctggccccgccccttattctgc

SEQ ID NO: 12102 - DNA, 1893 bp, Artificial Sequence
  derived and/or modified sequence
atgccgcggtacggtgcctcactccgccagtcctgcccgaggtccggaagagaacagggccaggacggcaccgccggggcaccagggctgctctggatgggactcgtgctggctctggcgctggccctcgccttggcactcgctttgagcgatagtcgggtcctgtgggccccggcagaagcacaccctctgtccccgcaaggacatcccgcccgcctccatcgcatcgtgcctcgcctgcgggacgtgttcggatggggcaacttgacttgcccgatctgcaagggactgttcacggccatcaatcttggcctgaaaaaggaaccgaatgtggcgcgagttgggtccgtggccattaaactctgcaatctgctcaagatcgctcctcccgcagtgtgccagtcgatcgtccacctgttcgaggacgacatggtggaggtgtggagacggtcagtcctcagcccgtcagaggcgtgtggactcttgctgggctccacttgcggccattgggacatcttctcatcatggaacattagcttgccgaccgtgccgaaaccacctccaaagccaccgtcaccgccggccccaggagcccctgtgagccggattctgtttcttaccgatctgcactgggaccacgattacctggagggaaccgatccggactgcgccgacccgctctgctgtcgccgcggatccgggctcccaccggcatcccgcccgggagccggctactggggggagtactcgaagtgcgatctgccgctgcgcaccctggagtctctgctgtccggcctcggtccagcgggcccgtttgacatggtctactggactggagacatcccggcacacgatgtctggcatcagacccggcaggatcagctgagagcgctgactaccgtgaccgcgctggtgcggaaattcctcgggccggtcccggtctacccggcggtgggcaaccacgagagcactcccgtgaatagcttccccccgccgttcattgagggaaaccactcatccaggtggctgtacgaagctatggcaaaggcctgggagccgtggctgcctgcagaggccttgagaacccttcgcatcggaggattctatgcactttcaccttacccgggactgagattgatctcccttaacatgaacttttgctcgagagaaaacttctggctgctgatcaattccaccgaccccgccggacaactgcagtggctggtgggagagctccaggccgcggaagatcgtggagacaaggtgcacatcatcggccacatcccaccgggacactgccttaaatcgtggtcctggaattactaccgcatcgtcgcaaggtacgaaaacaccctggcggctcagttcttcggacacacgcacgtggacgaattcgaggtgttctacgacgaagagactctctcgaggccgctcgccgtggccttcttggccccgtcagctaccacttacatcggactcaatcctggataccgggtgtaccaaatcgatggcaactactcgggttcgagccacgtggtgctggaccacgaaacctacatcctgaatctcactcaggcgaatatcccgggagcaataccgcactggcaactgttgtaccgcgcgcgagaaacctacggacttcccaacaccctgccgaccgcgtggcataatctggtgtacaggatgcgcggcgacatgcagctcttccagaccttctggttcctgtaccacaagggccacccaccttcagagccgtgcggaaccccctgccgcctggcaacgttgtgtgctcagctctcagcgcgcgccgactcccctgccctttgccgccacctcatgccagatgggtccctgccagaagcccagtccctctggccgcgccccctcttctgc

SEQ ID NO: 12103 - DNA, 1893 bp, Artificial Sequence
  derived and/or modified sequence
atgccgcgatatggggctagccttaggcaatcatgccctagatccgggagggaacaggggcaggatggcactgcaggagccccagggctgctctggatgggcctggtcttagcgctagcgctggcactcgccctggctctagcgctgagcgattcgagggttctgtgggcaccggctgaggcccatccgctaagtcctcagggccatcctgccagactgcacagaatcgtaccacgattacgagatgtcttcggctggggaaatctgacctgccccatctgcaagggcttattcacagccataaatctcgggctgaaaaaggaaccaaacgtggctcgggttggctctgttgccatcaagctctgtaacttgcttaagatcgcaccacccgccgtgtgtcagtccattgtgcacttgttcgaggatgacatggtcgaggtgtggcgacgcagcgtcctgtcaccgagtgaggcatgtgggttactcttagggtcgacttgcggccactgggacatattcagttcctggaacataagtctccctacagtgcctaagcccccgcctaagccaccttctcctcctgctccaggtgccccagtttcccggattctgtttttgacagacttgcactgggatcacgattacctggaggggaccgatcccgactgtgccgaccccctatgttgcagacggggttcagggctcccacccgccagcaggccaggcgctgggtactggggagagtattcgaagtgcgacctgcccctgaggaccctggaatctttgctcagtgggctcggtccggcagggcccttcgatatggtgtactggacaggcgatattccagcccatgacgtgtggcatcagaccagacaggaccagctaagggctctgaccacagttaccgctttagtgcggaaattcttggggccagtgccggtttaccccgctgtcggcaaccacgagtcaaccccagtgaattcatttccccctccctttattgagggcaatcattcatccaggtggctctatgaagcgatggccaaggcttgggaaccttggctccccgccgaagctctcaggactcttcgtatcgggggcttctatgctctgtcgccttacccgggtctaagattgatatccctgaacatgaatttttgctcgagggaaaacttctggcttttaattaactcgacagaccccgcaggccagcttcagtggctagtgggtgaactacaggccgcggaggacagaggtgataaggtccatatcattggtcacatcccccccgggcattgtttaaagtcttggtcctggaactactacagaatagtggcgcgctacgagaataccctggccgcccagtttttcggacacacacacgtggacgaatttgaggtattttatgacgaggagacattgtcgcgtcccctggctgttgcatttttggcaccctctgccacaacatacattggtctcaatccggggtaccgagtgtatcagatcgacggtaactactcagggtcctcccacgtggtactcgaccacgagacatacatccttaatttgacacaggcgaacatcccaggcgctattccccattggcagttgctctatcgggccagggagacctatgggctgccgaacacgctgccgaccgcatggcataatttggtctacaggatgaggggggatatgcagctgtttcagacattctggtttttgtaccataaagggcatcccccgagtgagccctgtggcacaccctgtcggttggctactctatgcgcgcagctcagtgcacgcgccgattctcctgctttgtgccgacacctcatgcccgacggatccctgcccgaggcgcagtccctttggccacgtccgctcttttgt

SEQ ID NO: 12104 - DNA, 1893 bp, Artificial Sequence
  derived and/or modified sequence
atgcctcggtatggcgcttctctacgacaaagctgcccacgatccgggcgagagcagggtcaggacggtacagccggcgccccaggccttctgtggatggggctggtgctggctttggccctggccctcgccttggctctggctctgagtgactcgcgcgtcctgtgggctcctgcagaggcccatccgctgtccccccagggacatcctgcaagacttcacagaatcgtcccccgtctcagagacgtgttcggctggggcaatctcacgtgcccgatctgcaaaggcctattcactgctatcaatctgggtcttaaaaaggaacctaacgtcgccagagttggctctgtggcaataaagctctgtaatttgcttaagattgcgcctcctgccgtgtgccaatctatcgtgcacctgttcgaggatgacatggtggaggtgtggcgtagaagtgtgctcagccctagcgaggcgtgtggcttgcttctgggctctacttgtggccactgggacatcttcagctcttggaacatctccctacctacagtgcctaagcctccccctaagccgccatcgccacctgctcccggcgccccagttagccgaattctctttttgactgatctccactgggatcacgactacctggagggaaccgatcctgattgtgcagatcccctgtgttgtcgtcgcggatccggtctcccccccgccagccggccaggggccggctactggggagagtactcaaagtgcgacctaccactgcggactttagaatctctgttgagtggcctcggtcctgccggacccttcgatatggtgtattggacgggagatatccctgcacacgacgtgtggcaccagaccagacaggaccaactccgggcactgactacagtgacagctctcgtccgaaaattcctgggtccagtgccagtttatccagccgtgggcaaccacgagtctacacccgttaattcgtttcctccaccctttatcgaaggcaaccactctagtaggtggttgtacgaagctatggcaaaagcatgggaaccatggctgccagcagaagccctgcggacactgcgaataggaggtttttatgctctctcaccataccctggactgcggctgatttcacttaatatgaacttttgcagccgcgaaaatttctggctccttatcaattccaccgaccccgctggacagcttcagtggctcgtaggcgagttgcaagcggctgaggatcgtggagacaaggtccatattatcggacacatacctcctggccactgtctgaagtcatggtcttggaattactaccgcatcgtggctagatatgaaaacacactggccgcacagtttttcgggcacacccacgtggacgaattcgaagtattctatgatgaagaaaccttgagcaggccactcgctgtggcatttctagccccatccgcaaccacatatatcggtttaaatcctggatacagagtgtaccagatagatggaaactattccggcagctcccacgtggtcctggatcatgagacctacattctcaatctgacgcaggctaacatacccggagcaataccacattggcaactcctgtaccgggccagggaaacctatgggttgcccaacacactgcctacggcctggcacaacctggtgtaccggatgcgcggggatatgcagctatttcagaccttttggttcctgtatcacaaaggccatccccccagcgagccctgcggaacaccttgtcgccttgcaactctatgcgctcagctctctgcacgagcagactcaccagctctgtgcagacacctgatgcccgatgggtcgctgcctgaggcccagagtttgtggccgcgccctttgttctgt

SEQ ID NO: 12105 - DNA, 1893 bp, Artificial Sequence
  derived and/or modified sequence
atgccacgctacggcgcatccttgagacagagctgtccaagaagcggacgcgagcagggtcaggacggcaccgcaggagctcctggtctgctctggatgggcttggttttggctttggccctggctctggcattggccttggccctcagtgatagccgcgtgctgtgggctcccgcagaggctcacccccttagcccccagggccatcccgctaggctgcataggatcgtcccacgtctgagggacgtgttcggctggggcaacctgacatgtcctatctgcaagggtttgttcacagctataaatctgggcctcaagaaggaaccaaacgtcgcacgtgttggttcagtggcaattaagctgtgtaacctgctcaaaattgctccccctgccgtttgccaaagtattgtacacctgtttgaagacgacatggtagaagtgtggaggaggtccgtcttgagtccctccgaggcttgtggtctgctgttgggcagtacatgtggacattgggacatattctccagttggaacatatctcttcccacagtacccaagcccccacccaagcctccttccccacccgctcccggagcccccgtgtccagaatcctgttcctgactgaccttcactgggaccacgattacctcgagggaacagatcccgattgtgccgacccattgtgctgcagacgcggttctggcctgcctcctgcttctaggcccggtgccggatactggggtgagtactcaaaatgcgaccttcctctcaggaccctcgaatcactgctgagcggactgggcccagctggcccctttgatatggtgtactggactggagacatccctgctcatgatgtctggcatcaaacaaggcaggatcagctccgcgcactcacaacagtgacagccttggtcagaaagtttctcggtccagttcctgtttaccctgccgtgggtaaccatgagagtacccccgtaaattccttcccacctccttttatcgaaggtaaccacagctctcgctggttgtacgaggccatggccaaggcctgggagccttggctgcctgctgaggccctcagaactctccgtattggtggattttacgctctcagcccttaccctggtcttcgtctgatctctctgaacatgaacttttgtagtagagaaaatttctggctcctcatcaattctaccgatcctgctggacaactgcagtggttggtaggtgaacttcaagctgcagaggataggggcgataaagtgcatattatcggccacatcccccctggtcattgcctgaagtcttggagctggaattactatcgtattgtagcacgctatgagaatactctggcagctcaatttttcggccacacccatgtcgacgagttcgaggtcttctacgacgaggagacactcagccgcccactcgctgtggcattcctcgctccttcagccactacttacattggattgaatccaggctaccgcgtctatcagattgatggtaactattcaggtagctcccatgtcgtgcttgaccacgagacatacattctgaacctgacccaggccaatatccctggcgctataccccactggcagctcctgtaccgtgctagggagacatacggtctccctaacactctgcccaccgcctggcacaatcttgtgtatcgtatgaggggtgacatgcagctgtttcagactttctggtttttgtatcataagggtcaccctccctccgagccctgcggaaccccttgcagactggccactttgtgcgcacagctttccgctagagccgactcacccgctctctgccgtcaccttatgcccgacggctctctgcctgaggcacagagcctgtggcccagacccctcttctgc

SEQ ID NO: 12106 - DNA, 1893 bp, Artificial Sequence
  derived and/or modified sequence
atgccccgctacggagcttccctgcgtcaatcgtgcccgagatccggaagggagcagggccaggacggaaccgcgggagcgcctgggcttctgtggatgggtctggtgcttgcactcgcactggctctggcactggcgctggcactttcggattcccgggtgctgtgggcgccggcagaggcacatccgctctcccctcagggtcatcctgccaggttgcatcgcatcgtgcctagactgcgtgacgtctttggttgggggaatttgacttgtcctatttgcaaggggctgttcactgccattaacctgggcctcaaaaaagaaccaaatgtggccagggtgggtagcgtggccatcaagttgtgtaatctcctgaaaattgcacccccagccgtctgtcaaagcatcgtgcatttgttcgaagatgatatggtggaggtgtggagacgtagcgtgctttcgccatcggaagcctgcggactccttctggggagcacttgcggacactgggacatcttctcatcttggaacatttcgctgccgactgtcccaaagcccccacccaagccaccttcaccacctgcgccgggtgcgcctgtgagcaggatactgttcctgaccgatctgcattgggatcacgactacttggaggggactgaccctgattgcgcagacccactttgctgtcggaggggaagcggcctgccaccagcgtccagaccaggtgccggctattggggggaatacagcaagtgtgatcttccactgcggaccctggagtcacttctctcgggacttggtcctgcaggtccttttgacatggtctactggactggcgacatccctgctcatgatgtgtggcatcagactcgccaagatcagctgcgagctcttactacggtgaccgccctggtcagaaagtttctgggaccagtccctgtttatcccgcggtggggaaccatgaaagcaccccagtcaactcgtttccgcccccgtttattgaaggaaatcattcatccagatggttgtacgaagcgatggcaaaagcctgggaaccctggctgccagcagaagcattgcggaccctgcggattggcggcttttacgcactctcgccttaccctggactccgcctgattagcctcaacatgaatttctgttcgagagagaacttctggctgctgatcaattcgaccgatcccgctggacagctgcagtggcttgtgggagagctgcaggcggcagaagatcgcggagataaggtgcatatcattggacacatccctccaggacactgcctcaagtcgtggtcctggaattactaccgtatcgtggcccgttacgagaatacgctcgcagcgcaattcttcggtcacacccatgtggacgaatttgaagtgttttacgacgaggaaactttgtcccgaccgttggccgtggcctttctggcaccgtcggcaaccacctacatcggcctgaacccgggatacagagtctaccagattgatggcaattacagcggatccagccacgtggtgcttgaccacgaaacgtacattcttaacctgactcaagcaaacattcccggtgcaattccccattggcagctcctgtaccgcgcaagagaaacttacggacttccaaacacccttccaactgcctggcataaccttgtgtaccggatgagaggagatatgcagctgtttcaaaccttctggtttctttatcataaaggtcaccctccatctgagccttgcggtactccttgcagacttgctaccctgtgcgcacaactgtcggctagagccgactcccctgcactttgccgccatcttatgccagacgggtcactgccagaagcacaatcactttggccgcgccctctgttttgt

SEQ ID NO: 12107 - DNA, 1893 bp, Artificial Sequence
  derived and/or modified sequence
atgccaagatatggtgcatcattaagacaaagttgtccacgttcaggacgtgaacaaggtcaagatggaaccgctggagccccagggttgctatggatgggacttgttttagcattggcattagctttagcattagctctagcacttagtgattctagagtattatgggcaccagctgaagcacatccactttcaccacaaggacatccagctagacttcatagaatagttccaagacttagagacgtatttggttggggaaatttaacatgtccaatctgtaaaggacttttcactgctataaatcttggacttaagaaggaaccaaatgttgctagagtaggaagtgttgctattaaactttgtaatcttttaaaaatcgctccaccagctgtctgtcaatcaattgtgcatctttttgaagatgatatggttgaagtttggagaagaagtgttttatctccttctgaagcatgtggtcttcttttaggttcaacatgtggacattgggatatttttagttcttggaatatttcattaccaactgttccaaaaccaccacctaaaccaccttcacctccagccccaggagcaccagtatcaagaattctttttctaacagatttacattgggatcatgattatctcgaaggaacagatccagattgtgctgatccattatgttgtagaagaggatcaggtttaccaccagcatctagacctggagcaggatattggggggaatatagtaaatgtgatttgccacttagaacattggaaagtttgctttccgggttaggaccagcaggtccatttgatatggtatattggacaggtgatattccagcacatgatgtatggcatcaaactagacaagatcaattaagagcattaacaacagttactgcacttgtaagaaaatttttaggtccagtcccagtttatcctgctgttggaaatcatgaatcaactccagtaaattcatttcctccaccttttatcgaaggaaatcattcatcacgatggttatatgaggcaatggctaaagcatgggaaccttggttaccagctgaggcacttagaacattaaggattggagggttttatgcactttcaccatatccaggtttaagattaatttctttaaatatgaatttttgttcacgagaaaacttttggcttttaattaattctacagatccagctggtcaattacaatggcttgttggtgaacttcaagctgcagaagatagaggagacaaagttcatatcattggacacattccaccaggtcactgtcttaaatcatggtcctggaattattataggattgttgctagatatgaaaatactttagctgctcaattttttggtcatacacatgttgatgaattcgaagttttctacgatgaagaaacattatcaagaccactagcagttgcatttcttgcaccttctgctactacttatattgggcttaatccaggttatcgtgtatatcaaattgatggaaattattctggttcttcacatgttgttcttgatcatgaaacatatatattaaatttaactcaagctaatattccaggagcaataccacattggcaattattatacagagctagagaaacatatggacttccaaatactcttccaacagcttggcataatcttgtttatagaatgagaggtgatatgcaacttttccaaacattttggtttctttatcacaaaggacatccaccatcagaaccatgtggtacaccatgtagattagcaactttatgtgcacaattatcagcaagagcagattcaccagctctttgtagacatcttatgcctgatggatcattaccagaagctcaaagtctttggcctagacctttattctgt

SEQ ID NO: 12108 - DNA, 1893 bp, Artificial Sequence
  derived and/or modified sequence
atgcctcgttacggtgcttccctccgacagagttgccctcggagtggacgtgaacagggtcaagatggaaccgcgggcgcccctggcctgttgtggatgggactggtgctggctcttgccctcgcgctcgctctggccctggctctgagcgacagtcgggtgctgtgggctcccgccgaggcccacccgctgtctcctcagggacatcccgccagattgcaccgcattgttccacgtttgcgtgacgtgtttggatggggaaacctgacctgtcccatttgcaagggccttttcaccgctatcaacctcggactgaagaaggaacccaacgtcgctcgcgtaggttcggtcgctatcaagctgtgcaacttgttgaaaatcgccccgcctgcggtttgccagtccatcgttcacctcttcgaagacgatatggttgaggtgtggcgtagatccgtgctgtctccgtcggaggcctgtggtctgcttcttggctcgacttgcggacactgggatatcttcagctcctggaatatctctttgcctaccgtccccaagcctcccccaaagccccccagccccccagcgcccggtgccccggtttcgcgcatccttttcctgaccgacctgcactgggaccacgactatttggaaggtaccgaccccgactgtgcagaccccctttgctgtcgccgtggtagtggactgcctcccgcctcgcgccccggtgccggttactggggggagtattctaagtgcgatctccccctccggacgctcgagtccctcttgtcaggtctaggacccgccgggcctttcgatatggtttactggaccggcgacattcctgcccatgacgtctggcaccagacacggcaagatcaactgcgcgctctgactacggtcacggcactcgtccgcaagttcttgggccccgtccccgtctaccccgccgtgggcaaccacgaatctactcctgtcaactccttcccccctcctttcatagagggtaaccacagttcccgatggctgtacgaggctatggctaaggcttgggagccctggctgccagcggaggctttgcgcaccctccgcatcggtggcttctatgcattgagcccatatccggggctccgcctcattagccttaacatgaacttttgctcccgtgagaacttttggctcttaatcaattcaacggatcccgccggccagttgcagtggttagtcggcgagttgcaggccgctgaggaccgcggcgataaggtccatatcatcggtcatatcccccctggccattgcttgaagtcctggagctggaactactaccgtatcgttgcgcgttacgaaaacacgctggccgcgcagtttttcggtcacactcatgttgatgaattcgaggtcttctatgacgaagagactctgtctcgcccgcttgccgtcgccttcctggctccgtctgctacgacgtatatcggccttaaccccggttaccgtgtttaccagattgacggcaactatagcggatcctcccatgtagtgctggaccatgagacttacattctcaacctcacccaagctaacatccccggcgcaattccccactggcaactgctctatagagctagggaaacctacggtctccctaacaccttacctacggcctggcacaatctggtctatcgtatgcgaggtgacatgcagctcttccaaactttttggtttttgtaccataagggtcacccgcctagcgaaccctgcggtaccccatgccggctggccactttgtgcgcccagctgtccgctcgtgccgattcccccgccctctgccggcatttgatgccagatggatccttaccagaggcgcagtcgctgtggccccgtccacttttctgt

SEQ ID NO: 12109 - DNA, 1893 bp, Artificial Sequence
  derived and/or modified sequence
atgcctagatacggcgcctccctccggcaatcttgtcctcggtccggccgcgagcaggggcaggacggcacagccggggccccggggctgctgtggatgggccttgtcctagcgctcgccctggccctggcacttgcactggccttgagcgatagcagagttctgtgggcacctgctgaggcacatccgctaagtccccaggggcacccagctagactccaccggattgtgccaagactccgggatgtgttcggatggggcaacttaacctgccctatctgcaaaggcctctttaccgcaattaacttaggcctgaagaaggaacccaacgtggccagggtgggcagcgtggcaataaagctctgcaatttactcaaaattgctccaccagccgtctgtcaatctattgttcatcttttcgaagatgacatggtcgaagtgtggcgccgctcggtactaagtccgtcagaggcctgcggcctattgctcggctccacctgtgggcactgggatatattcagttcatggaacatcagcttacctaccgtgcctaagcccccacctaaaccaccttccccccccgctcccggagcccccgtgagcaggatacttttccttacagacttgcactgggaccacgattacctggagggtacagatcccgactgtgcagatccgctgtgttgccgtcgcggcagcggactgcctcccgcaagcagacctggcgccggctactggggtgagtattcaaagtgtgacctgcctctgcggacgttggaatccctcctctctggactggggcccgcaggcccctttgatatggtgtattggactggggacatccccgcccatgacgtgtggcatcaaacacgtcaagaccagctgcgggcgctaactaccgtcaccgccttagtccgcaagttcctgggacctgtgcccgtgtatccagcggtgggaaaccatgagagcactcccgtcaactccttccccccccccttcattgagggcaatcactctagccggtggttgtatgaggccatggctaaggcctgggaaccgtggcttcctgccgaagccctgcgcacccttcgaattggtggtttctatgctctgagtccttacccagggctgagactgatcagtcttaatatgaacttttgctccagggaaaatttctggctgctgatcaactccaccgacccagcgggtcagctgcagtggctggtgggcgaacttcaggccgctgaagacagaggcgacaaagttcacataattggccatatcccacctggacattgcctgaagtcatggtcttggaactattaccgcatcgtggccagatacgagaacaccctggcagcgcaatttttcggtcacactcatgtggatgagtttgaggtcttttatgacgaagaaaccttatccagacctctagctgtagcattcctagctccttctgcaactacctacatcgggttgaaccccgggtaccgcgtctaccagatagatggcaattactccggctcttcccacgtagttttggaccacgagacctacatcctaaacctcacgcaggccaatattccaggagccatcccacactggcagctgctttatcgcgccagagaaacctatggtctccccaacaccttgcctacagcctggcataacttagtttaccgaatgcggggggacatgcagttgttccagactttttggtttctgtaccacaagggccatccgccttccgagccatgcggaacaccctgtaggttggccacactctgcgctcagctgtcagcgcgcgccgacagccccgcgttatgtaggcaccttatgccagacggtagtttgccagaagctcagtccttgtggcccagacccctcttttgc

SEQ ID NO: 12110 - DNA, 1893 bp, Artificial Sequence
  derived and/or modified sequence
atgccccgatacggtgccagtctgaggcagtcttgtcccagatccggtcgggaacagggccaagatggaaccgctggagccccaggtctgctttggatggggctggttctggccctcgccctggccctcgccctggcactggcgctgtccgatagccgggttttgtgggcacccgctgaggcccatccactttctccgcaggggcaccccgctcggctgcatcgcatcgtgcctcgactgagggatgtgtttggatggggtaacctcacctgccctatctgcaaggggctctttactgcaataaatcttggccttaagaaggaacctaacgttgcccgcgtgggttcagtcgctatcaaactgtgcaaccttctcaaaattgcccccccggcagtatgccagagcatagtacacctctttgaggacgacatggttgaggtctggagaagatccgtcctgtcccccagcgaagcttgcggactgctcttgggatccacctgtggccactgggatatttttagctcttggaatatctctcttccgacagtgcctaagccaccccccaaaccacccagcccacccgctcctggcgccccagtctctagaatcctttttctgaccgacctccactgggatcacgactatctcgaagggaccgatcccgactgcgccgaccccctctgttgtcgaagaggctcaggtctccctcccgcaagcagaccgggggccgggtattggggagagtacagtaagtgtgacctgcctctgcggactctggaatccctgctctccggactgggtccagccggccctttcgacatggtctactggacaggcgatattcccgcacacgatgtgtggcaccaaacaagacaggaccaactgcgagctcttaccacggtgactgcccttgtcaggaagtttctcgggccagttcctgtgtaccctgctgtaggcaaccatgagagtacccccgtaaattcttttcctccaccttttattgaaggcaaccattcttcaaggtggctctacgaggctatggcaaaggcgtgggagccctggctgcccgctgaggctctgaggacactgagaatagggggattttacgctctttccccttaccctggcctgaggctgatttccctcaacatgaacttctgtagccgggagaacttttggttgctgatcaactcaaccgatcccgccggtcagctgcagtggctggtgggagagctgcaagcagcagaggaccgcggggataaggtgcacataatcggccacatcccgcccggccactgtctcaagagctggagctggaattactacaggatcgtggcacgctacgagaatactctcgccgcccagttcttcgggcatacacatgtcgacgaatttgaggtattctacgacgaggagacactgtcaagaccgttggcggtggcttttttggcccccagcgctacaacctacatcggtctcaaccccgggtatcgcgtctatcagattgacggcaattatagcgggtcaagccacgtcgtgttggatcatgaaacctacatccttaacctcacacaagctaatattcccggagcaatcccacactggcagctgctgtacagagcccgcgaaacatacgggctgccgaacaccctccccaccgcgtggcacaatctggtttataggatgaggggtgatatgcaactgttccagacattctggttcctctaccacaagggccatcctccctcagaaccttgtggcaccccttgccgcctggcgactctctgcgcccagctgtcagccagggccgactcccctgctctctgcagacaccttatgccagacggatctctgcctgaggctcagtccctgtggccacgccccctcttctgt

SEQ ID NO: 12111 - DNA, 1893 bp, Artificial Sequence
  derived and/or modified sequence
atgccaaggtacggtgcatcgctgcgacaatcatgccctcgctccggacgggaacaaggtcaagacggtaccgcaggagcgccaggccttctttggatggggctggtgcttgcactcgcgctggcgctggcgctcgcacttgctcttagcgactcgagagtcctctgggcaccagccgaggcccatccactttcaccccaaggccaccctgcaaggctgcatcgcattgtcccacgcctgagggatgtgtttggatggggtaacctcacttgtccgatttgtaaggggctgtttaccgcaattaacctgggactgaaaaaggaacctaacgtggcaagggttggttctgtggcaattaagctgtgtaacctcctcaagatcgcaccacctgctgtctgtcaatcaatcgtccatctttttgaagatgatatggtggaagtctggcgaagaagcgtcctctcgccatcagaggcatgcggacttctcttgggttctacctgtggacactgggacattttctcctcgtggaacatttctcttcctactgttccaaagccaccgccaaaaccgccttcgccacctgcaccaggcgcacccgtcagccgaattctttttctgaccgaccttcattgggaccatgattacctggaaggcactgacccagactgcgcggatcccctttgttgcagaagaggatcagggctccctccagcctccaggccaggggccggttattggggagaatacagcaagtgcgacctccctcttagaactcttgaatctctgctttcagggctgggtccagcagggccttttgacatggtgtactggaccggtgatatcccggcacatgatgtgtggcatcagactaggcaagaccaactgcgggccctcaccactgtgactgcattggtgagaaaattccttggtcctgtgcccgtgtaccctgcggtgggcaatcatgagtcgacgccagtcaactcgttccctcctccctttattgaagggaaccattcctcgagatggctgtacgaagcaatggcaaaggcttgggaaccttggttgcctgcagaggctctgaggactctgagaattggcggcttttacgcactttcaccatacccaggtcttagactcatctcattgaatatgaatttctgtagccgggagaacttttggcttctcatcaactccaccgatcccgccggacaactgcaatggctcgtgggagagctgcaagccgcagaggatcggggagataaagtgcacattattgggcatattcctccgggtcattgtttgaagtcctggagctggaactactaccgtattgtcgccagatacgaaaacactcttgcagcacaattctttggacatacccatgtggatgagtttgaagtcttttatgacgaagaaacgctgagccggcctcttgccgtggcatttctcgcccctagcgcgaccacctacatcggcctcaatcccggttaccgcgtgtaccaaatcgacggaaactactcaggatcgagccacgtggtccttgaccacgaaacctacatacttaacctgactcaagcaaacattcctggtgcgatacctcactggcaacttctttaccgagcacgcgaaacttacggtctgcctaacactctcccaactgcatggcacaatttggtgtaccgaatgcgcggtgatatgcaactgttccaaacgttttggtttttgtaccacaagggacacccaccttcagagccctgtggaaccccatgtcgcctcgcaaccctgtgtgcacagctttccgcaagagcagattctcctgccctgtgcagacatcttatgccagatggcagcctcccagaagcacaatcgctgtggccccgcccactcttctgt

SEQ ID NO: 12112 - DNA, 1893 bp, Artificial Sequence
  derived and/or modified sequence
atgcctcggtacggggcctcgcttaggcagtcgtgtccgagatcaggccgcgaacaaggacaagacggcactgcaggtgccccgggactcctctggatgggactggtgctggccctggctctggccctggcgctggcactggccttgagcgattcacgggttctgtgggccccggcggaggcacatccgctctcgccacagggccatccggcacggttgcatcgcatcgtcccacgcctgcgggacgtgttcggatggggaaacctcacgtgcccgatctgcaagggactctttaccgccatcaacctgggattgaaaaaggagccgaatgtcgcaagggtgggatcggtggctatcaagctctgcaatctcctgaagatcgctcctccggccgtgtgtcaatccatcgtgcatctgttcgaggacgatatggttgaggtgtggcgccggagcgtgctgtcacctagcgaggcgtgcggcctcctgctcggatcaacctgcggacattgggacatcttctcgtcctggaatatctcactgccgactgtcccgaagccgccgcccaagcccccttcgcccccagcaccgggagcgccagtgtcgaggattctgttcctgactgacctccactgggaccacgactacctcgaaggaaccgacccagattgtgcagacccgctgtgctgccggcgtggcagcgggctcccgccagcctcccggcctggcgccggatactggggagagtactccaaatgtgatctcccactgaggactctggagtctctcttgtcgggacttggtccggcaggaccattcgatatggtgtactggactggagacatccctgctcacgacgtgtggcaccaaactaggcaggaccagctcagagccttgactactgtcaccgcgctggtccgcaaattcctcggaccagtcccggtgtacccggccgtgggaaatcacgagagcaccccagtcaactccttccctcctccgttcatcgaaggaaaccactcgtcgcgctggttgtacgaagctatggccaaggcatgggagccttggttgccggcagaggctctgcggactctgagaattggcgggttctatgctctgagcccatacccaggactgcgcctgatctcgctgaacatgaacttctgttcaagggagaatttctggctgctgatcaatagcaccgacccggccggccagcttcaatggcttgtcggtgaactccaagcggcagaggaccggggcgataaggtgcatatcattggacacattccacctggccactgtctgaagtcgtggtcgtggaactactatcgtatagtggcaagatacgaaaatacgttggcagcgcagttcttcggacatacgcacgtcgatgagtttgaagtgttctacgacgaagaaactctgtcacgcccgctcgccgtcgcgtttcttgccccgtcagctactacctacatcggcctgaatccaggatacagagtgtaccaaatcgacggaaactacagcggatcatcccacgtcgtgttggatcatgaaacgtacattctgaatctcactcaagcgaatatcccaggtgcgatccctcattggcagctgctgtacagggcccgcgaaacttacggcctgccgaacaccctgccaacggcgtggcataacctcgtctaccggatgcgcggagacatgcaactcttccaaactttctggttcctgtatcacaaaggacatccgccatcggaaccctgtggaaccccatgcaggcttgcaaccctgtgcgctcagctgtcagcccgggccgatagcccggccctgtgtcgccacctcatgccggatggttcactgccagaagcccagagcctctggccaagaccgctcttttgc

SEQ ID NO: 12113 - DNA, 1893 bp, Artificial Sequence
  derived and/or modified sequence
atgcccaggtatggggcgagtctgcgacagtcatgtccccggagtggaagagaacaggggcaggacggaaccgctggcgcacccggactgctttggatgggactggtgctcgccctcgctctcgccctggccctcgctcttgctctctccgactctagagtcctgtgggctccagctgaagcccaccctttgtcgcctcagggccaccctgcgcgtttgcatcgaattgtgccccgcctgcgggacgtgttcggctggggaaacctgacatgccctatctgtaaaggcttattcaccgcaattaatttaggtttgaaaaaggagcccaacgtggcccgggttggttccgtggcaatcaaactttgcaatctgctgaagattgccccccccgcggtatgccagagcattgtccacctctttgaagatgatatggtagaggtttggaggcgttcagttttatccccaagtgaagcatgtggtctgcttctgggcagtacatgcgggcattgggatatttttagctcctggaatatcagtctcccaaccgtgcccaagcccccgcccaagccgccttcaccccccgctcctggggcccctgtctcccggatactgttcctcactgaccttcactgggatcacgactatttagagggaactgatccggattgcgctgaccctctgtgttgtagaagagggtccgggttacctccggcgtcacgccccggagcaggatattggggagaatactcaaagtgcgatctacccttgagaaccttggagagtctactctccggtttaggacccgcaggtcccttcgatatggtttactggacaggcgatatccccgctcacgatgtgtggcatcagaccaggcaggatcaactgcgggccctgacgacagtgaccgccttggtgcgcaagttcctgggccccgtaccagtatatcccgcggtcgggaatcacgagtctacccctgtaaattcgttccctccgcccttcattgaaggcaatcattcatccaggtggttatatgaggcaatggccaaggcatgggagccttggctccctgcggaagcgctcaggaccctgaggattggtggcttttacgccctcagcccctaccccggtttgcgacttatctcattgaatatgaatttctgctccagggaaaacttctggttgttaatcaatagcacagatccagcaggccagctgcaatggctcgtgggggaactgcaggctgctgaggaccgaggcgacaaggtccacataatagggcatatcccacccgggcactgcctgaagtcatggagttggaactactaccggatcgtggcccgctacgaaaacactttagccgcccagtttttcgggcacacccacgttgacgaatttgaagtattttacgatgaggaaacactctcgcggccactggccgttgccttcttggctccctccgccacgacctacattggcctcaacccgggttaccgagtataccagatagacgggaactactcaggctctagccacgtggtcttggaccacgagacctacatcttaaacctcacacaggccaatattcccggggcgattcctcactggcagctgctctatcgggcgcgagagacctacggtcttcccaacaccctccccacagcctggcacaacctggtgtaccggatgagaggcgacatgcagctcttccaaacattttggttcctgtaccataagggccatccaccatccgaaccttgtggaactccctgcaggctcgctacactctgtgcccagctctctgctagagcagactccccagcgctttgccgccaccttatgcctgatggatccttgcctgaagcacagtccctgtggcctcgccctctcttctgc

SEQ ID NO: 12114 - DNA, 1893 bp, Artificial Sequence
  derived and/or modified sequence
atgccccgatacggtgcctcacttcgccaaagctgccctcgatccggacgtgaacaaggtcaggatggcactgccggtgcacctgggcttctgtggatgggacttgtcttggccctggccctggctttggcacttgcacttgcactgtccgattcaagagtgctgtgggcacctgccgaagcacatcctctctcaccgcagggccatccagcccgtctgcatcgaatcgtgccaaggctgcgagacgtgtttggatggggtaacctgacttgcccgatatgtaagggactctttacggctataaacttgggcctgaagaaggaaccgaatgtggccagagtgggctcggtcgcaattaagctgtgtaatctgctgaagattgcgcctcctgcagtgtgccagtccatagtgcacttgttcgaggacgacatggtggaagtctggcgccgatccgtcctttcaccttcagaagcctgtggacttcttctgggctccacttgcggacactgggatatcttttcatcgtggaatatctcccttcctactgtgcctaaaccccctccaaagccacccagcccgccagctcccggagcaccagtcagcagaattctgttcctgactgatttgcattgggatcatgattacctggaaggtaccgacccagattgcgccgatcctctttgctgccgccggggatctggactcccacctgcttcaagaccaggagccggttactggggtgaatactcaaagtgcgacctgccccttcggactctggaatcgctgttgtcagggcttggacccgcaggaccatttgacatggtctactggaccggcgatattcccgcgcatgatgtgtggcaccagactagacaggaccaacttcgcgcactcaccactgttaccgcacttgtcagaaagtttctggggcctgtccctgtgtacccggcggtgggaaatcatgaatcgactcctgtgaactcgtttcctcctcctttcattgagggaaaccattcgagcagatggctctacgaagctatggccaaagcgtgggaaccctggcttcctgcagaggcattgcgtaccctccgtatcggaggcttttatgctctgtcgccgtaccctggacttaggcttatctcgttgaacatgaatttctgttcgagagaaaacttttggctgcttatcaattcgacggatcctgcagggcaacttcaatggctcgttggcgagctgcaagccgcggaggaccggggtgataaggtccacattataggtcatataccccctggccactgtcttaaatcgtggtcgtggaactactacagaattgtggcgagatacgagaacaccttggccgcccaattcttcgggcacacccacgtggatgagtttgaggtgttctacgacgaggaaactctttccaggccccttgcagtggcatttctggcccctagcgcaacgacttatatcgggttgaatccaggctaccgggtctaccagatcgatggtaactacagcgggtcctcccacgtggtcctggatcatgaaacctacatcctgaatttgactcaggctaacattcctggggcaatcccacactggcagcttctctaccgggcacgcgaaacctatggcctgccaaacaccctgcctaccgcatggcacaaccttgtgtacagaatgagaggagatatgcagctgttccaaactttctggttcctgtaccacaagggacatccaccatccgaaccttgcgggacgccgtgcagattggcaactctctgtgcgcagctctccgcacgcgctgatagccctgcgctttgccgccatctgatgccggatggctcgctgccagaggcacagtcgctgtggcctagacctcttttctgt

SEQ ID NO: 12115 - DNA, 1893 bp, Artificial Sequence
  derived and/or modified sequence
atgccacgatacggagcgtcactccgtcagtcctgtccaagatcgggacgggaacaaggacaggatggaaccgcaggtgcccctggtctgctctggatggggctggtcttggcattggcactggcgctggcacttgcactcgctctgtcggactcaagagttctgtgggcccctgccgaagcacaccctctctcgcctcaaggacaccctgcaaggctccaccgcatcgtgccacgcctgcgggatgtgtttggttggggaaacctcacgtgccccatctgcaaagggctttttaccgcaatcaatctgggactgaaaaaggaacctaacgtggcaagagtgggctcagtggccatcaaactttgcaatcttttgaaaatcgcaccccctgcggtctgccagtcgattgtgcatctgtttgaagatgatatggtcgaagtctggcgtcgaagtgtgctctccccctcggaagcatgtggcctcttgctggggtcaacctgtggacattgggacattttcagctcatggaacatttcgctccctactgtccctaaacctccacccaaaccaccttcgccccctgcccctggagccccagtctcgagaattctttttctgactgatctgcactgggatcatgattaccttgaagggactgacccagattgtgccgacccgctgtgttgcaggcgcggcagcgggctgcctcctgcatccagacctggagcaggatactggggagagtactcgaagtgtgaccttcccctgcggactttggaatcgctgctcagcggactgggcccagcgggaccctttgatatggtctactggactggtgatattcctgctcatgacgtgtggcatcaaacgagacaagatcagcttcgggccctgacgaccgtcactgcgctcgttagaaagttcctgggccctgtccccgtgtacccggcagtcggcaaccacgagtcgacgccagtcaactccttcccccctccctttattgagggaaaccattcatcgcggtggctttacgaggcgatggccaaggcatgggaaccatggctgcctgcggaagcacttcgcactcttcgtattggtggattctacgctctttcgccgtatcctggtctgagattgattagcttgaacatgaacttttgctccagagagaacttctggttgctcatcaatagcactgaccccgctggccagctccagtggcttgtgggagaacttcaagcagccgaggacagaggagataaggtgcacatcataggtcatattcctcctggtcactgcttgaagtcgtggtcctggaattactaccggattgtggctagatacgagaacaccctggccgcccagtttttcggccacacccatgtggacgaatttgaggtcttttacgatgaagaaacccttagccgcccacttgcagtggcattcctggcaccatcggccaccacttacataggcctgaatcctggataccgtgtgtaccagattgatggcaactactcaggatcgagccatgtggtgctggatcatgaaacctatatactgaatcttacccaggcaaacattcctggagcaatcccacactggcagctgctctacagggctcgggaaacctacggactgcctaatactttgccaactgcctggcataatctcgtgtataggatgagaggggacatgcagttgtttcagaccttctggtttctgtaccacaaaggtcatcctcctagcgaaccatgtggaacgccatgccgtctggcaactttgtgcgctcagctttcagcacgagcagattccccagccctttgtagacatctcatgccagatggctcgttgcctgaagcccagagcctttggcccaggcctcttttttgt

SEQ ID NO: 12116 - DNA, 1893 bp, Artificial Sequence
  derived and/or modified sequence
atgccgcgctacggggcctcattgcgccaatcctgccctagatcaggtagagagcaaggccaggacggaactgcgggggcccctggactgctgtggatgggtctggtcctggctcttgccctcgcgttggctctcgccctggccctctccgacagccgggtgctgtgggctccagcggaagcccatccactgagcccgcagggccatccagcacgcctgcatcggatcgtcccacgactccgcgatgtctttgggtggggaaaccttacctgtcccatctgcaagggattgtttaccgcaatcaacctcggactcaaaaaggaaccgaacgtggcgagggtgggatcggtggctatcaagctctgcaatttgctgaagatcgcgcccccggccgtatgtcaaagcatcgtgcatctcttcgaggatgatatggtggaagtgtggaggcgctcagtgctttccccatcggaagcgtgtggactcctgctcggatcgacctgcggacattgggatattttctcctcgtggaacatctccctgcccaccgttccgaagcccccaccgaaaccgccgtccccaccagcgccgggagcaccagtgtcacggatcctgtttctgactgacctgcactgggaccacgactacctggagggaaccgatcccgactgcgccgatccactgtgctgccggaggggcagcggcctcccgcctgcgagccggccgggcgcaggatactggggtgaatactctaagtgcgacctgccgcttcgtactctggagagcctcctctcagggctcgggcctgcaggaccgttcgacatggtgtactggactggcgatatcccggcacacgatgtctggcaccagactagacaggaccagctgagagctctgaccaccgtcactgccctggtgagaaagtttctgggaccggtgccggtgtaccctgccgtggggaaccatgagtcgaccccagtcaactccttcccgccgccgtttatcgaaggaaaccactcgtcgcggtggctctacgaagcgatggccaaagcctgggagccctggctccccgccgaagctctccgcactctgcgcatcggtggattttacgcgctgagcccatacccaggtctgcgcctgatctccctgaacatgaatttctgctcgcgggaaaatttctggctgcttattaacagcactgaccctgccggacaactgcagtggctggtcggagagctgcaagcagccgaggacagaggagataaagtgcacatcatcggtcatattccgcctggacactgcttgaagtcttggagttggaactactatcgcatcgtggcccgctacgaaaatacgttggctgctcagttcttcggacacactcacgtggatgagttcgaggtgttctacgacgaggaaactctctcccggccgctggcagtcgccttcctggcgccttcggcgaccacctacatcggcctgaacccaggctaccgcgtctatcaaatcgacggcaattactcagggagctcacatgttgtgctggaccacgaaacttacattcttaacctgacccaggccaatatcccgggagctattccacactggcagctcttgtaccgggcacgagaaacctacggactcccgaatacccttcctacggcatggcataacttggtgtacagaatgcgcggcgacatgcaactgttccagactttctggttcctctatcacaagggccacccgccctccgagccttgcggcacgccgtgtcggctggcaaccctgtgcgcccagctgtccgcgagggccgactcgccggccctttgccggcacctcatgccggatggtagcctccctgaagcccagtcgctgtggcctagaccattgttctgt

SEQ ID NO: 12117 - DNA, 1893 bp, Artificial Sequence
  derived and/or modified sequence
atgccgcgttatggtgcgtcgctacgacaatcgtgtccgcgttcgggtcgagaacaaggtcaagatggtacggcgggtgcgccgggtttactatggatgggtctagtattagcgttagcgttagcgctagcgctagcgttagcgctatcggattcgcgagttctatgggcgccggcggaagcgcatccgctatcgccgcaaggtcatccggcgcgtctacatcgaatagtaccgcgattacgagatgtatttggttggggtaatctaacgtgtccgatatgtaaaggtttatttacggcgataaatctaggtttaaaaaaagaaccgaatgttgcgcgagttggttcggttgcgataaaattatgtaatttattaaaaatagcgccgccggcggtatgtcaatcgatagttcatttatttgaagatgatatggttgaagtatggcgtcgttcggttttatcgccgtcggaagcgtgtggtttattactaggttcgacgtgtggtcattgggatatattttcgtcgtggaatatatcgctaccgacggtaccgaaaccgccgccgaaaccgccgtcgccgccggcgccgggtgcgccggtttcgcgaatattatttctaacggatctacattgggatcatgattatctagaaggtacggatccggattgtgcggatccgttatgttgtcgacgtggttcgggtctaccgccggcgtcgcgtccgggtgcgggttattggggtgaatattcgaaatgtgatttaccgttacgaacgctagaatcgctattatcgggtctaggtccggcgggtccgtttgatatggtatattggacgggtgatataccggcgcatgatgtatggcatcaaacgcgtcaagatcaactacgtgcgctaacgacggtaacggcgctagttcgtaaatttttaggtccggtaccggtatatccggcggtaggtaatcatgaatcgacgccggtaaattcgtttccgccgccgtttatagaaggtaatcattcgtcgcgatggttatatgaagcgatggcgaaagcgtgggaaccgtggttaccggcggaagcgctacgtacgctacgaataggtggtttttatgcgctatcgccgtatccgggtttacgtttaatatcgttaaatatgaatttttgttcgcgtgaaaatttttggttattaataaattcgacggatccggcgggtcaactacaatggttagtaggtgaattacaagcggcggaagatcgtggtgataaagttcatataataggtcatataccgccgggtcattgtctaaaatcgtggtcgtggaattattatcgtatagtagcgcgatatgaaaatacgttagcggcgcaattttttggtcatacgcatgtagatgaatttgaagtattttatgatgaagaaacgttatcgcgaccgctagcggtagcgtttctagcgccgtcggcgacgacgtatataggtttaaatccgggttatcgagtatatcaaatagatggtaattattcgggttcgtcgcatgttgtactagatcatgaaacgtatatattaaatctaacgcaagcgaatataccgggtgcgataccgcattggcaattattatatcgagcgcgtgaaacgtatggtttaccgaatacgctaccgacggcgtggcataatttagtatatcgaatgcgtggtgatatgcaactatttcaaacgttttggtttctatatcataaaggtcatccgccgtcggaaccgtgtggtacgccgtgtcgtttagcgacgttatgtgcgcaattatcggcgcgtgcggattcgccggcgctatgtcgacatttaatgccggatggttcgttaccggaagcgcaatcgttatggccgcgaccgttattttgt

SEQ ID NO: 12118 - DNA, 1893 bp, Artificial Sequence
  derived and/or modified sequence
atgccacgctatggagcatctcttcgacaatcgtgcccacggagcggacgtgagcaaggacaagacggcaccgcgggcgcgcctggtttgctctggatgggacttgtactagcactggcgctcgctctcgctctggcgttggcgttaagtgattcccgagttctttgggctccagccgaagctcatccacttagtcctcagggacacccagcacgactgcatcgaatcgttccgaggttgcgtgatgtattcggatggggtaatctaacctgcccaatttgtaaaggacttttcacagcgattaatttgggacttaagaaggaacccaacgtggctagagtcggatcagtagcaattaaactgtgtaatctactcaaaattgcaccaccggctgtgtgccagtccatcgtccatttgttcgaggatgacatggttgaggtctggcgtcgctccgtcttaagcccatcagaagcttgcggattattacttggttctacctgtggacactgggatatctttagttcatggaacatctccttgccaacggttccaaagcccccgccaaaacctccatctccaccagcaccaggagctccagtctcacgtattttgttccttactgatcttcattgggatcacgattatttggagggtaccgatcccgattgcgcagacccattgtgctgtcgaaggggctcaggacttccgcctgcctcaagaccaggggctggatactggggagaatattcaaaatgtgacctccctttgcgtactcttgaatcccttctcagcggactcggtccagcaggtccttttgacatggtttactggacgggagacatccccgcccatgatgtttggcatcagactcgacaggaccaactccgagctcttacaactgtgacagctctcgtcagaaaattcttgggaccggtgccagtttatcccgccgtcggaaatcatgaatctacaccagttaactcttttccccctccattcatcgaaggtaaccattcgtcccgatggttatatgaagcaatggcaaaagcatgggagccctggttaccagccgaagctctgcgtacgctccgaattggtggattctatgcactgtccccatacccaggactccgtcttatctcactgaacatgaacttctgctcgcgtgagaatttctggttacttatcaatagcacggacccagctggacaactgcaatggttggtaggagagttgcaagcagctgaagaccgtggggataaggtccatattattggtcatatccccccaggacattgtcttaaatcctggagctggaattactatcgtattgttgcgcgctacgaaaatactctggccgcacagttcttcggtcacactcatgtagacgaattcgaggttttttacgatgaagagacactatcgcgtcctctagctgttgcatttttggccccatctgcaacaacgtatatcggattgaacccgggatatagggtttaccaaattgacgggaactactccggctcgtcgcacgtggtgctcgaccatgaaacttatattttaaacttgacacaggcaaacataccaggagcaatcccgcattggcaattgttatacagggctcgagaaacctatggtcttccaaatactcttccaactgcatggcacaatttggtttatagaatgcgcggtgatatgcaactgtttcaaacgttttggttcctttaccataagggccatccaccgtcagaaccgtgcggaaccccctgtcggctggctacactttgtgcccagctctcggctcgagctgattccccagctctttgtaggcatttgatgccggatggatctctgccagaagctcaaagcttatggcctcggccgttgttctgt

SEQ ID NO: 12119 - DNA, 1893 bp, Artificial Sequence
  derived and/or modified sequence
atgcctcgttatggcgccagtctgcgccaatcttgtccgcggtcaggcagagagcagggacaggatggtaccgccggagcccccggactactctggatgggcctggtccttgccctggctcttgccctagccctggctctggcattgtctgatagccgggtgctgtgggcccccgctgaagcgcaccctctcagcccacagggacaccccgccaggcttcacagaatcgtcccacgcctgcgggatgtgttcggctggggaaatctgacatgccctatttgcaagggactcttcaccgctattaacctaggactcaaaaaggaaccaaacgtcgcccgcgtagggtctgtcgccatcaagctttgcaacctactgaagattgctcctcccgcagtgtgccagtctattgtacacctgtttgaagatgacatggttgaggtctggagaagaagcgtactcagcccctcagaagcatgcgggctgttgctcggttccacctgtggacactgggatatctttagctcgtggaacatttctctcccaacggtccccaaacctccgcccaagcccccttcacctccagctccgggggcacccgtctctcgtattttattcctgacagatctgcactgggaccacgactacctagagggcaccgaccccgactgtgcagatcctctctgttgtcgccgcggctccggacttccaccagccagtcggccaggagccgggtactggggcgaatacagtaagtgcgacctgcccctacggacactagagtccttgctgtcgggactagggccggccggcccatttgatatggtgtactggacaggtgatattcccgcacacgacgtatggcaccagacgcgacaagaccaattaagggcattgaccaccgtgactgccctggtgcggaaattcctgggccctgtgccggtttacccggcggtcggcaatcatgaaagcaccccagtgaactcatttcctccaccatttatagaggggaaccattcctcccgctggctgtatgaagcgatggctaaggcatgggagccgtggctgcctgccgaagccctacggaccctaagaattggaggcttttacgccttatccccttatcccggccttcgactgatatcattgaacatgaatttttgttccagagagaacttttggctcttaataaacagtactgatcccgccgggcagttacaatggctggtgggggaattgcaggccgctgaggatcgaggagataaagtgcatattattggccacatcccaccaggccactgcctaaagagttggagctggaattattaccgtatagttgcgcgttatgagaataccctcgctgctcagttctttggacacacccacgtcgacgaattcgaagtattctatgacgaagaaacactgagccggcccctggcggtggctttcctggcccccagcgcaactacttatattggcctcaacccaggatatagggtgtatcaaatcgacggcaattacagcggctccagccatgttgtgctggatcatgagacgtatatccttaacctcacacaggcaaatattccaggcgcaataccacactggcagttgctctacagggctcgggagacttacgggcttcccaacacactgcccactgcttggcacaaccttgtataccggatgcgcggcgatatgcagttattccaaactttttggttcttgtaccataaaggccatcccccatccgagccatgcggtaccccctgtagactcgcaactctgtgcgcccagctgtccgcccgggccgattccccagctctatgccggcacctgatgcctgacggatcgcttcccgaggcccagagcctttggcctcggcccctgttttgt

SEQ ID NO: 12120 - DNA, 1893 bp, Artificial Sequence
  derived and/or modified sequence
atgccacggtacggagcctcgcttcgccaatcctgtccgcggtccggaagggaacagggacaagatggaactgccggagcgcctggactgctctggatgggcctcgtcctcgccctcgccttggcactggcgcttgcgttggctctgagcgattcaagggtgctttgggcaccagcggaagcacacccgctgagcccgcagggacacccggcccgcctgcatcgcattgtgcccagactcagggacgtgtttggatggggaaatctgacctgtcccatctgcaaggggctgttcactgcaattaacctcggactgaagaaggagccgaatgtggcgcgcgtgggatctgtcgcgattaagctgtgcaatctccttaagatcgccccacccgcagtgtgccagtcgatcgtgcacctgtttgaggatgacatggtggaagtctggaggcgcagcgtgctttcaccatccgaggcgtgtggactcctcctgggatcaacttgtggacattgggatatcttctcctcctggaacatttccctgcccactgtcccaaagccaccaccgaagccaccgtcgccaccagccccgggagcgccagtgagcaggatcctcttcctcaccgacctccattgggaccacgattacctggagggtaccgatccggactgcgcagatcctctttgctgccgccgggggagcggactgccacctgctagccgcccgggtgccggatactggggagaatactcgaagtgcgacttgcctctccgcaccttggagtcgttgctgtccggtttgggaccggcaggaccgttcgatatggtgtattggactggggatatcccagcacatgacgtttggcaccaaaccagacaagaccagctcagagcgctgaccaccgtgactgcgctcgtgagaaagttcctgggtccggtgccagtgtacccagccgtgggaaaccacgagtcgacgccagtcaactccttcccgccgcctttcatcgagggtaaccatagctcccggtggctgtacgaagctatggcaaaggcgtgggagccgtggctcccagctgaagccctccggacgctgcgaatcggaggattttacgcactctccccctacccgggactgaggctcatctcactcaacatgaacttttgttcccgggaaaacttttggctcttgattaactctaccgaccctgccggacagctccagtggctggtgggagaactgcaagccgccgaggacagaggagacaaagtccatatcattggacacatccctcctggccactgccttaaatcatggtcctggaattactatcgcatcgtcgccaggtatgaaaacaccctggcagcacagttcttcggtcacactcatgttgacgagttcgaagtcttttacgacgaggaaactctgtctcggccactcgctgtggcgttcctggctccgtcggcgaccacctacatcggtctgaacccagggtaccgggtgtaccaaatcgacggcaattactcaggaagctcccatgtcgtgctggatcatgaaacttacatcttgaatctgacccaagccaacatcccgggcgccatcccgcattggcagctcctgtaccgggcccgcgaaacctacggactgccgaatactctcccgaccgcatggcataacctggtgtatagaatgcggggcgacatgcaactgtttcagacgttttggtttctctatcacaaggggcaccccccgtcagaaccatgcggtaccccatgtcggctggcaactctttgtgcgcagctctcagccagagcggattcccctgccctctgccgtcacttgatgccggatggaagcctccctgaggctcaaagcctctggccgcggccgctgttctgt

SEQ ID NO: 12121 - DNA, 1893 bp, Artificial Sequence
  derived and/or modified sequence
atgcctcggtacggcgcatcacttcgtcagagctgtcctagaagcggtagagaacaggggcaggatggaactgccggcgcgcccggactcctttggatgggtcttgtcctggcgctcgccctggcacttgcactcgccctcgcattgtccgattcgagagtcctttgggcacccgcagaagcacacccactgtctccgcaaggtcatcctgcgcgactgcatcggattgtccctaggctccgggacgttttcggttggggaaatcttacttgcccaatttgcaagggtctgtttacggcaatcaatctcggcctcaaaaaggagcctaacgtggcaagggtgggctcagtggctatcaagctgtgcaatcttcttaagattgctccccctgcagtctgtcagtcgattgtccatctgtttgaggacgacatggtggaggtctggcgacgctccgtgttgtcgccaagcgaggcatgcggacttctgctcggatccacgtgtggacattgggacatattctcatcatggaacatttccctgcctaccgtgcctaagcctccaccaaaacctccttccccaccggcaccgggcgcacctgtgtcacgcattctgttccttactgaccttcactgggatcatgactaccttgaaggaactgatcctgattgtgccgatccactttgctgtaggcgcggatccggtttgcctcccgcctcgcgccctggagcgggatactggggggaatacagcaagtgcgatcttccgttgcgaactcttgaatcccttttgtcgggactcggtccggcagggccatttgacatggtctactggaccggagatatccctgcgcatgatgtctggcatcaaactcgacaagatcagctcagagccctgaccaccgtgactgcacttgtgcgaaagtttctggggccagttcccgtgtaccctgccgtgggtaaccatgaatccacccctgttaattcctttccacctccattcatagaaggaaatcattcctcgagatggctttacgaggcgatggccaaggcatgggaaccttggctccctgctgaggcactgagaaccctcagaataggtggattttacgcgctttcgccctaccctggactccgactcatcagcctcaatatgaacttctgttcgagggaaaacttttggctgctgatcaattctacggacccagccggacaactgcagtggcttgtgggcgagctgcaagcagctgaggaccgaggagataaggtgcacataattgggcatattcctcccggacactgcctcaagtcatggtcgtggaactactacagaatcgtcgcacgctacgaaaatactctcgccgcacagttttttggccatacccacgtcgatgaatttgaagtgttttacgatgaggaaactctctcgcgccctctggccgtggccttcctcgctccctcggccaccacctacattggtctgaatcctggctacagggtgtaccaaattgatggcaactacagcggttcgtcccatgtcgtgttggatcacgagacttacatactgaacctgacccaggctaatatccctggagcaattcctcactggcaattgctgtacagagcacgggagacttatggccttcccaataccctccctactgcatggcacaatcttgtgtaccggatgagaggtgacatgcaactgttccagaccttctggttcctgtaccataaagggcatcctccatccgagccatgtggaaccccatgccggctggcgaccttgtgtgcccagctttcagcccgggcagattcaccagcactgtgtaggcatcttatgccggatggttcccttcctgaggcgcagtcgctgtggccccgtccactgttctgt

SEQ ID NO: 12122 - DNA, 1893 bp, Artificial Sequence
  derived and/or modified sequence
atgcccaggtacggggccagtttgcgccagtcctgtcctagaagtgggcgagagcaagggcaagatggaactgcgggtgcccccggtttgctgtggatgggtctggtcctggcgttggcgctggctctagcattggccctagccctgtccgattcgagagttttgtgggcgcccgccgaggcccacccactctccccacagggccacccagctcggcttcatcgcattgtgcccaggctacgcgacgtgttcgggtggggcaacctcacctgccccatctgtaagggcctattcacagctatcaacctgggacttaagaaagaaccaaacgttgctcgcgtaggctccgtggccatcaagttgtgcaacttgctaaagattgccccacccgccgtgtgccaatcaatcgtacatctgtttgaggacgatatggtggaagtgtggaggagatccgttctctcaccttccgaggcatgcgggttactcctgggctccacctgcggacactgggatatattttcctcttggaatatctccctccccaccgtgcctaagccacctccgaaaccaccaagccctcctgccccaggggcccctgtatccaggattctcttcctgacagatctgcattgggatcacgattatctagagggaaccgaccctgattgcgcggatcccctgtgttgcaggcgaggcagcggtttaccacctgcttctaggcctggggcggggtattggggcgaatacagcaaatgcgacctacccctccgcactctggagtccttgttaagcggtctgggacctgctggtccatttgatatggtgtactggactggagacattcccgcccacgatgtgtggcaccaaacgcgtcaggaccagttacgggcgctgaccactgtgacagccttggtgcgtaagttcctcgggccagttcccgtgtatccagcagttggcaaccacgaaagcactcctgtgaactcttttcctccaccattcattgagggaaatcacagcagtagatggttgtacgaggctatggccaaagcttgggagccatggttgccggcggaggctttgagaacactgaggatcggggggttttacgccctgtcgccctacccaggcttgcgcctaatctcgctgaacatgaatttctgctcccgtgaaaatttctggctgttgatcaactcaaccgaccctgccggccaactgcagtggctggtaggggaattgcaggccgctgaggaccggggggataaagtgcacatcattgggcacatcccccccggacattgtcttaagtcctggagttggaactactatagaatcgtggccagatacgaaaataccttagccgcccaattttttggacacacccatgttgacgagttcgaagtattttatgatgaagaaaccctgtccagacctctcgccgtcgccttccttgcaccgtctgcgaccacctacataggcctaaatccgggttacagagtctatcagatcgatggaaattactccggtagcagccacgtggtgctggaccatgaaacttatatcctgaacctgacccaggcaaacatccctggggcaattcctcactggcagttgctgtatcgagcgcgtgaaacatatggcctccctaacactttacctaccgcctggcataatctggtctaccgtatgagaggcgacatgcagctgttccagaccttttggttcctgtatcacaagggccaccctccaagcgaaccatgtggcactccttgtagacttgctactctgtgcgctcagctgtctgcacgcgcggattcgcctgccctttgcagacacctgatgccagatgggtctctgccggaggcgcagagtctttggcctcggccgttattttgt

SEQ ID NO: 12123 - DNA, 1893 bp, Artificial Sequence
  derived and/or modified sequence
atgccgcgatatggagccagcttacgccagtcttgcccccggtctgggcgggaacagggccaggatggtacagccggcgccccaggcctgctttggatgggcctggttctcgctctcgctttggccctcgcgctcgccctcgcactctcggacagccgcgtgctttgggctccggctgaggcccatcccttgtctcctcagggccacccagcccgcctccaccggatcgtcccccggctaagagatgtgtttggctggggcaacctcacctgccccatatgtaaggggctattcaccgctatcaacctcggactcaagaaagaacccaacgtggcaagggtgggatctgtggcaattaaactgtgcaacttgttgaagatcgctcccccagctgtctgccaatccatcgtgcacctctttgaagatgatatggttgaggtatggcgtcgtagtgtcctcagtccatcagaggcttgcggcctgctcctgggttccacctgtgggcattgggatatctttagttcctggaacatctcccttcctactgtgccaaaaccacccccaaaaccaccgagtccgcccgcccccggtgctcctgtctcaaggattttgtttttgactgacttgcattgggaccatgattatcttgaaggcacagaccctgactgtgcagaccctctgtgctgtcggaggggaagcggcctgcctcccgctagtaggccaggggcggggtactggggagaatacagcaaatgtgatctcccgttgcggacactggaatctttgcttagcggactgggacctgccgggcctttcgatatggtatactggaccggcgatattcctgcccacgatgtatggcaccaaaccaggcaggaccaactgcgcgccctaacaacggtcaccgccctggtaaggaaattcttagggcctgtaccagtctacccagcagtgggtaaccatgagtctactcctgtgaacagtttccccccgccattcatcgagggaaatcactcctcccggtggttgtatgaggcaatggccaaggcatgggagccatggctccccgcagaagccttgcggacactgagaatcggaggcttttacgcattaagcccctatccagggctcaggctgattagtctgaacatgaacttttgcagcagagagaatttctggctgctcatcaactcaaccgacccggccggccagttgcaatggctcgtaggcgaactgcaagctgccgaagaccggggggataaagtccatatcattggtcacatacctcctggacactgtttgaagagctggtcatggaactattatcggattgtagcccgatacgaaaatactctggcagcacagttcttcgggcacacccacgtggacgagttcgaagtgttctatgacgaagaaaccctgtctaggccccttgccgttgcctttcttgcccccagtgccaccacctacattggtttgaacccggggtaccgagtgtatcaaattgatgggaattacagcggctcctcgcacgtagtcctggaccacgagacgtacatcctgaacctgacacaggctaacatcccaggagcgatcccacactggcagctcctgtaccgcgcacgcgaaacttatggcctgcctaacaccctgcccacagcctggcataatctggtgtaccgcatgcgcggcgacatgcagctgtttcagaccttctggtttctttatcacaaagggcacccaccctctgagccttgcgggacgccttgcaggcttgctacactgtgcgctcagctctcagctagggctgacagtcccgcactgtgtaggcatctgatgccagatggaagcctgcccgaggcacagagcctctggccccgcccactgttctgc

SEQ ID NO: 12124 - DNA, 1893 bp, Artificial Sequence
  derived and/or modified sequence
atgccgcggtacggcgctagtctcagacagtcttgtccgaggagcgggagggaacagggacaggacggtacggcaggggcccccggactgctctggatgggcttggtgcttgccttggctctcgctttggcgttggccctggcactttcagattcccgagtgttatgggctcctgctgaagcccaccccctgagcccgcagggccaccctgcccgactgcatcgaattgtgccacggctgagagacgtgtttgggtggggcaatctgacatgcccaatctgcaaagggttgtttacagctattaacctcggcctgaaaaaagaaccaaacgtcgcccgggtcggttccgtagccattaaactttgtaatctactcaaaatagccccgcccgcggtgtgtcaaagcatcgttcacctgtttgaagacgatatggtggaagtctggcgtcgatccgtgctgtccccttcagaggcatgcgggttactgctcgggagcacttgcggacattgggacatcttctcgtcttggaatatctcccttcctaccgtccctaaaccacctccgaagccacctagccctcccgcccccggtgcacccgtgagccggattctgtttctcactgacttacactgggaccacgattatttggaggggacggacccagattgtgcagaccctttgtgctgcagaagagggtctggtctacccccagcaagtaggccaggggctggctactggggagaatattcaaaatgtgatcttcccctaaggacactagagagtctacttagcggcctgggtccggccgggccctttgacatggtctattggacaggagatatcccagcacatgatgtctggcaccagactcggcaggatcagctaagagccttgacaaccgtaacagctctggtgcgaaaattccttggacccgtcccggtttatcctgccgttggaaatcacgagtccacaccagtcaatagttttccaccccctttcattgaaggcaatcactcttcgcgctggctgtatgaagcaatggcaaaagcctgggaaccttggctgcccgcagaggcactcaggacactgcgaatcggtggcttctatgctttgtccccttacccaggcctgcgacttataagtttgaacatgaacttctgtagtcgcgagaacttctggctactgattaactcaaccgacccggcaggccagttacagtggctagtgggagagttgcaggccgccgaagaccgcggagacaaagtccatattattggccacattccgcctggccactgcctgaagtcttggagttggaattactaccgtatagtggctcggtatgagaacacactggctgcgcagttttttggacacacgcacgtagacgagtttgaagtgttctatgacgaggaaacattgtcccgacccctagctgtcgccttcctggccccaagcgctacaacttatattggcctcaatccagggtacagggtgtatcagattgacgggaattactccggaagctcccatgttgtgctggatcatgaaacctacatcctgaacttgacacaggccaacattcccggtgccatcccccactggcagctactctatcgagctcgtgaaacatacggcctgccaaatacattgcctactgcctggcacaatctcgtttatcgaatgcgaggcgatatgcagctgttccagactttctggtttctataccataaaggccaccctccatctgaaccgtgtgggacgccttgtagacttgctactctgtgcgcgcagctgagtgcaagggcagacagccctgccctgtgcagacatttaatgcctgacggtagtctacccgaggcccagagtctctggccgaggccgctgttctgc

SEQ ID NO: 12125 - DNA, 1893 bp, Artificial Sequence
  derived and/or modified sequence
atgccgcgctacggagcatctttgaggcagtcttgccccaggtccggtcgggagcagggacaggacgggacagccggcgcacccgggctgttgtggatgggcctcgtccttgcccttgctctggccttggcccttgccctggcactaagcgactcgcgggtcttgtgggcgcccgcagaagcccacccgctgtccccgcagggtcatccggcgcgtctgcaccgaatcgtgccccgcctgcgcgacgtgttcgggtggggaaacttaacgtgtcccatttgtaagggtctctttactgcaatcaatctcggcctgaaaaaagagcccaacgtggcccgcgtgggttccgtggcgatcaagctgtgcaatctcctgaaaatcgcgcccccggcggtgtgtcagagcattgtgcatctcttcgaggacgatatggtcgaagtgtggcgtcgcagtgtgttaagcccgtccgaagcttgcggcctattactgggttccacatgcggacactgggacatcttctcgagttggaatattagcctcccaacggtcccaaagccccccccaaagccaccttcaccgccggctcctggcgccccggtctcccggatccttttcctgaccgacctgcactgggatcacgactacctcgagggcacggacccggactgcgctgatcccttatgctgtcgccgtggaagcggcctcccccctgcctcccggcccggagccggttactggggggaatattcaaagtgcgacttacccctgcgcacgctggagagtctgctgtccggcctcggccccgccggcccgtttgatatggtctattggacaggtgacataccggcacacgacgtgtggcaccagacccgccaggatcagcttcgcgccctgactacggtgaccgccttggtacgcaaattcctcggcccggtcccggtctaccccgccgtgggcaaccacgagagtacccccgtgaactccttcccgccaccattcatagagggcaatcattcgagccgctggctatacgaggcgatggcaaaggcgtgggaaccctggctgcccgccgaggcactccggacactgcggataggaggattctacgcgctttcgccgtacccgggattgcgcctgatcagcctcaatatgaacttttgttcgcgagaaaacttctggttgctaatcaacagcactgatcccgcaggtcaactgcagtggttggtgggagagctgcaggcggcggaagataggggggataaggtacacatcattggtcacattccaccgggacactgtctaaagtcctggtcgtggaactactaccggatcgtggccaggtacgagaacacccttgccgcccagttctttggccacacacatgtggacgagttcgaggttttttatgacgaggagacactgtcgcgcccgctagccgtggcattcttggccccatctgccacgacctatatcggcctgaacccgggctacagggtctaccagattgatggcaactactccggaagctcacacgtcgtgctggaccacgagacttacatcttgaacctgacccaggccaacatccccggagccatacctcattggcagctgctatatcgcgcccgcgagacttacggcttgcccaatactctgccgacggcctggcataatctggtttatcgcatgaggggagatatgcagctgtttcagaccttttggtttttgtaccacaaaggacacccgcccagtgagccgtgcggcaccccgtgtcgactggcaaccctgtgcgcacagctgagtgcccgtgcagatagcccagcgttgtgtcgccatctgatgccagatggctcactgcccgaagcccagtcactatggcctcgtcccctgttttgc

SEQ ID NO: 12126 - DNA, 1893 bp, Artificial Sequence
  derived and/or modified sequence
atgccgaggtatggagcctcactccgccagagttgtcccaggtctggtagagaacaaggtcaagatggcaccgctggtgcccctggcctgctgtggatgggtctagttctcgcactggcactcgcactggccctagccctcgccctcagtgatagccgtgtgctttgggcaccggcagaggcacatccattaagcccccaggggcatcccgcaagactgcaccggatcgtgccccgattacgggacgtgttcggctggggcaatctgacctgtccaatctgtaaggggttatttaccgccatcaatctgggtttaaagaaggagccgaatgtggccagagtggggagcgtcgctattaaactatgcaatttgctgaaaattgccccaccggctgtctgccagtccatcgtgcatctgtttgaagatgacatggtcgaggtgtggcgaagatcagttctcagcccgagcgaagcctgcggccttctgttaggcagcacctgcgggcattgggatattttttcttcctggaacatctcactcccaactgtgccaaagccacctccgaaacccccctctcctcccgcccctggcgcccccgtctctcgcatactcttcctaactgacttgcactgggatcacgactatctggaaggcaccgaccctgactgtgccgacccactgtgttgtcgccgcggctcagggttaccccccgcgtcacgcccgggcgccgggtattggggggagtactccaaatgtgacttgccgctgaggaccctcgagagtctcttgagtggactgggtcctgcagggccctttgacatggtttattggaccggggacatccctgcccatgatgtgtggcaccagacccgccaggaccagctgcgagctcttaccacggtgacggccctcgtgcgcaagttcctgggtccagtgcccgtgtaccccgcagttggaaatcacgaaagcactccagtcaactctttcccacccccctttatagagggcaatcacagctcgcggtggctgtacgaagcaatggctaaggcatgggagccatggttgccagccgaagcactacgaacattgaggatcggcggtttttatgcgctgagcccctatcccggacttcgcctgattagtttgaacatgaacttctgttccagagaaaatttttggcttctgatcaacagcaccgatcccgccggccaactacagtggttggtcggtgagctgcaagctgccgaagacaggggggacaaggtgcatataattggacacattccgcccgggcactgtctaaagtcctggagctggaactattaccggattgtggcacggtacgagaacactctggcagcacagttctttggacacacgcacgtcgacgaattcgaggtgttttatgacgaggaaacactgtctcgtcctttggccgtcgcattcctcgcccccagtgctacaacatatatagggctcaatcccggctatagagtttatcagatagacggaaattacagcggaagttcccacgtagtgctggatcacgaaacatacatactgaatttgacccaggcgaatattcctggagccataccacactggcagctactttacagggccagagagacttatggtctgccgaacacacttcctactgcatggcacaacctggtttatcgtatgaggggagatatgcagttgttccaaactttctggttcctgtaccacaaagggcatccacccagcgaaccttgcggaaccccctgtcgcttggcaaccctgtgcgcgcaactgagcgccagggcagactctcctgcactctgtaggcacttgatgcctgacggatcactccctgaagcccagtccctatggccccggcctcttttctgc

SEQ ID NO: 12127 - DNA, 1893 bp, Artificial Sequence
  derived and/or modified sequence
atgcctagatacggcgcaagtctcagacagtcctgcccaagaagtggccgggagcagggacaggacggaacggccggtgcccccggactactctggatgggactcgtgcttgccttggctctagccctcgcattagccctcgccctcagtgatagcagggtgctgtgggccccagcggaagctcatcccctaagcccgcagggccatccagcccgactacacagaatcgtacctcgcctcagagatgtgtttggctgggggaatctcacctgccccatctgtaaggggctgttcacagcaattaatctggggttgaaaaaagagccaaatgtggcccgcgtgggaagcgtcgcaatcaagctctgcaacttattgaagatcgcgccccccgccgtctgtcagtctattgtccatctttttgaagacgacatggtggaggtctggaggcgtagcgtgctgagtccttccgaggcctgcggactcttgttagggagcacttgtggtcactgggatatcttttcatcttggaacatcagcctcccaacagtgcctaagccaccacccaagcccccatctccccctgctccgggggcccccgtgtccagaatattgtttctcaccgacctccactgggaccacgactatctggaaggaaccgatcctgactgtgccgatccactgtgctgcagacgcggctccggactgcctcccgctagccgacccggtgccgggtactggggagaatattccaagtgtgacttacctctccgaaccctggaatctctcctgtccggcttaggaccggcaggcccgttcgacatggtatattggaccggagatataccagcacatgatgtttggcaccagacccgccaagatcagctgagggctctgacaaccgtgactgcactggtgagaaagtttctcggccctgttccagtctatcctgctgtaggtaaccatgagtcaacaccagtgaactcgtttcccccaccttttattgagggtaaccactccagtcgatggctgtatgaggctatggccaaggcctgggagccttggttacccgcagaggctcttcgtactctgagaatcggcgggttctatgcactgtctccgtaccctgggttacgcctgataagcctgaacatgaatttttgttcccgggaaaacttctggctgctgatcaactctaccgacccggcaggccaattgcagtggttagtgggcgaactgcaggccgccgaagatcggggcgataaagtgcacatcatcggacacatcccaccagggcactgtctcaagtcctggtcttggaactactataggatcgtggctcgatacgaaaacaccttggccgctcagttcttcggacatacacatgttgatgaattcgaggtcttttatgatgaggagaccctgagtcggcccttggccgtggccttcctggcaccgagtgcgacaacctatattggtttaaaccctgggtacagggtttatcaaattgacggcaactactccggatccagccacgtagtgctggaccacgagacatacatcttgaacctgacccaggctaacatcccaggtgcgatccctcactggcagctgctttatagagcacgcgagacatacgggctgcctaacacactgcctacagcatggcataatctggtttatcgtatgaggggtgatatgcagctgtttcaaaccttttggtttttataccacaaggggcaccccccctccgagccgtgcggcaccccttgcaggttagccacactgtgcgcacagctgagtgcgcgtgccgatagccctgcgctttgtagacacctgatgccggacggcagcctgcctgaggcccaatcgttgtggcctcggccattattctgc

SEQ ID NO: 12128 - DNA, 1893 bp, Artificial Sequence
  derived and/or modified sequence
atgccacgatacggggcatccctccggcagagctgtccacgctccggacgggaacaaggacaagatggtactgccggcgccccagggctgctctggatgggacttgtgctggccctggcactggccctggcgcttgcgctggccctgtcggattcgcgcgtgctctgggcaccagccgaggcccacccactgtcaccgcagggacaccccgcccgcctgcacaggatcgtgccgagactgagggatgttttcgggtggggcaacctgacttgcccgatttgcaagggcttgtttaccgccatcaacctgggactcaaaaaggagcctaacgtcgcgcgggtgggatcggtggccattaagctgtgcaaccttctgaagatcgcgccgcccgctgtctgccagagcatcgtgcatctgttcgaggatgatatggtggaggtgtggagacggtcagtcctttctccgtccgaagcctgcggtttgctgctgggatcaacctgcggacactgggacatcttcagcagctggaacatttccctgcccactgtgccgaaacccccgcctaagccgccatcaccaccggccccgggagctccggtgtcccggattctgttcttgaccgacctgcactgggaccatgactatctcgagggaacggaccctgactgcgcggacccactgtgctgtcggcggggttcggggctgccgcctgcctcacgtcccggagcgggttactggggcgaatactccaagtgcgatctgccgctgagaacgctggagtcgctcctgtcgggattgggaccggccggaccatttgacatggtgtactggacgggggacatccctgctcatgacgtgtggcaccaaacccgccaggaccaacttcgagcactgaccactgtgaccgcgcttgtcaggaagttcctgggaccggtgccagtttacccggccgtggggaatcacgagtcgaccccggtgaatagcttcccaccgccgttcatcgaaggaaaccattcgtcgcgctggctgtacgaagctatggcgaaggcctgggaaccttggctgcccgctgaagcgctccgaactcttcgcattggtggattttacgccttgtccccatatcctggcctgaggctcatctccctcaacatgaacttctgttcgcgggagaacttttggctcctgatcaacagcactgacccagcgggacaactgcagtggcttgtgggagaactccaagctgctgaggatcgcggcgataaagtgcacattatcggacacatcccgccgggtcactgcctgaagtcctggtcatggaattactacaggatcgtggcccggtacgagaatacgctggcagcacagttcttcggacatactcatgtcgacgagttcgaggtgttctatgatgaagagactctttcccggccgcttgccgtggcctttctggcaccttcggctaccacctacatcggactgaacccgggatacagagtgtaccagatcgatggaaattactccggctcctcccacgtcgtcttggaccatgaaacctacatcctgaacctgactcaagctaacatccctggcgccatcccgcactggcagctcctctaccgggcgcgcgaaacctacggactgccgaacaccctccccactgcatggcataatctggtctacagaatgcggggggacatgcagctctttcagacgttctggttcctctaccataaaggccacccgccgtccgagccgtgtggcacgccctgccgcttggccactctgtgcgcccagctcagcgcaagggcggacagcccggcgctgtgccgccacctgatgcccgacggctcattgccggaagcacaatccctgtggccaaggccgctgttctgc

SEQ ID NO: 12129 - DNA, 1893 bp, Artificial Sequence
  derived and/or modified sequence
atgcccaggtatggagcatccctccgccagtcatgccctagaagcggtagggagcagggccaggatggtacagccggggcaccaggacttctctggatgggactggtgttggccctggctctggcccttgccttggcccttgcgctgagcgatagccgggtcctgtgggcaccagcagaagcccatcctctgagcccccaaggccatccagcaagactccaccgcatagtcccccggctgagagacgtgttcggctggggcaacctgacatgcccaatctgtaaggggctgttcaccgccattaaccttggtttgaaaaaggaacccaacgtggcacgggtgggatccgtggctatcaaactctgcaatctcctgaagattgcacctcccgccgtatgccagtctatagtgcacctttttgaagatgatatggtggaggtgtggaggaggtccgttctgtctccctcagaggcctgtggattgctgctgggcagcacgtgtggacactgggacattttttcttcctggaacatttccctgccgacagtcccaaagccaccacccaagcctcccagtccaccggcacccggcgctcctgttagtcgcatcctcttcttgaccgacctccattgggaccacgactacctggagggcaccgacccggactgcgctgaccccctttgctgtcgaagaggctcaggactgccccccgcatctaggccgggagctggctactggggggagtactcaaaatgcgacctgccactgcgaacccttgagagcttgctttccgggctcggtcctgctgggccatttgacatggtttattggactggcgacattccagctcatgacgtttggcaccagacaaggcaagatcaattgagggccctgaccaccgtaacggctctggtgagaaaatttctgggacctgtacccgtctaccccgcggtgggcaaccacgagtccacccctgtgaactcatttccccctccctttatcgaggggaaccattcatcccggtggctctacgaggccatggctaaggcgtgggagccctggctgcccgccgaggccctgagaacgctgcgcatcggcggattctacgccctgtccccttacccgggactgagattgatatcactgaatatgaatttctgttctcgggagaacttttggttgctcatcaatagtacagatccagccgggcagctgcagtggttggtgggtgagcttcaagctgccgaggaccgcggcgataaggtgcacatcatcggccatattcccccagggcattgcctgaaaagttggagctggaattattaccgcattgttgcacgatatgagaacaccctggcggcccagtttttcggccatacacatgtggatgaatttgaggtgttttatgatgaagaaaccttgagccgccccctcgccgtcgcatttctcgccccaagtgcgacaacatatatcgggttgaaccctggataccgcgtttaccagattgatgggaattactccggaagctcccatgtggttctggaccacgaaacatatatcctgaatctgactcaggccaatattcctggcgccatcccccactggcaattgctgtacagggcacgggagacgtacggccttcctaatactctcccgacagcctggcataacctggtgtataggatgcgcggagacatgcagttgtttcagacgttttggtttctgtaccataaaggtcaccccccatctgagccatgtggaactccgtgcaggcttgcaaccttgtgcgcccagctttccgcccgagcggactctcccgctttgtgtcgacatctgatgccagatggttctctgcccgaggctcagagtctctggccccggcccttgttttgc

SEQ ID NO: 12130 - DNA, 1893 bp, Artificial Sequence
  derived and/or modified sequence
atgcctagatacggagcatcgttgagacaatcgtgtccaagaagcggcagggagcaaggacaagatggcactgcaggtgcaccaggccttctgtggatgggtttggtccttgcgcttgcactggcactggcccttgcactggctctgtccgattcaagggtcctgtgggctcctgctgaagcccaccctctcagccctcaaggccatcctgcccggctgcacaggattgttccacgcctgagagacgtctttggatgggggaatcttacttgccctatctgcaaaggactgtttactgcaatcaatctgggtctgaagaaggaaccgaacgtggcgcgagtgggaagcgttgcgattaaactttgtaaccttctcaaaattgcgcctcccgcggtgtgccagtcaatcgtgcacctgtttgaagatgacatggtggaagtttggagacgcagcgtgctttcaccaagcgaagcctgcggccttcttctcggaagcacctgtggacattgggacattttctcgtcctggaacatctcacttcccactgtgccaaagcctccccctaagcccccgagcccaccagcaccgggcgcgcctgtgtcacgaatcctgttcctcaccgacctccattgggatcatgattaccttgaaggtaccgatccggattgcgccgatcccctctgttgcagacgcggatccggtttgcctccagcatctcggccaggcgccggatactggggcgagtactcgaagtgcgatcttccccttagaacccttgagagccttctttcaggactgggacctgcagggcctttcgatatggtgtactggactggagacattcccgcgcacgatgtgtggcatcaaaccagacaagaccaactgcgcgcactgaccactgtgacggcactggtgagaaaattccttggaccagtgccggtctaccctgcagtggggaatcatgaatccacccctgtgaacagctttcctcccccattcatcgaaggaaatcattcaagccggtggctctacgaggcaatggcaaaggcatgggaaccgtggctgccagcggaggctctgagaacgctgagaattggaggcttttacgcgctttccccataccctgggcttcgtcttatttcccttaacatgaatttctgctccagggaaaacttttggcttttgataaactcaaccgaccccgcaggtcagcttcaatggttggtgggcgaactccaggcagctgaggaccggggagacaaagtccacatcattggtcatattcctccagggcactgtctgaagtcctggtcttggaactactacagaattgtagctcgatacgaaaatactcttgccgcacagttttttggacatacccacgtggatgagtttgaggtgttttacgacgaagaaaccttgtccagacccctcgccgtggcctttctggcaccatcggcgaccacttacatagggctcaaccccggataccgcgtgtaccagattgacggtaactactcgggatccagccacgtggtcctggatcatgaaacttacattctcaatcttactcaggccaacataccaggagctatccctcactggcaactcctgtaccgcgcgcgcgaaacgtacggactgcccaacaccctccctaccgcgtggcataacctcgtgtaccggatgcgcggagatatgcagctgttccagactttctggtttctgtaccacaagggacacccaccttcagaaccttgcggtactccatgtcgtctcgcaactctctgtgctcagctctcggcacgcgctgattcacccgccctgtgtagacatcttatgccagacggatccctcccagaagcacagtccttgtggccgcgccctttgttctgt

SEQ ID NO: 12131 - DNA, 1893 bp, Artificial Sequence
  derived and/or modified sequence
atgcccaggtacggtgcatctctgcggcagagctgcccacggagcggtcgggaacaaggtcaggatggaaccgctggagcaccgggattgctgtggatggggcttgtgcttgcactggccctcgcccttgcactcgcgctggcacttagcgattccagagtgctctgggcacccgccgaggcacatcctctgtcgcctcaggggcatccagcaagactccatcgcattgtgccacgattgcgggacgtctttgggtggggaaatctgacgtgtcctatatgtaagggactcttcactgccatcaacctcggcctcaagaaagagcctaacgtggcaagagtggggtccgtggcaatcaaactgtgcaacttgctgaagatagcaccacctgcagtttgccagtcaatcgtgcacctgtttgaagatgacatggtggaagtgtggagacgttcggtgctctccccaagcgaggcatgtggtcttttgcttggcagcacctgcggacactgggatatctttagcagctggaacatcagccttccaactgttcctaagcctccgccgaaaccccctagcccacccgccccgggagcccctgtgtcgaggatcctgtttctgaccgatcttcattgggatcacgattacctggaaggcaccgatccagactgtgcagatccactgtgttgtcgacgcggaagcgggcttccgcctgcaagccgacctggagcaggatattggggggagtactcgaagtgtgacctccccctgagaacgctggagtcattgctctccggtttgggtccagcgggcccattcgatatggtgtactggaccggagatatccctgcccacgacgtctggcatcagactagacaggatcaattgcgtgctttgaccaccgtgaccgcacttgtgcgtaaattccttggtccagttccagtctatcctgcagtgggtaaccatgagtcaactcccgtgaattcatttcctccaccatttatcgagggcaaccactcctcgcgctggctttacgaagcaatggccaaggcgtgggagccatggctgccagccgaagccctgagaaccctgcggatcggcggcttttacgcgctgtctccataccccggactgcggctgatctcgctgaacatgaacttttgttcgagagaaaacttttggctcctgattaactcaactgatcctgcaggtcaacttcaatggctggtcggtgaactccaagcagctgaagataggggagataaggtccacatcattggacacatccctcctggccactgtcttaagagctggtcgtggaattactacagaattgtagcaaggtacgaaaataccctggcagcacagtttttcggacatactcatgtggacgaatttgaagttttctacgacgaggaaactcttagcaggccgcttgccgtggccttcctcgccccatccgcgactacttacatcggccttaacccaggctatcgggtgtaccagatcgatggaaactattccggatcgagccatgtcgtgctggaccatgagacgtacattcttaatctcacgcaagcaaacatcccgggggcaatcccccattggcaacttctgtacagagcacgggagacttacggacttcccaatacccttccaaccgcatggcataatcttgtgtacaggatgcgtggtgatatgcagctctttcaaactttctggttcctttaccacaaaggtcatcccccatctgaaccatgtggaaccccttgccggctcgcaaccctgtgcgcacaactctcagcacgggcggattccccagcgctttgcaggcatcttatgccggatggaagcctcccagaagcccagtccctttggcctcggcctctcttttgc

SEQ ID NO: 12132 - DNA, 1893 bp, Artificial Sequence
  derived and/or modified sequence
atgcccagatatggggccagtctccgtcagtcctgccctagatcagggcgggaacagggtcaggatggtacagcaggagcgcccggactactttggatgggtctggtgctcgctttagcactggcattagctcttgctcttgcactgagcgatagccgtgttctgtgggctccggccgaggctcatccccttagcccacaggggcacccagcaagactgcatagaattgtgccacgtcttagggatgtattcggttggggtaatttaacctgcccaatctgtaagggactttttacagccatcaacctcgggctcaaaaaggaacccaatgtggcaagggttggaagcgttgcaataaaactgtgtaaccttctgaagattgccccacctgctgtgtgtcagagcattgtacaccttttcgaagatgatatggtcgaagtatggcgccgtagtgtactgtcaccatccgaggcatgcgggcttctcttgggtagtacgtgtggccattgggacatcttctcctcatggaatatttcactgcccacagtacccaaaccccctcccaagccaccttctcctccagcaccaggagctcccgtatcaaggatcctgttcctgactgatcttcactgggaccacgactatctggaggggaccgacccggactgtgcagacccgctctgttgtagacgtggaagcggactgccccctgcctccaggcccggagccggttactggggtgaatactctaaatgtgaccttccacttagaactctggaatctctgctgtctggacttggcccagcgggcccatttgacatggtctattggacaggagacatccccgcgcacgatgtgtggcatcaaaccaggcaggaccagcttcgggctctcacgacagtgaccgccctggtgcgaaaattcttgggccctgtgcctgtttacccggcagtgggcaaccatgagtctacccctgtgaacagctttcctcccccatttattgaaggcaatcatagtagccggtggctgtatgaggctatggccaaggcctgggaaccctggttgcctgctgaagcccttcgaacgctgcgcatcggcggcttttacgctctgagtccataccctggtctccgcttaatttcccttaatatgaacttctgcagccgcgagaacttctggttgctgatcaacagcactgaccctgccggccagctccagtggcttgtaggagaactgcaggccgccgaggacagaggtgacaaggttcatattatcgggcatataccacccggacactgtcttaaatcctggtcatggaattactatagaatcgtggccagatacgaaaatactttagccgctcagttctttggacacacccatgttgacgaattcgaagtgttctacgacgaagaaacactgtcgcgccccctggcggtggcttttctggctccaagtgccacaacctacattggattaaatcctgggtaccgggtttaccaaatcgacgggaactacagcggatcctctcatgttgtgctggatcacgagacctatattctgaatctcacacaggccaacatcccaggggctatcccccactggcagcttctgtacagggcacgggagacctacggcttgcctaatacactgcccacagcctggcacaatctggtgtatcgcatgcggggggacatgcagttgtttcagactttctggtttctctaccataagggccaccccccttctgagccctgcgggaccccgtgtcggctggctaccttgtgcgcgcagctgtctgctcgggcagattccccggccctgtgtcgacatctgatgccagacgggtccttgccagaggcacagtccctctggccacgccctttgttctgt

SEQ ID NO: 12133 - DNA, 1893 bp, Artificial Sequence
  derived and/or modified sequence
atgcctaggtacggagcaagtctgagacagtcttgtcctcgcagtggccgggagcagggccaggacggcacagccggtgctccaggcctgctgtggatgggtctcgtgctggcgttagcactggctttggctcttgccctggctctttccgatagtagagtgctgtgggccccggcggaggcgcacccgctgagtccccaggggcatcccgctcggttgcacagaattgtgcctcgcctgagagacgtgtttggatggggtaacctgacatgcccaatttgcaaaggacttttcactgcaataaatctcggcctgaagaaggagccaaatgttgcgagagttggctctgtggctattaaactgtgtaatctgctgaaaattgcgcctccagccgtgtgtcagtcaatcgtgcatttgttcgaggacgacatggtggaggtttggagaaggtctgtgctgtccccttcagaggcctgtgggttattactgggcagcacatgtggacattgggacatcttctccagctggaatatcagtttgccgactgtacccaagccaccgcctaagccacccagtccccctgcaccaggtgctccagtctcccggatcctgtttctgactgatcttcattgggaccacgactatctggagggtaccgatcccgactgtgctgaccctttgtgttgccgccggggcagtggcctcccaccggctagcaggcctggtgccggttactggggcgaatatagtaagtgcgacctccctcttcggacattggaatcactcctgagtggactgggccccgccgggccatttgatatggtgtattggactggcgacatccccgctcacgatgtttggcatcaaacgaggcaggatcagttgagagcgctgacgacagtgactgccctggtacgcaaatttctgggtccagtgcctgtgtaccctgccgtgggtaaccacgagtccacgcccgtcaattccttcccaccaccgttcattgaagggaatcactcctctaggtggctctatgaggcgatggccaaagcctgggagccatggttgcccgcagaagccttaaggactttgaggattggagggttttacgcattgagcccctacccaggcttacggctcataagtttaaacatgaacttttgcagccgtgaaaatttttggcttctcattaacagtaccgatcctgctggacaactacagtggctggttggcgaactgcaggctgccgaagacaggggagacaaagttcatataattggccacatcccgcctgggcactgccttaagagttggtcatggaattattaccgcatcgtggctaggtacgagaacactttggccgctcagttcttcggacatactcacgtcgacgaattcgaggtgttctatgacgaagaaactctgagccgccccctggcagtcgcctttttggccccgtcagccaccacttatatcggattaaatccagggtaccgtgtgtatcaaatcgacgggaattacagcggttcctctcacgtcgtgcttgatcatgaaacgtatatcctgaacctgactcaagcgaacatacccggcgctatcccccactggcaactgctctatcgggctagggaaacttatggcttgccaaatacgttgcccactgcgtggcataatctggtatacaggatgcgcggagatatgcagctgttccagacattttggttcttgtaccataaaggacacccgccctcagagccatgtggcaccccctgccgcctcgccactttgtgcgcccaacttagtgcacgggcagattcacccgccctgtgcaggcaccttatgcccgatggatctttgcctgaggcccaatccttgtggcccaggccactcttctgt

SEQ ID NO: 12134 - DNA, 1893 bp, Artificial Sequence
  derived and/or modified sequence
atgccgaggtacggcgccagcctgcgccaatcctgcccgcggtccgggcgcgagcagggacaagacggaaccgctggagccccagggctcctgtggatgggcctggtgctggcacttgccctggcgctcgcactggcccttgccctctccgatagccgcgtgttgtgggcgccggccgaggctcaccctctgtcaccacaggggcatcccgcgcgtctgcacagaatcgtgccgcgcttgagagatgtgttcggctgggggaacctgacttgtccgatctgcaaaggcctgttcaccgcgatcaatctgggcctcaagaaagagcccaacgtggccagagtgggatcggtcgcgataaagctgtgtaatcttctgaagatcgctccaccggctgtgtgccagtcgatcgtgcatctcttcgaggacgacatggtggaggtgtggaggcgcagcgtgctgtcacctagtgaggcttgcggccttcttctgggctcaacctgcggacattgggacatcttcagctcgtggaacatctcgctgccaaccgtgcctaaaccgccgccgaagccgccgtctccccctgccccaggagctccggtgtcgagaattttgtttctgaccgacctccattgggaccatgattacctggagggtaccgacccagactgcgcagatccgttgtgttgccggcgtggatccggtttgccccctgcctcaagaccaggagcaggatactggggggaatattcgaagtgcgacctgccactgcgcaccctcgaatcactgctgtcgggactggggccagcgggtccgtttgatatggtgtactggaccggagatatacctgcacacgatgtctggcaccagactcggcaagaccagctcagggcccttaccactgtgactgcattggtgagaaagttcctcggaccagtgccagtgtatcccgccgtcggaaaccatgagagcaccccggtcaattcctttccccctccgttcattgaaggcaaccactcatcgaggtggctgtacgaagctatggccaaagcgtgggaaccctggctgccagccgaggccttgaggaccctcagaatcggcgggttctacgcgctgtcaccgtaccctggcttgcgcctgatctctctgaatatgaacttctgctcgcgggagaatttctggcttctcattaactccactgatcccgccggacagctgcagtggcttgtcggagagctgcaagccgccgaggaccgtggcgacaaggtgcatatcattggacacatcccgcccggacactgtctgaagtcgtggagctggaattactaccggatcgtcgcccgctacgagaataccctggcggcacagttttttgggcacactcatgtcgacgagtttgaggtcttttacgacgaggaaactctgtcgcggccacttgcagtggccttcctggcaccgtcggctactacctatatcggattgaatccaggctaccgggtgtaccagattgatggaaactatagcggatcctcgcacgtggtgttggaccacgaaacctacattcttaacctgacgcaagcaaacatcccgggagccatcccgcattggcagctgctctaccgcgcacgggagacgtacggcctgcctaacaccctgcctaccgcgtggcataatcttgtctaccgcatgcgcggagacatgcagctgttccagactttctggtttctttaccataagggacacccgccgtcagaaccctgcggtaccccatgccgcctggcgactctttgcgctcagctctcggcgagagcagatagcccggccctgtgcaggcatctgatgccggacgggtccctgccggaagcccagagcctgtggccaagaccactcttctgt

SEQ ID NO: 12135 - DNA, 1893 bp, Artificial Sequence
  derived and/or modified sequence
atgccacgttacggggcgagcctgagacaatcttgtccccgtagcgggagagaacaagggcaggacggcaccgctggagctcctggcttactgtggatgggtctggttctcgccctggcgttagcacttgctcttgctcttgccctcagcgattctcgtgtcctttgggctcccgctgaggcccaccctctcagcccccaagggcacccagcgcgtctgcataggattgttcctaggctgcgcgacgtctttgggtggggtaatctgacatgcccaatttgcaaggggttatttaccgccatcaacctgggcctgaagaaggaacctaatgttgcacgggtagggtctgtggcgattaaactttgcaacctgctcaaaattgccccaccagcagtgtgccagtcgatcgtccatctctttgaagacgacatggttgaagtctggcgcaggagcgttctgagcccttcagaagcctgtggcctgttgttgggaagcacatgcggacattgggatatattcagctcctggaacatctcgctgccaaccgtacctaagccaccacccaagcccccttcacctccagcccccggcgccccagtgtcacggatcctgttccttaccgatttgcactgggaccatgattacttggaaggaaccgaccccgactgtgctgacccactttgttgtcggcgtggtagcggcctgccgcctgccagccgcccaggagccggctattggggagaatacagcaagtgtgatctgcctttgagaacactggaatccttactttcagggctggggccagctggaccattcgatatggtttactggaccggggatatccccgcccatgatgtgtggcaccaaacccgccaggatcaactccgcgctctcaccacggttacagcactcgtccgcaagtttctgggtccagtgcctgtgtacccagcggtgggcaaccacgagagtacacctgtcaacagtttcccaccacccttcatcgaaggcaaccattcatcgcggtggctgtacgaggctatggctaaggcatgggagccctggctgcccgctgaggctctgagaactttgcgaattggcggattctatgctctttcaccatatcccggcctgcgccttatcagcctgaacatgaacttctgtagtcgcgaaaatttctggttactcatcaacagtacagatccagccgggcaactgcagtggctggtcggagaacttcaggccgcagaggatagaggcgataaagtgcatatcattggccacattccccctggacattgcctcaaatcatggagctggaactattacagaatcgtggctcgatacgagaatacgctggcggctcaattttttggacacacacacgtggatgagtttgaggtattttacgacgaagagaccttgagcaggccattggctgttgcattcttggctcctagcgctactacctacatcggcctgaaccccggctaccgcgtgtaccaaatcgatggaaactacagtggctcctcccatgttgtcctcgaccatgagacctatatccttaatctgacccaggcaaatattccaggagccattcctcattggcagttgctgtacagggctcgggaaacatatggcctgccgaacactctgccaaccgcctggcacaacctggtttatcggatgagaggcgacatgcagctctttcagacattctggttcctgtaccacaagggacaccccccttccgagccctgtggcactccctgcagactggcaaccctgtgcgcccagctttccgctagagcagactcccctgctctgtgcagacaccttatgcccgacgggagcttacctgaagcacagtccctctggccgcgccccctgttttgc

SEQ ID NO: 12136 - DNA, 1893 bp, Artificial Sequence
  derived and/or modified sequence
atgcccagatacggagcctccctgagacagtcctgtccgcgttccggacgcgaacagggacaagatggcactgccggcgcacccggtctgctctggatgggactggtgctcgcgctggcgctcgccctcgccctggctcttgctctgtccgattccagggtgctctgggcgccggcggaggctcaccccctgagcccacagggacaccctgcccgcctccacagaattgtgccacggctcagagacgtgttcggatgggggaacctcacctgcccgatctgcaagggactgttcaccgctatcaatcttggactgaagaaagagccgaatgtggcgcgagtgggaagcgtggcgattaagctgtgcaatctgctgaaaatcgcgccgcctgcggtgtgtcagtcaatcgtgcatctgttcgaagatgacatggtggaggtgtggagaaggtccgtgttgtcgccgtccgaggcttgcgggctgctgctcgggtcgacctgcggacactgggacatcttcagctcttggaacatctccctgcctaccgtgccgaaaccgccgccgaagccaccgtcaccgccggccccaggagcgcctgtctcacggatcctgttcctcaccgatctgcactgggaccacgattaccttgagggaaccgatccagactgtgccgacccgttgtgttgccgccggggtagcggactgccaccggcctccaggccgggagccgggtactggggggagtattccaagtgcgatctcccgctgcgtactcttgaatcgctcctgtcgggattgggccccgcaggaccatttgacatggtctactggacgggagacatcccagctcatgacgtctggcaccagactcgacaggatcagcttagggcgctcaccactgtgaccgcactggtcagaaagttcctgggtccggtgccggtgtatccggccgtgggaaaccatgaatcgacccctgtgaactcctttccaccacctttcatcgagggcaatcactcgtcgaggtggctttacgaggcaatggcgaaggcctgggagccgtggctgccggcagaagccctgcggaccctgcggatcggaggcttttacgcgctcagcccttatcctggacttcggttgatctccctgaatatgaacttttgctcgcgggaaaacttctggctcctgatcaattcgaccgaccctgctggacagctccagtggttggtcggagagctccaggccgccgaagataggggagacaaggtccacatcatcggacatatccctcccggccattgcctgaagtcctggtcatggaattactaccggatcgtggcaagatacgaaaacactctggcggcgcagtttttcggtcacacccatgtcgatgagttcgaagtgttctacgacgaagaaactttgtcccgccctctggcggttgctttcctcgcaccttccgcaactacgtacatcggactgaaccctggttatcgggtgtaccaaatagatggtaactacagcggctcgtcacatgtggtcctcgaccacgaaacctacatcctcaatctgactcaggcgaacatccccggggcaatcccacactggcagttgctgtaccgcgcccgggaaacctacggcctcccgaatacccttcccaccgcctggcataatcttgtctaccgcatgcggggtgacatgcagctgttccagactttctggtttctgtaccataagggacacccacctagcgagccatgcggtactccgtgcaggctcgcgactctgtgcgcgcagctttcggccagggcggacagcccggctttgtgtaggcatctgatgccggacggctcgctgccggaggcccagagcctgtggccgcggccgctcttttgc

SEQ ID NO: 12137 - DNA, 1893 bp, Artificial Sequence
  derived and/or modified sequence
atgccgcgctacggagcatcacttcggcagagctgtccaagatcaggtcgcgagcaggggcaagacggaacggccggtgccccaggccttctttggatgggtctggtgctggcattggcactggcccttgcattggcgctcgcactgtcggacagccgtgtcctgtgggcacctgcggaggcccacccattgtctcctcaaggacaccctgcgagattgcacaggattgtgccaagactccgtgacgtctttggctgggggaacctgacctgtcctatatgcaagggtctttttaccgcgattaacctcggacttaagaaagagcccaacgtggcccgggtcggaagcgtggcgattaagctctgtaatctcctgaaaatcgcccctcctgcagtgtgtcaatcgattgtgcatctttttgaggacgacatggtggaagtgtggcggcggtcggtcctttcgccatcggaggcttgtggtctgctgcttggttcaacctgtggtcattgggacattttctcctcatggaacatctcgctgccaaccgttcccaaaccgccacccaaaccaccttccccaccggccccaggcgctccggtttcccggatccttttcctcactgaccttcattgggatcatgattacctggaaggcactgatcctgactgcgccgacccattgtgttgccgtcgtggatcaggacttccacctgcatcccgccctggcgcaggatactggggagaatattctaaatgcgatctgcctctgaggactctggaatccctgctttcggggcttggccctgcaggtcctttcgacatggtctactggacgggagatattcccgcacatgatgtctggcaccagactcgacaggaccagttgagagcacttactactgtgaccgcactggtcagaaaattccttggtcctgtgcctgtgtaccctgccgtcggtaatcacgaatcaactccagtgaattcctttccacctcctttcatagagggtaatcactcctctcggtggctttatgaggcaatggcaaaggcctgggaaccctggcttccagccgaagcgctgagaacccttaggatcggaggcttctacgcactttcaccctaccccggactccgattgatttcacttaacatgaacttttgttcgcgggagaacttttggctcctgattaactctactgatccagcaggtcaactgcaatggcttgtgggtgaactgcaggcagcggaggacaggggagacaaggtccacatcattggtcacatccccccagggcattgtcttaaatcatggagctggaattactaccgaatcgtggcaagatacgaaaacaccctcgccgcacaattctttgggcacactcacgtcgacgaattcgaggtgttttacgacgaagagactctgtcgcgtcccctggcagtggcgttccttgcgccttccgcgaccacctacataggactgaatccaggatacagagtgtaccaaatcgatggtaactactcgggatcgtcgcacgtggtccttgaccatgaaacttacatcttgaacctgacccaagcaaacattcccggggccattcctcattggcaactcctgtaccgcgcaagagaaacctacggacttccaaacaccctgccgactgcttggcataacctggtctaccgaatgcgcggagacatgcagctgtttcagaccttttggtttctctaccacaaggggcatcccccatcggaaccttgtggaactccctgtagactcgcaaccctttgtgcacagttgagcgcaagagcagattcgccagcgctttgtaggcatcttatgcccgacggaagcctgccagaagcccagtccctgtggccccgccccctcttttgc

SEQ ID NO: 12138 - DNA, 1893 bp, Artificial Sequence
  derived and/or modified sequence
atgcccaggtatggggcctcccttagacagtcctgtcctcgcagtggacgcgaacagggacaggacggaacagccggggctcctggactcttatggatggggcttgtgctcgccctagccctcgcacttgctttggccctggccctctctgattctcgagttttgtgggcaccagccgaagcccaccccttatcaccccagggacacccagctagactacatcggattgtgcctaggctcagggatgtgtttgggtggggaaatctcacatgtcccatttgcaaagggctgttcactgccatcaacctcggactcaaaaaggaaccaaacgtggccagggttggatctgtcgctatcaagctgtgtaatttgctaaaaatcgctcctcccgctgtctgtcagagtatcgtgcacctgttcgaagatgatatggtggaagtttggcgcagatccgtcctgtccccctccgaagcatgtggactcctgctagggtccacatgtggacattgggatatattctcttcttggaacatttctctgcctactgtcccaaaacccccacccaaacctccatctcctcccgccccaggagccccagtgtccagaatattgttccttactgacctccactgggatcatgattatcttgaaggaactgatccagattgtgccgatcccctttgttgtcgccggggatcgggattacccccagcgtctcggccaggggctggatattggggggaatactccaaatgcgacttacccctaagaacgctggagtcattgctttcggggctgggacccgctgggccattcgatatggtttattggactggggatatccctgcacacgatgtctggcaccagacaagacaggaccagctgagagctctcactacagtcacagctctggttagaaaatttctagggcccgtgcctgtctatcccgccgtgggaaaccacgagagtacacccgtgaacagttttcctccccccttcatcgagggaaaccattcctccagatggttgtatgaggcaatggctaaagcctgggaaccttggctccccgccgaggccctccggacattaagaatcggagggttttatgccctctctccctatccagggctgagacttatatcattgaatatgaacttttgttctcgggaaaacttctggctactcataaactcaacagaccccgccgggcagcttcagtggctggttggagaactccaggcagccgaagatcgcggggataaagtccatatcatagggcatatccctcccgggcattgtctcaaatcatggagttggaactactatcgaattgtcgcaagatacgagaatactctagctgctcaattcttcggacatacacatgtagatgaatttgaagtgttttacgatgaagaaacactctctcgacccctcgcggtggccttcctagcaccctcggctacaacatacatcggactcaaccccggatatagagtataccagattgatggaaattactccgggtctagtcatgtggtgttggatcacgagacttacatactgaatttgactcaggctaacatacctggagcaatacctcactggcagctgctctatcgggccagggaaacttacggactgcccaacactctgcccactgcctggcataaccttgtttatagaatgagaggagatatgcagctcttccagacattttggttcctataccacaagggacaccccccgagtgaaccttgtggaacaccatgtcggctcgcaactctctgcgctcagctctccgcgagggctgattcccctgctctgtgtagacacttaatgcctgacgggtcactgcctgaagctcagtctctttggccaagacccctcttttgt

SEQ ID NO: 12139 - DNA, 1893 bp, Artificial Sequence
  derived and/or modified sequence
atgcctcgatacggagcttcgctcagacagagctgccctaggtctggacgggaacaaggacaggatggcactgccggagcaccgggattgttgtggatgggactcgtgcttgctctggcactggccctcgcgctcgcgctggctctgtcggactccagggtgttgtgggcccctgcggaggcccacccgttgtccccccaagggcaccctgcacgactgcaccgcatcgtgccccgcctgagagatgttttcggctggggaaatctgacctgccctatttgtaagggtctgttcaccgcaatcaatctgggactcaagaaggagcctaacgtggcccgcgtcggttcagtcgcaatcaaactttgtaacctcctgaagatcgcaccaccagccgtatgtcaatcaatcgtccatctctttgaagacgatatggtggaggtctggcgccgctcagttctgagcccatcagaggcgtgcggactcttgctgggctcaacttgcggtcactgggatatcttctcctcctggaatatttccctcccaaccgtgcccaagccccctccaaagccaccgtccccaccggctccaggagcacctgtttcgcgtatccttttcttgaccgaccttcattgggatcatgactacctggaaggcactgatccggactgcgccgaccctttgtgctgtcggcggggcagcggactgccacctgcttcacggcccggggccggttactggggagaatacagcaagtgcgacctgccgctgcggaccttggaatctctcctctcgggactgggcccagcgggcccgtttgatatggtgtattggactggagatatcccggcccacgacgtgtggcaccaaactagacaggaccaactccgagcactgacgacggtgaccgccctggtgcgcaaattcctggggccggtgccggtctaccctgcagtaggaaatcatgagagtaccccggtcaattcctttccaccgccgttcatcgagggaaaccattcttcaagatggctctacgaggcaatggctaaggcctgggagccgtggctcccggctgaagctctgagaactttgcgcatcgggggattctacgcgcttagcccgtacccaggactgcgcctcattagcctgaacatgaatttttgctcccgcgagaatttttggctgctgatcaactcaaccgaccccgccggtcagctgcagtggcttgtgggcgaactgcaggccgcggaggatcgtggcgacaaggtccatatcataggtcatatccctccgggccactgcctgaaatcgtggagctggaattactacagaatcgtggcccgttatgaaaacaccctggctgcgcagttcttcggtcatacccacgtcgacgagtttgaggtgttctatgacgaagaaactctgtcgaggccgctcgccgtggccttcctggccccgtccgccaccacgtacattgggctgaaccccgggtacagagtctaccagatcgatgggaactactcgggatcctcgcatgttgtgctggaccacgaaacgtacattctcaacctgactcaagcgaacatcccgggagcgatccctcactggcagttgctgtaccgcgcaagagaaacttacggactcccgaacaccctgcctaccgcgtggcacaacctcgtctaccgcatgagaggagatatgcaactcttccagaccttctggttcctgtaccacaaaggacacccgccgtcggaaccatgcggtactccatgtagactggcgaccctgtgcgcccagctgtctgcgcgagcagactccccggcactgtgcagacacctcatgccggatggcagtctcccagaagcccagtcactttggccgcggcccctgttctgc

SEQ ID NO: 12140 - DNA, 1893 bp, Artificial Sequence
  derived and/or modified sequence
atgccgagatacggtgcctcgctgcggcagtcgtgtccacggagcggaagagaacagggacaggacgggaccgcaggggcaccgggacttctgtggatggggctggtcctcgccctggcacttgcacttgcattggcacttgcgctttcagattcacgagtgctgtgggcaccagccgaagcacaccccctcagcccgcaaggacacccggcaagattgcatcgcattgtgccacgtctccgcgacgtgtttggatggggtaacctgacctgtccgatttgtaaaggactgttcactgcaatcaaccttggacttaagaaggagccaaacgttgcgagggtgggttcggtggcgattaagctgtgtaatctgctcaagatagctccgccggcggtatgccagtcgatcgtgcatctcttcgaggatgacatggtcgaagtgtggcgcagatccgttctctccccttcggaagcatgcggactcctgctcggttcaacctgcgggcattgggatatcttttcaagctggaacatttcactccctaccgtccctaagcctccccctaagcccccatcgcccccggcgcccggggcacctgtgtccaggattctttttcttaccgatctccactgggatcatgactacctcgaaggtactgacccagattgtgcagatcccctgtgttgtagaaggggttccggactgccgcccgcgagcaggcccggggcaggttactggggggaatactcgaagtgcgaccttcctcttagaaccctggaatcgcttcttagcggactcgggcctgcaggaccatttgacatggtgtactggaccggcgatatcccagcgcacgatgtgtggcatcaaaccagacaggaccagctccgcgcacttactactgtgactgccttggtgcggaaatttcttggcccagttcctgtttaccctgcggtgggtaaccatgaaagcacgcctgtgaattccttcccccctcctttcattgaaggcaatcattcgtccagatggctgtacgaggcaatggcaaaagcctgggaaccttggctgccagcagaagcactgcggactctgcgaattgggggattctacgcactgtcaccttaccccggactcaggcttatctccctgaacatgaacttttgttcgcgagagaacttctggctgctgatcaattcgactgatcctgccggacaacttcagtggctggtgggtgagcttcaagcggctgaggaccgcggcgataaggtgcacatcattggacatatcccgcctggccactgtttgaagtcatggtcctggaactattaccggattgtggccaggtacgaaaacactctcgcggcgcagttttttggtcatacccacgtggacgagtttgaagtcttttacgacgaggaaaccttgtcacgtccgcttgcagtggcatttctggcaccgagcgccaccacctatattggtcttaatccaggttaccgagtgtaccagattgatggtaactacagcggatcctcgcacgtcgtgcttgaccatgagacttacattcttaatctcacccaagcaaacatcccgggagccatacctcattggcagcttctttaccgggcaagggaaacctacggacttccaaatacgctcccaactgcatggcataacctggtgtaccggatgcgcggagatatgcaactgtttcaaactttttggttcctgtaccacaaaggtcatccaccttctgaaccctgcggaactccatgtagacttgcaaccttgtgcgcccagctgtcagcgcgcgcggacagcccggcattgtgcaggcatctgatgcctgatggatcgcttcccgaggcacaatccctgtggccaaggcctcttttttgt

SEQ ID NO: 12141 - DNA, 1893 bp, Artificial Sequence
  derived and/or modified sequence
atgcctagatacggggcctcacttcggcaatcatgtcctcggtccggtcgcgagcagggacaagatggaaccgcaggagcaccaggactgctttggatgggcctcgtgcttgcactcgcgctcgcattggcccttgcacttgccctttctgattcgcgagtactttgggcaccagcagaagcgcatccgctgtcccctcaaggacaccctgcaaggctccataggattgttccaagactgagagatgtgttcggctggggcaatcttacttgtccaatttgcaagggccttttcacggctattaacctcggtcttaagaaagaacctaacgtggcccgggtcggtagcgtggcaatcaaactctgtaaccttctgaaaatcgcgcctcctgccgtctgccagtccatcgtgcatctttttgaagatgatatggtcgaggtgtggcgacgttcggtcctttcgccttccgaagcatgcggtctgttgcttggatccacctgcgggcattgggatatcttttcgtcgtggaacatatctctgccgaccgtgccaaagccgccaccgaagcctccttcgcctcctgcaccaggtgcacccgtttcgcgtattctctttctcactgatctccattgggaccatgactaccttgaaggaaccgacccggattgtgcagaccctctttgttgtcgcagggggtcgggtttgccacctgctagccgacctggagctggctactggggtgaatacagcaaatgcgatctgcctctgagaacccttgaatcacttttgtcgggactgggacctgccgggccatttgacatggtctattggactggagacattcctgctcatgatgtgtggcaccagaccagacaggatcaactgagagcgctcactaccgtcacggcattggtgagaaagtttcttggacctgtgccagtctaccccgcggtgggaaaccatgagtccaccccagtgaatagcttcccccctccgtttattgaaggcaaccattcgtccagatggttgtacgaagcaatggccaaagcatgggaaccgtggctccccgcagaagccctgcggactttgagaattggaggattctacgccctttccccctaccctggacttcggctcatttcccttaacatgaatttctgttccagagaaaacttctggctcctcataaactccaccgatcctgctggacaactgcaatggctggtgggagaacttcaagcggcggaagataggggagataaagtgcacatcatcggtcatattccacctgggcattgccttaaatcctggagctggaactactacagaatagtcgcccggtacgagaatacccttgccgcccagttctttggacatacccacgtggacgagttcgaagtgttttacgacgaagaaaccctcagccgccctcttgcagtggcattcctggccccctcagcaaccacttacatcggtttgaatcctggatacagagtgtatcaaattgatgggaactactcagggagctcacatgtggtgctggaccacgaaacctacattctcaatctcacccaagcaaacattccgggggcgattccacattggcagctgctttaccgggcgcgtgaaacttacggactgcctaacaccctcccgaccgcatggcacaacctggtgtaccggatgagaggagacatgcaactgtttcaaaccttctggtttctctaccacaagggacaccctccttcggaaccttgtggtactccttgtcgtcttgcaactctgtgtgcacaactgtcggcccgcgccgatagccctgcactttgtagacaccttatgccagatggatcgctccccgaagcacagagtctgtggcctaggcctcttttctgc

SEQ ID NO: 12142 - DNA, 1893 bp, Artificial Sequence
  derived and/or modified sequence
atgcctagatacggagcaagtctccggcagagctgcccccgaagcggtcgcgagcagggtcaggatgggacggccggggcaccagggctgttgtggatgggactggtgctggctttggcattagcgttggcgctagcactagctttgtccgacagcagggtcctgtgggcccccgctgaggctcacccgctgtccccccagggtcacccagctcggctgcacagaattgtgccaaggctgagagacgttttcgggtgggggaacctcacctgtcctatctgtaaaggtctcttcaccgccatcaatttgggccttaagaaagagcccaacgtcgcccgggtcgggagtgtagcaatcaaactgtgtaatctgctcaagattgctcctcccgctgtatgccagagcatcgtacatcttttcgaggacgacatggtggaggtgtggaggaggtcggtgctgagtccttcggaagcttgcggactgctgctgggctctacttgcgggcactgggatatcttttcctcctggaacatctctttacccaccgtgccgaagcccccgcccaagcccccctctcctccggctccaggagctccggttagtcgcattctcttcctgacggatctccattgggaccatgattatttggaaggcacggatcccgattgcgctgatccgctgtgttgtcggcggggttctggactgcctccagcaagccgacctggagccggttattggggtgagtacagcaaatgcgatctccccctgagaacccttgagtcgctgctgtcaggcctgggtccagctggtccttttgatatggtctattggaccggcgatattccagctcacgacgtgtggcaccagactagacaagatcagctgcgagctctgaccacagtgacagccctggtgcgaaaattccttggtcccgtccccgtgtaccctgccgtgggcaaccacgaatcaactccagtgaactcttttccccccccattcatcgagggaaaccactcttcgaggtggctctacgaggctatggcaaaagcttgggaaccatggttgcccgccgaggctctgcgtacgcttcgaatcggcgggttttatgccctgagtccctatcccggactacggctgatatctctcaatatgaacttttgcagtcgcgagaacttctggctgctaatcaacagtaccgatcctgctggacagttgcagtggctcgtgggggagttacaagcggcagaggacagaggtgataaggtccacatcattggacatattccccctggacactgcttaaaatcatggagttggaactactacagaatagtcgctcggtacgaaaatactctggccgctcaattctttgggcacacgcacgtcgacgaattcgaggtgttttatgatgaagaaaccctgagtaggccactggcggtggctttcctggcacccagcgccactacatacatcggcctgaatcctggctatcgggtatatcagattgatggcaactactcaggatcttcccacgtggttctggatcatgagacgtacatactgaacctcacgcaagccaacattcctggagcgattccgcattggcagctgctctatcgggcacgtgaaacatatgggctacctaacactctacccacagcttggcataatctggtgtacaggatgagaggggatatgcagttgtttcaaacgttttggtttctttaccacaagggtcaccccccttcggagccctgcggaacaccctgtagactcgccaccctgtgtgctcaactctcagccagagcagactctccagccctctgccggcacctgatgccagacggcagccttcctgaggctcagtctctctggcctagacctctcttctgt

SEQ ID NO: 12143 - DNA, 1893 bp, Artificial Sequence
  derived and/or modified sequence
atgccaaggtacggcgcgagtctgaggcagtcatgtcccaggtctgggcgtgagcaggggcaagatgggaccgctggcgcgcccgggctgctgtggatgggcctcgtgctggcccttgctttggcccttgctctggctctcgcactgagcgacagccgagttctttgggcacctgccgaagcgcaccctctcagccctcagggccatcctgcccgtctgcatcggattgtgcccagactacgagatgtctttggctgggggaatctcacctgtcctatttgcaaaggtctctttaccgctatcaatctcggtctcaaaaaagagcccaatgttgcacgggttggaagtgtggcaattaaactgtgcaatctacttaaaatcgcaccacccgctgtatgtcagagcattgtacatctgttcgaggacgacatggtggaggtctggcgacgatctgtattgtctccgtctgaggcttgtgggctactcctcggcagcacatgtggacattgggacatattctccagttggaatatctcacttccgaccgtgcctaagcccccgcccaagccgccaagcccccctgcgccaggagcccccgtatcccgtatactcttcctgacagacctccattgggatcacgattatctagagggtaccgatccggactgtgcagacccactgtgctgtcggagaggatctgggttgcccccggcatcaaggccaggggctggctactggggagagtacagcaaatgtgacctgccgctgcgcactctcgagagtctgctatcaggcctgggtcccgccgggccattcgatatggtgtactggactggcgacataccggcacacgacgtctggcatcagacacgacaggatcaactcagggcactaaccacagttactgcacttgtccgcaaattcttgggccccgtacctgtataccccgccgtgggcaatcatgaatccactccagtgaactcattcccgccccctttcatagaagggaaccacagctctaggtggctatacgaagccatggctaaggcctgggagccttggcttcctgcagaggccttacggacactgagaataggcggtttctacgccctatctccctaccctggtctaaggcttattagcctgaacatgaatttttgctctcgtgaaaacttttggttattgatcaactcaacggatcccgctggccagctccagtggctcgtcggtgaactgcaggcggcagaggaccgcggggataaagtgcatataatcggacacattccccctggacactgtttgaaatcttggtcttggaactactatcgcatcgtggccaggtacgagaataccttagcagctcaattcttcggccatacacacgtagatgaattcgaggtcttttacgacgaggaaacactgtctagaccactcgcggtggcattcctggccccttctgcgacgacttatataggcctgaatcccggatatagagtgtaccagattgacggcaactactccggctctagtcacgtggtcctggatcacgagacctacattctgaatttaacacaggctaatatccctggcgcgattccacattggcagctgctatatagggcacgcgagacatacggtttacctaacactctgcctacggcctggcacaacctcgtatatcgaatgagaggagatatgcagctgtttcagactttctggttcctttatcacaaaggccacccgccgtcagagccctgtggcaccccttgccgactggcaaccctctgcgcccaactgtctgcacgagcagacagccctgctctgtgccggcatctaatgccagatggaagcctgcccgaagcgcagagtctgtggccccggcccttgttctgt

SEQ ID NO: 12144 - DNA, 1893 bp, Artificial Sequence
  derived and/or modified sequence
atgccaagatacggcgcctccctgcgccaaagctgcccacgctctggacgtgagcaaggacaggatgggaccgcaggggctccgggacttctgtggatgggtcttgtgctggcactcgctttagccctggccctggcacttgctttatcagacagcagggtgttatgggctccggccgaagcccatcccttgtcccctcagggacaccccgctaggttgcacaggatcgtacctagactaagagacgtctttgggtggggaaatctcacatgtcccatttgtaaaggacttttcactgccattaacctgggactcaagaaagagcctaacgtcgccagggtgggctctgtggctatcaagctgtgtaatcttctaaaaatcgccccccccgccgtgtgccagtctatagtgcacttattcgaagacgacatggtggaagtgtggaggagaagcgtgctctcacccagtgaggcctgcggccttctgcttggctcgacctgtggacactgggacatttttagtagttggaatatttcattgccgactgtgccaaaacctcctcccaagccacccagtccaccagcccctggagctcccgtctcccggatcctcttcctcactgatctccattgggaccacgactatctggaggggaccgaccccgactgtgccgacccattgtgctgtagaaggggttccgggctgccgcccgcatcccgcccaggagccgggtattggggcgagtacagtaaatgtgacctcccactgaggacattggagagtctgctttcaggacttggaccggccggaccctttgatatggtgtattggactggagacatacctgcgcacgacgtatggcaccagactcgccaggaccagctccgggccctcactacggtcaccgcccttgtgagaaaattcctggggccagtgcccgtctaccccgcagtcggcaaccacgaatccacaccagtcaacagcttcccgccaccatttattgagggcaaccattcatctcggtggttgtacgaagcgatggccaaagcctgggaaccctggcttcccgccgaagctctacgtactcttcgcattggaggtttctatgcacttagtccttaccccggcttgaggctgatatcactcaacatgaacttttgctcccgggaaaacttttggctcttgattaattcaacagatccggcggggcagttgcagtggctggtaggggagttgcaggctgcggaagatcgaggggataaggttcacatcatcggccatatcccccccggtcactgcctaaagtcttggagctggaattactatcgtatagtggcgcgttacgaaaataccttggctgcccagttctttgggcatactcatgtagatgagttcgaggtcttctacgatgaagaaacactgagccgaccgctcgccgttgcatttctggcaccgtctgccacaacatacattggactcaaccccggttatcgagtataccaaatcgacggcaactattctggatcaagtcacgtggtgctggatcatgagacttacattctgaaccttactcaagccaacatacccggagcaatccctcattggcagctgctgtacagagcccgcgagacctatgggctacccaatactctgcccaccgcctggcacaacctagtgtaccgcatgcggggagatatgcagctattccaaaccttttggtttctgtaccataagggtcaccccccttcggaaccttgtggaactccttgtagactcgccactctctgcgcgcagctgagcgcacgcgccgattcgccagcgttgtgtcgccaccttatgccagacgggagtttacctgaagcacagtctctgtggcctcgacctctattttgc

SEQ ID NO: 12145 - DNA, 1893 bp, Artificial Sequence
  derived and/or modified sequence
atgccaaggtatggagccagcttaagacagagttgccccagatctggcagggagcagggccaggacggcacggctggtgcccccggcctgttgtggatggggcttgtgctagcactcgctctggcactagcccttgcactggcactctctgactcaagggtgctgtgggctcccgctgaagcccatccactgagcccccaggggcacccagctagactgcatcgcattgtgcctagattgcgggacgtgtttggctggggcaatctgacctgtccaatttgcaaggggcttttcaccgcaataaacctagggctcaagaaggagcctaacgttgccagggttggctccgtcgcgattaaattgtgcaatcttcttaagatagcaccgccagctgtttgtcagagtatcgttcacctattcgaagatgacatggtcgaagtatggagacgttctgtgctgtccccttctgaggcctgcggcctgctgttgggaagcacttgcggccactgggatatattttcttcatggaatatctctctccccaccgttcccaagccgcctcccaagcctccaagtccgccggctccgggagcccccgtgtcacgaattttgttcctgactgatctgcattgggaccacgactatcttgagggtacagacccagactgtgccgaccctttatgctgcaggagggggagcggtttgccccccgccagcaggcccggagcgggttactggggcgaatattcgaagtgcgatttgcctctcaggactctggagtccctgttaagtggactgggccccgctggtcccttcgacatggtgtattggactggcgatatcccagcgcatgatgtgtggcaccaaactcgtcaggaccagcttagggcattaacaacagtgactgcgcttgtccgtaaattcctgggacccgtgcctgtctacccagcagtggggaaccatgaatctaccccggtgaacagcttcccccctccctttatcgagggtaatcactcctcacgctggctgtacgaggcaatggcgaaggcttgggagccctggttacccgctgaagcgttgcgcaccctgcgcatcggggggttctatgctctgagcccctatccgggtctccgcctcatatccttaaatatgaatttttgttctcgcgaaaacttttggctgctgatcaacagtacggaccctgccggccaactgcagtggttagttggcgaactccaagcggccgaggatagaggcgacaaggtgcatattatcggccacattcctccagggcattgtctgaagtcttggtcctggaattattacaggatcgttgcgagatatgaaaataccttggccgcccagttcttcggccatacgcacgtagatgagtttgaagttttttacgatgaggagaccctgtcacgtcccctcgctgtcgcttttctggccccatccgccaccacgtacattggactcaatcccggctatcgtgtatatcaaatcgacggaaattattccggttctagccacgtagttctagatcacgaaacttatatattgaacctcacccaggcaaatatacccggggccatcccgcactggcagctgctgtaccgcgcaagagaaacctatgggctccccaatacactgcccacagcttggcacaacctcgtatacagaatgcggggcgatatgcaactgtttcagactttttggtttctctatcacaagggacaccctccaagcgaaccctgtggaacaccatgtaggctggcaaccttatgtgctcagctatcagcccgtgcggactccccagccttgtgccggcacctgatgcccgatggaagtctgcctgaagcccaatccctgtggcccagacccttattttgc

SEQ ID NO: 12146 - DNA, 1893 bp, Artificial Sequence
  derived and/or modified sequence
atgccacgctatggggcttccctcaggcagtcgtgcccaagatctggaagagaacagggacaagatggaaccgccggcgctccgggcctgctctggatgggactcgtcctggcactggccctggcgttggccctggctttggccctctcagactcgcgcgtgctgtgggcgcctgcagaggcgcatcctctctcaccacaaggacatcctgcacgcctccataggatcgtgccacgattgagggacgtgtttggctggggcaatctgacttgcccaatctgcaagggcctgttcaccgctattaacctgggacttaagaaagaaccaaacgtggcccgggtcggaagcgtcgcaattaagctgtgcaatctgttgaagatcgcgccgcctgccgtgtgtcaatcgatcgtgcatcttttcgaagatgacatggtggaagtgtggcgcaggtcagtcctctcgccatcggaggcttgcggcctgttgctgggatcgacctgcgggcactgggatatcttttctagctggaatatctcccttcctaccgtccctaagcctccaccgaagcctccgtcaccccctgcgcctggtgcgccggtgagccggatcctgtttctgactgatctgcactgggatcacgactacctggagggaaccgacccggactgcgcagacccgctgtgctgcagaagggggagcggcctgccgcctgcgagccgcccgggagccggatactggggtgagtattcgaaatgtgatcttcctctcagaaccctggagtcactcctctcaggcctcggtccagccggaccgttcgatatggtctactggactggggacatcccggcacatgatgtgtggcaccagactcgccaggatcagctgcgcgctctgactaccgtcactgccctcgtgaggaagttccttggaccggtgcctgtgtacccggcagtcggaaatcacgaaagcactccggtcaacagcttcccgccgcctttcattgagggaaaccattcgtcccggtggctgtacgaggcgatggcaaaggcttgggagccgtggctcccagcggaagccctccgcaccctgcgcattggaggcttctacgcactttcaccatacccaggccttcggctgatatccctgaacatgaacttctgttcgcgcgagaatttctggcttctcatcaacagcaccgacccagcaggacagctccaatggttggtcggagaactgcaggccgcagaggaccgcggagataaagtgcacatcatcgggcacatcccgccaggccactgcctgaagtcctggtcctggaactattaccgcatcgtggcgcgctacgagaacacgctggcagcgcagttcttcggccatacccatgtcgacgagttcgaagtgttctacgacgaagagactctgtcgcgccctctggcagtggcctttttggccccctcagccaccacctacatcgggctgaatccaggctatcgagtataccagatcgacggtaactacagcgggtcatcgcacgtcgtgcttgaccatgagacgtatatactgaacctcactcaagccaacatcccgggagcaatcccccactggcaactgctgtaccgggcccgggagacttacgggctccctaataccctgccgaccgcttggcacaatctggtgtacaggatgcggggagacatgcagctgttccagactttctggtttctctatcataaagggcatccgccgagcgaaccgtgcggtactccgtgcagactggcaaccctgtgcgctcaactgtcagcacgggccgattccccggccctgtgtagacatttgatgcccgatggcagcctgccagaggcccaatccctgtggcctagaccgcttttttgc

SEQ ID NO: 12147 - DNA, 1893 bp, Artificial Sequence
  derived and/or modified sequence
atgccgcgctacggggcctccctcaggcagagctgcccaagatcaggacgggaacagggacaggatggcaccgccggagcacctggactgctgtggatgggactggtcctggctttggccctcgcgctggcccttgcactcgcactctcggactcacgggtcctgtgggcgccagccgaggcgcacccgctgtcgccgcagggacacccagcgcggctgcacaggatcgtcccgagactccgcgatgtgtttggctggggtaacctgacctgcccaatctgtaaaggtttgttcactgcgatcaacctcggcctgaagaaggagccgaacgtggctagggtgggctcggtcgccatcaagctgtgcaacttgcttaagatcgcgccaccggctgtctgccagagcatcgtgcaccttttcgaggatgacatggtggaggtgtggagacgctccgtcctgtcgccatccgaggcttgcggcttgctgctgggctcgacgtgtggacattgggacatctttagctcctggaatatctcactgccgaccgtgcctaagccacctcctaagccgccttcacctccggcccctggggcccccgtgtcccgaatcctgttcctgaccgacctgcattgggaccacgactacctcgaaggcactgaccctgactgcgccgacccgctgtgctgccggaggggatccgggctcccgccggcgtcgcgccctggagccggatactggggcgagtatagcaagtgcgaccttccactcagaacgctggagtcgctcttgtcgggactgggacctgctggaccattcgacatggtgtactggaccggcgacatccctgcgcatgacgtgtggcaccaaacccgacaggaccaactcagagccctgactaccgtgaccgcgctggtgcgcaagttcctgggacctgtgccggtctaccctgcagtgggcaaccacgaatcaactcctgtgaacagctttccgccaccgttcatcgagggtaatcactcctcgcggtggttgtacgaggcaatggcaaaagcctgggagccttggctccccgctgaggctctccgcactctcagaatcggagggttttacgccctttccccttatccgggcctccgccttatctccttgaatatgaacttttgctcccgggaaaacttttggctcctgatcaattctaccgaccctgcgggccagctgcagtggctggtgggagagcttcaggcagccgaagatcggggagataaggtgcatatcatcggtcacatcccacctggacactgtctgaagagctggtcgtggaactactacaggatcgtggcaagatatgagaataccctcgccgcgcagttcttcggccacacgcacgttgatgagttcgaagtgttttacgatgaggaaaccctctcccgcccgctggcagtcgccttcctggccccatcagctaccacgtacatcggcctgaacccaggctaccgtgtgtaccagatcgatgggaattacagcggatcctcacacgtggtgctggatcacgagacgtacatcctcaatctgacccaggcaaacatcccgggcgccatcccacattggcagctgctgtaccgggcccgcgaaacctacggactgccaaatacgctgccgaccgcgtggcataaccttgtgtacagaatgcggggcgatatgcagcttttccaaactttctggttcctctaccataagggacatcctccttcagagccatgcggaactccgtgccgcctcgccaccctttgcgcccagctcagcgcgcgggccgattccccggccttgtgtaggcacctgatgcccgatggatcgctgcccgaagctcaatcgctgtggccccgccccctgttctgt

SEQ ID NO: 12148 - DNA, 1896 bp, Artificial Sequence
  derived and/or modified sequence
atgcccagatacggcgccagcctgagacagagctgccccagaagcggcagagagcagggccaggacggcaccgccggcgcccccggcctgctgtggatgggcctggtgctggccctggccctggccctggccctggccctggccctgagcgacagcagagtgctgtgggcccccgccgaggcccaccccctgagcccccagggccaccccgccagactgcacagaatcgtgcccagactgagagacgtgttcggctggggcaacctgacctgccccatctgcaagggcctgttcaccgccatcaacctgggcctgaagaaggagcccaacgtggccagagtgggcagcgtggccatcaagctgtgcaacctgctgaagatcgccccccccgccgtgtgccagagcatcgtgcacctgttcgaggacgacatggtggaggtgtggagaagaagcgtgctgagccccagcgaggcctgcggcctgctgctgggcagcacctgcggccactgggacatcttcagcagctggaacatcagcctgcccaccgtgcccaagcccccccccaagccccccagcccccccgcccccggcgcccccgtgagcagaatcctgttcctgaccgacctgcactgggaccacgactacctggagggcaccgaccccgactgcgccgaccccctgtgctgcagaagaggcagcggcctgccccccgccagcagacccggcgccggctactggggcgagtacagcaagtgcgacctgcccctgagaaccctggagagcctgctgagcggcctgggccccgccggccccttcgacatggtgtactggaccggcgacatccccgcccacgacgtgtggcaccagaccagacaggaccagctgagagccctgaccaccgtgaccgccctggtgagaaagttcctgggccccgtgcccgtgtaccccgccgtgggcaaccacgagagcacccccgtgaacagcttccccccccccttcatcgagggcaaccacagcagcagatggctgtacgaggccatggccaaggcctgggagccctggctgcccgccgaggccctgagaaccctgagaatcggcggcttctacgccctgagcccctaccccggcctgagactgatcagcctgaacatgaacttctgcagcagagagaacttctggctgctgatcaacagcaccgaccccgccggccagctgcagtggctggtgggcgagctgcaggccgccgaggacagaggcgacaaggtgcacatcatcggccacatcccccccggccactgcctgaagagctggagctggaactactacagaatcgtggccagatacgagaacaccctggccgcccagttcttcggccacacccacgtggacgagttcgaggtgttctacgacgaggagaccctgagcagacccctggccgtggccttcctggcccccagcgccaccacctacatcggcctgaaccccggctacagagtgtaccagatcgacggcaactacagcggcagcagccacgtggtgctggaccacgagacctacatcctgaacctgacccaggccaacatccccggcgccatcccccactggcagctgctgtacagagccagagagacctacggcctgcccaacaccctgcccaccgcctggcacaacctggtgtacagaatgagaggcgacatgcagctgttccagaccttctggttcctgtaccacaagggccacccccccagcgagccctgcggcaccccctgcagactggccaccctgtgcgcccagctgagcgccagagccgacagccccgccctgtgcagacacctgatgcccgacggcagcctgcccgaggcccagagcctgtggcccagacccctgttctgctag

SEQ ID NO: 12149 - DNA, 1896 bp, Artificial Sequence
  derived and/or modified sequence
atgcccaggtacggcgcctccctaagacagtcatgcccccgttcaggacgagagcaggggcaggacgggacagccggcgcccccggcctgctgtggatgggtttagtgctggccctcgccttggctctggcccttgctttggctctttccgacagccgggttctgtgggctccagctgaagcccaccccttgagtcctcaggggcatcccgcgagactgcatcgtattgtgcctcgcttgcgagatgtatttggctggggaaacctgacatgtccgatttgcaagggtctgttcacagcaatcaacttgggcctaaagaaggaaccgaacgtcgcgcgggtgggtagcgtcgccattaagctgtgcaacctgctcaaaatcgcgccccctgcggtctgccagtcgatcgtgcatctgtttgaagatgacatggtggaagtctggagaagatcggtcctttcaccctcagaagcctgcggtctgctcctcggatcaacatgcgggcattgggacatttttagcagctggaatatttctctacccaccgttccgaaaccaccccctaagccaccatcaccacccgcccccggggctcctgtttccagaatcctcttcctgacggatctccattgggatcatgactacctggaaggtacggaccctgactgtgccgatcccctgtgctgtcgcagaggcagcggcttgccgcccgcctctcgtccaggcgccggctattggggggagtactccaagtgcgatctaccgctgcggaccctggagtctcttctcagtgggctcggtcctgccgggccgttcgacatggtgtactggaccggtgacattcccgcccatgacgtctggcatcagacaagacaggatcagctgcgggccttaaccacagtgacggctctcgtccgtaagtttttaggacctgtaccagtctatccagccgtaggtaatcatgagtctacccccgtcaatagtttcccgcccccctttatagaggggaaccattcctccagatggctttatgaagccatggccaaggcatgggaaccgtggctgcctgccgaggccttacgtaccctccgtattggtggattctatgcgctgtccccctaccccgggctgaggctcatatcactgaatatgaatttttgctctagagaaaacttctggctcctgattaactccaccgaccccgctggtcagctgcagtggctggtgggagagcttcaggccgctgaagataggggagacaaagttcacattataggccatatcccccctgggcactgcttaaaaagctggtcctggaattactacagaattgtggcacggtatgagaacacgctggctgcccagtttttcggccacacccacgttgatgagttcgaggtgttttatgatgaggaaacactcagccggccacttgctgtggcattcctggcccccagcgcaacgacctacattggcctcaatcccgggtaccgtgtttatcaaattgatgggaactactccggaagctctcacgtcgtgctggatcacgaaacctatatcctgaacttaacacaggcaaacatccccggcgccattcctcattggcagctcctctatcgagctagagagacctacggcctgcctaacaccctgccaacggcatggcacaatcttgtgtataggatgcggggtgatatgcagctcttccagacattctggtttctgtaccacaaaggccacccaccttccgaaccgtgcggaaccccatgtagacttgctaccctctgcgcacagctgtctgctcgagccgacagtcccgcattgtgcagacacctcatgcctgacgggagcctccctgaggcccagtccctgtggccaaggccgttattctgttag

SEQ ID NO: 12150 - DNA, 1896 bp, Artificial Sequence
  derived and/or modified sequence
atgccccgctacggggccagcctgcggcagagctgccccaggagcggccgggagcagggccaggacggcacagctggggcccctggcctgctgtggatgggcctggtgctggccctggccctggccctggccctggccctggccctgagtgacagccgggtgctgtgggccccagctgaggcccaccccctgagcccccagggccacccagcccggctgcaccgcatcgtgccccggctgagagatgtgtttggctggggcaacctgacctgccccatctgcaagggcctcttcaccgccatcaacctgggcctgaagaaggagcccaacgtggcccgggtgggctctgtggccatcaagctgtgcaacctgctgaagatcgcccctcctgctgtgtgccagagcatcgtgcacctgtttgaagatgacatggtggaggtgtggaggagatctgtgctgagccccagcgaggcctgtggcctgctgctgggcagcacctgtggccactgggacatcttcagctcctggaacatcagcctgcccaccgtgcccaagcccccacccaagccacccagccccccagcccctggggcccctgtgagccgcatcctcttcctgacagacctgcactgggaccatgactacctggagggcacagatcctgactgtgccgaccccctgtgctgccggcggggcagcggcctgcccccagccagcaggcctggagctggctactggggcgagtacagcaaatgtgacctgcccctgcggaccctggagagcctgctgagcggcctgggccctgctggcccctttgacatggtgtactggacaggagacatcccagcccatgatgtgtggcaccagacccggcaggaccagctgcgggccctgaccaccgtgacagccctggtgaggaagttcctgggccctgtgcctgtgtacccagctgtgggcaaccacgagagcacccctgtgaacagcttccccccacccttcatcgagggcaaccacagcagccgctggctgtatgaggccatggccaaggcctgggagccctggctgcctgctgaggccctgcggaccctgagaattggaggcttctacgccctgagcccctacccaggcctgcggctcatcagcctgaacatgaacttctgcagccgggagaacttctggctgctgatcaacagcacagatcctgctggccagctgcagtggctggtgggggagctgcaggccgctgaggacagaggagacaaggtgcacatcatcggccacatccccccaggccactgcctgaagtcctggagctggaactactaccgcatcgtggcccgctatgagaacaccctggccgcccagttcttcggccacacccacgtggatgaatttgaggtgttctatgatgaggagaccctgagccggcccctggccgtggccttcctggcccccagcgccaccacctacatcggcctgaaccctggctacagagtgtaccagattgatggcaactacagcggcagcagccacgtggtgctggaccacgagacctacatcctgaacctgacccaggccaacatccctggggccatcccccactggcagctgctgtaccgggcccgggagacctacggcctgcccaacaccctgcccacagcctggcacaacctggtgtacaggatgagaggagacatgcagctgttccagaccttctggttcctgtaccacaagggccaccccccatctgagccctgtggcaccccctgccgcctggccaccctgtgtgcccagctgagcgcccgggctgacagccctgccctgtgccgccacctgatgccagatggcagcctgcctgaggcccagagcctgtggccccggcccctcttctgctag

SEQ ID NO: 12151 - DNA, 1896 bp, Artificial Sequence
  derived and/or modified sequence
atgccccggtacggcgccagcctgcggcagagctgcccccggagcggccgggaacaggggcaagacggcacagctggcgcaccaggcttgctttggatgggcttagtgctagctctcgccctggccctcgcacttgcgctggctctctccgactctagagtcctctgggcccctgcagaagcacaccctttgtctcctcaggggcaccctgctaggctgcatcgcattgtccccagactaagggatgtattcgggtggggtaacctgacctgtcctatctgcaaaggactctttactgcgatcaatctaggattaaagaaggagcctaacgtggctcgcgtgggaagcgtcgccataaaattatgcaaccttctgaaaatagctccccccgctgtgtgtcagtccatagtgcatctcttcgaggacgatatggtggaagtttggcgacgatcagttctaagtccatcagaggcatgtggcctgctgcttgggagtacatgtgggcattgggacatattttcctcatggaatatttctctgcctaccgtcccaaaacccccaccaaaacccccctctccacctgctcccggggcccccgtgtcaagaattctatttctcaccgacctgcattgggaccacgactatcttgagggcactgaccctgattgcgcagaccccctttgctgccggcgcggtagtggattgccacccgccagccgtccgggagctggctattggggggagtacagtaagtgcgacctccctcttaggaccttggaatccctcctatcagggctcggcccggcggggccattcgatatggtgtactggaccggcgacataccagctcatgacgtgtggcaccagacccggcaagatcaactgcgggctttgacaactgttacagctctggtgaggaagttcctgggtcccgtaccagtctacccagctgtgggcaatcacgagagtacgcccgtgaacagtttccccccgccctttattgagggcaatcatagttctagatggctgtatgaggccatggccaaggcttgggagccttggctccccgccgaagccctgcgtactctgaggataggcgggttctatgctcttagcccatacccaggcctgcgcctcatctcattaaatatgaatttctgctcacgagaaaatttctggttgctgattaactctacagatcccgccggacaactgcagtggctggtcggtgagctccaggctgcagaagaccgcggcgataaggtccatatcattggacacattcctcccggccattgcttgaagagctggtcctggaactattaccgaatcgtcgctcgctatgagaacactctggctgcccagttttttggccacactcatgtggatgaatttgaggtgttttatgacgaggaaactctgtctagacctcttgctgtggccttcctggctccatcagcgaccacctacatcggattaaaccctggctatagagtctaccagatagatggtaactactcgggatcaagccatgtggtattggaccatgaaacctacatcctgaacctgacacaggccaatatccccggcgctatcccccactggcaactgctgtacagggcacgagagacctacggcctgccgaatacgctgcctacagcctggcataatttagtatataggatgcgaggagatatgcagctttttcaaactttctggtttctttatcacaagggtcacccgccatccgaaccctgcggcaccccttgtcgactcgctactctctgcgcccagctgtcagcgcgggcggatagccctgcactttgtagacacttgatgcccgacggatctctacccgaggcccagtctctgtggcctaggcccctgttttgctag

SEQ ID NO: 12152 - DNA, 1896 bp, Artificial Sequence
  derived and/or modified sequence
atgcccaggtatggcgcaagcctccgccagagctgcccccgatccggaagggaacagggccaggatgggacagctggggctcccggtctcctgtggatggggctcgtgttggctctggccctcgccttagcattggctctagccctctcagatagcagggtgttgtgggcgccagcagaggcccaccctctgtctccccagggccacccagccagactgcacagaatcgtccccagactgagagacgtcttcggttgggggaacctgacttgtccgatttgtaaagggctgttcacagccataaaccttggcctgaagaaagagccgaatgtggccagggtgggctctgtcgcaatcaaactgtgcaatctcctgaagatcgcccctccagctgtgtgccaatccatagtccacctgtttgaggatgatatggtggaggtctggcgcaggtcagtgctatccccctcggaggcctgcggcttgttgcttggttctacgtgcggtcactgggatatcttttcatcatggaatatctctctccctacggttcccaaaccaccacctaaacccccttcccccccagcccctggggcaccagtgagtcgtatcctcttcctcactgatctgcattgggatcacgattatcttgaaggaacggatccagactgcgctgaccccctgtgttgtaggcgtgggagcggactgcccccagcgtcaagaccgggagctgggtactggggtgaatactccaagtgtgatctgcccttgcgcaccctcgaaagcctcctctccggtctggggccagctggcccttttgatatggtgtattggaccggagatatccctgcacacgacgtctggcatcagaccagacaggatcagctcagagccttaaccaccgtaactgcgctagtgagaaagttcctggggccagtgcctgtctaccccgctgtgggaaatcatgaatcaactcctgtgaatagttttcctccaccattcatagaggggaatcactccagccgatggctatacgaggctatggcgaaagcatgggaaccatggttaccagcagaagcactccgaacgcttcggatcggcggtttttacgcactgagtccctaccctgggctccgactgatcagcctaaatatgaatttctgcagtcgcgagaacttctggctgctgatcaattccacggaccccgcaggccagctgcaatggctggtgggagaactgcaggccgctgaagatagaggcgacaaggttcacatcatcggacatatccctccgggacattgccttaaatcatggtcgtggaactattaccggattgtggccaggtatgagaataccctcgcagcccagttctttggccacacccacgtggacgagtttgaggtgttctatgacgaagagaccctgagccgcccactggccgtggcattcctggcacccagcgcaacaacatatattgggcttaaccctgggtatcgtgtgtaccagatagatggcaattactccggatcaagtcatgtcgtcctcgaccatgagacctacatcctaaacctcacgcaggctaatattcccggtgctatcccccactggcagctcctctaccgcgctcgagaaacctacggacttcctaacacgttacctaccgcttggcacaatcttgtctatcgcatgaggggggatatgcagttatttcaaaccttctggttcctgtaccacaagggccatcctcccagtgagccatgtggtactccatgtaggcttgccacactctgcgctcagctgtccgcccgtgctgatagtcccgctctgtgtaggcatttaatgcccgacggcagtctaccagaggctcagtccctctggccgagacccctattttgctag

SEQ ID NO: 12153 - DNA, 1896 bp, Artificial Sequence
  derived and/or modified sequence
atgcctcggtatggcgcttcgttgagacagtcctgcccacgatccggcagggaacaaggccaggacggaacggcaggggctcccgggttactttggatgggactcgtgctggccttagctctcgcactggcattagcactggcactctcagacagtcgtgtgctgtgggcaccagcagaggcgcatcctttatccccacaggggcatcccgctcgcttacacaggattgtaccgagattacgtgacgtcttcggatggggaaatctgacctgccctatttgcaaaggactgttcacggctataaacctggggttgaaaaaagaaccaaacgtagctcgggtgggatctgtcgccatcaagctgtgcaatttgttaaagatagcaccaccagccgtgtgtcaaagtattgtgcacttgtttgaagacgatatggtggaggtgtggcgccgatcggtcctttctcctagcgaagcttgtggcctgcttctggggtctacgtgcggtcattgggacattttctcctcttggaacattagtctaccaaccgtcccaaagcccccccccaagcctccatctcccccagcacctggcgcccccgtgtctagaattctgttcctgacagacttgcactgggatcatgattacctcgagggtactgaccccgactgcgccgaccctctatgctgtcgccggggctctggactgccaccagcaagccgccccggggccggttactggggggaatattctaaatgcgatctgccactcaggaccctggagagtttgctgagcggcctggggcctgctggaccattcgacatggtctattggacaggcgatatacccgcacatgacgtgtggcaccagacaaggcaggatcagctgagagcccttaccacagtaacagcactcgtgaggaaatttttaggacctgtccctgtgtaccctgccgtgggtaatcacgagtccactcccgtgaatagctttccaccaccatttatcgagggcaatcatagcagtcgatggctctatgaagcaatggccaaggcctgggagccatggctccccgctgaggcccttcgcaccctcaggattggcggattttatgctctttccccttacccgggattgcgcctgattagcctcaatatgaacttttgcagccgggagaatttctggctccttataaacagcacagaccccgcaggacaacttcagtggcttgttggagaactgcaggctgccgaggaccggggtgacaaggttcatatcatcggacacatcccaccggggcactgcctaaaaagctggtcctggaactattatagaatcgtggctaggtatgagaatacactggctgctcaattttttggccacactcatgttgacgaattcgaggtgttctatgacgaggaaacactcagcagacccttggctgtcgcatttttggctccatccgccacaacatacattggcctcaaccctgggtacagagtgtaccagatcgatggaaactatagtggctcctctcacgtggtgcttgaccacgagacttatatcctgaatcttacacaagccaatatacctggggccattcctcattggcagttgctttatcgagctcgcgaaacatacgggcttccaaacacactgcccactgcctggcataatctagtataccgcatgagaggagacatgcagctctttcaaactttctggttcttataccataaagggcaccccccctcagagccatgcggaaccccctgccgcctggcaacattatgcgctcagctgtccgcccgtgccgattctcccgccttgtgtcgccatttgatgcctgatgggagccttccggaagcacagtccctgtggccacgtcctctcttctgttag

SEQ ID NO: 12154 - DNA, 1896 bp, Artificial Sequence
  derived and/or modified sequence
atgccccgctacggagcctccttacgacaaagctgtcccagaagcggtagggaacaggggcaagatgggacagccggtgcacccggactgctatggatgggcctggttctggcactggccttggctctcgcactagcacttgcgctgagtgattctcgcgttctgtgggccccggcagaagctcaccccctatcgccacaaggtcatccggccaggctacatcgtatcgtccccagactgagagatgtattcggttggggtaatctcacctgtccaatctgcaaaggcctctttactgccattaacctaggtctaaaaaaggaaccgaacgtggccagagtcggctccgtggctataaaattgtgcaatctgttaaagattgcccccccagcagtctgccaatcaatcgtgcatttgtttgaggatgacatggtggaagtgtggcgaagatcagtcttgtcccccagcgaagcctgcgggctgttactcgggagcacctgcggccactgggacatcttctctagttggaatatctcactgcctaccgtgcctaaaccaccacctaaacctccaagcccacccgcccctggcgcccccgtgagccgcatcctctttttgaccgatctccactgggatcacgactacctagaaggcaccgatcccgactgtgcagaccctctgtgttgccggcgcgggtccggtctaccccccgcatcccgcccaggcgccggatactggggtgagtactccaaatgcgatctccccttacggacgctggaatctcttttgtcaggcttaggccccgctgggccctttgatatggtgtattggacaggcgacatccccgcccatgacgtatggcatcagacacgccaagatcagcttcgcgccctgacaacagttaccgcccttgttagaaagtttcttggacccgttcccgtgtaccctgcagtgggcaatcatgaatcaacaccagtgaactcgttcccccctcctttcatcgagggcaatcactcttcgcggtggttatatgaggccatggcaaaagcttgggagccctggctgccggctgaggcgctgcgaaccctcagaatcggtggcttctacgccctctcgccctaccctggattacgattgatcagcctgaacatgaatttctgctctagagagaatttttggttactgataaactcaacagatcctgccggccaactacagtggttagtaggtgagctgcaggccgccgaggacagaggagataaggtccacatcataggacatatcccccccgggcattgtttaaagtcatggagttggaattactaccggattgtcgcccgatacgagaatactttggccgcacaattcttcgggcatacacacgttgacgaattcgaggtattctatgatgaggagaccctaagccgtcctctcgctgtggcctttttggccccttccgcaaccacgtacatcggactgaacccaggttaccgtgtttaccagatagatggaaactatagtggaagctctcatgttgttctcgaccacgaaacctatatcttaaaccttactcaggcaaatattcccggtgcgattccccattggcagctcctctaccgcgcacgggaaacctatggactaccgaataccctgcctaccgcatggcacaacctggtgtatagaatgcgcggcgacatgcaattgttccaaactttctggttcctttaccacaagggtcacccaccttcggagccgtgcggcaccccttgccggctggccacactatgcgctcaactcagtgcccgcgccgactcccccgccctgtgcagacatctgatgccggacggttcactgccagaagcccagtctctgtggccccgacctctgttttgctag

SEQ ID NO: 12155 - DNA, 2452 bp, Artificial Sequence
  derived and/or modified sequence
ggaagaggaaggggcggagctgctttgcggccggccgcggagcagtcagccgactacagagaagggtaatcgggtgtccccggcgccgcccggggccctgagggctggctagggtccaggccgggggggacgggacagacgaaccagccccgtgtaggaagcgcgacaatgccccgctacggagcgtcactccgccagagctgccccaggtccggccgggagcagggacaagacgggaccgccggagcccccggactcctttggatgggcctggtgctggcgctggcgctggcgctggcgctggcgctggctctgtctgactctcgggttctctgggctccggcagaggctcaccctctttctccccaaggccatcctgccaggttacatcgcatagtgccccggctccgagatgtctttgggtgggggaacctcacctgcccaatctgcaaaggtctattcaccgccatcaacctcgggctgaagaaggaacccaatgtggctcgcgtgggctccgtggccatcaagctgtgcaatctgctgaagatagcaccacctgccgtgtgccaatccattgtccacctctttgaggatgacatggtggaggtgtggagacgctcagtgctgagcccatctgaggcctgtggcctgctcctgggctccacctgtgggcactgggacattttctcatcttggaacatctctttgcctactgtgccgaagccgccccccaaaccccctagccccccagccccaggtgcccctgtcagccgcatcctcttcctcactgacctgcactgggatcatgactacctggagggcacggaccctgactgtgcagacccactgtgctgccgccggggttctggcctgccgcccgcatcccggccaggtgccggatactggggcgaatacagcaagtgtgacctgcccctgaggaccctggagagcctgttgagtgggctgggcccagccggcccttttgatatggtgtactggacaggagacatccccgcacatgatgtctggcaccagactcgtcaggaccaactgcgggccctgaccaccgtcacagcacttgtgaggaagttcctggggccagtgccagtgtaccctgctgtgggtaaccatgaaagcacacctgtcaatagcttccctccccccttcattgagggcaaccactcctcccgctggctctatgaagcgatggccaaggcttgggagccctggctgcctgccgaagccctgcgcaccctcagaattggggggttctatgctctttccccataccccggtctccgcctcatctctctcaatatgaatttttgttcccgtgagaacttctggctcttgatcaactccacggatcccgcaggacagctccagtggctggtgggggagcttcaggctgctgaggatcgaggagacaaagtgcatataattggccacattcccccagggcactgtctgaagagctggagctggaattattaccgaattgtagccaggtatgagaacaccctggctgctcagttctttggccacactcatgtggatgaatttgaggtcttctatgatgaagagactctgagccggccgctggctgtagccttcctggcacccagtgcaactacctacatcggccttaatcctggttaccgtgtgtaccaaatagatggaaactactccgggagctctcacgtggtcctggaccatgagacctacatcctgaatctgacccaggcaaacataccgggagccataccgcactggcagcttctctacagggctcgagaaacctatgggctgcccaacacactgcctaccgcctggcacaacctggtatatcgcatgcggggcgacatgcaacttttccagaccttctggtttctctaccataagggccacccaccctcggagccctgtggcacgccctgccgtctggctactctttgtgcccagctctctgcccgtgctgacagccctgctctgtgccgccacctgatgccagatgggagcctcccagaggcccagagcctgtggccaaggccactgttttgctagggccccagggcccacatttgggaaagttcttgatgtaggaaagggtgaaaaagcccaaatgctgctgtggttcaaccaggcaagatcatccggtgaaagaaccagtccctgggccccaaggatgccggggaaacaggaccttctcctttcctggagctggtttagctggatatgggagggggtttggctgcctgtgcccaggagctagactgccttgaggctgctgtcctttcacagccatggagtagaggcctaagttgacactgccctgggcagacaagacaggagctgtcgccccaggcctgtgctgcccagccaggaaccctgtactgctgctgcgacctgatgctgccagtctgttaaaataaagataagagacttggactcc

SEQ ID NO: 12156 - RNA, 2039 nt, Artificial Sequence
  derived and/or modified sequence
gggaaauaagagagaaaagaagaguaagaagaaauauaagagccaccaugccgcgauacggcgcaucacuucggcagucguguccgagaucgggaagggagcaagggcaggaugggaccgccggagcgccuggacucuuguggauggggcucguccuggcucuggcgcucgcucuggcccuugcauuggcuuuguccgacagccgagucuugugggcaccggcagaggcccacccacugucgccccaagggcaccccgcgagacuccaucgaaucgugcccagauugcgggauguguucgguugggguaacuugacaugccccauuugcaaagggcucuuuacagcgaucaacuuggguuugaagaaggagcccaacgucgccagagucgggucgguggcgaucaaguugugcaaucuccucaagaucgcaccucccgcagucugccagucaauugugcacuuauuugaggaugacaugguagagguguggcgccgaagcgugcugucgccaagcgaggcgugugggcugcugcucggaucaacguguggccacugggacaucuucucaucguggaauaucucauugccgacggucccaaaaccaccuccaaagccuccuuccccgccugccccuggagcgccggugucgcggauucuguucuugacagaccuucacugggaucacgacuaucuugaggguacagaucccgacugcgcggacccgcuuugcugccgcaggggaucgggguugcccccugcaucgcgacccggugcugguuauuggggcgaauacucaaagugugaccuuccccugcgcacccucgaaucgcuuuugagcggccuuggacccgcggggcccuucgauaugguguauuggacuggcgacauuccggcgcaugauguguggcaccagacucgacaggaccagcuucgagcgcucacaacggugacagcacuggugcggaaauuucucggaccagugccaguauacccugcgguagguaaccaugaaucgacgccugucaauagcuucccuccgccuuuuaucgagggcaaucauagcucgcgguggcucuacgaggcgauggcgaaggcgugggaaccguggcuuccggcggaggcguugagaacucuuagaaucggugguuuuuacgcgcuuagcccauacccuggucugaggcucaucucacugaacaugaauuucuguucacgggaaaacuucuggcuucugaucaauucgacagacccggcagggcagcuccaguggcuggucggagaauugcaggccgcagaggaucgcggagacaaaguacacaucauugggcacauuccucccggacacugucucaaaagcuggucguggaauuacuaucgcaucgucgcuagauacgagaacacgcuugcggcgcaguuuuucgggcacacccacgucgaugaguuugagguauucuaugaugaagaaacguugucccgaccccuggcggucgcauucuuggcgcccucggccacgacguacauugggcucaacccuggauaccgcguauaucagauugauggaaacuauagcggaagcagccacgucguacuugaccacgaaacguacauucugaaucugacccaggccaauaucccuggggccauuccccauuggcaacuucuguacagggcuagggaaacauauggucugccuaacacuuugcccacggcguggcauaaccucguguaucgcaugcgcggugauaugcaauuguuccagacguucugguuuuuguaccauaaggggcacccaccguccgagccgugcggaacccccugccgccucgcgacacugugcgcccaguugucggcuagagcagacucccccgcucucugucggcaucuuaugcccgacgggucccuccccgaagcgcagucgcuuuggcccaggccgcuguuuuguuaaugagcugccuucugcggggcuugccuucuggccaugcccuucuucucucccuugcaccuguaccucuuggucuuugaauaaagccugaguaggaag

SEQ ID NO: 12157 - RNA, 1896 nt, Artificial Sequence
  derived and/or modified sequence
augccucgguauggcgcuucguugagacaguccugcccacgauccggcagggaacaaggccaggacggaacggcaggggcucccggguuacuuuggaugggacucgugcuggccuuagcucucgcacuggcauuagcacuggcacucucagacagucgugugcugugggcaccagcagaggcgcauccuuuauccccacaggggcaucccgcucgcuuacacaggauuguaccgagauuacgugacgucuucggauggggaaaucugaccugcccuauuugcaaaggacuguucacggcuauaaaccugggguugaaaaaagaaccaaacguagcucgggugggaucugucgccaucaagcugugcaauuuguuaaagauagcaccaccagccgugugucaaaguauugugcacuuguuugaagacgauaugguggagguguggcgccgaucgguccuuucuccuagcgaagcuuguggccugcuucuggggucuacgugcggucauugggacauuuucuccucuuggaacauuagucuaccaaccgucccaaagcccccccccaagccuccaucucccccagcaccuggcgcccccgugucuagaauucuguuccugacagacuugcacugggaucaugauuaccucgaggguacugaccccgacugcgccgacccucuaugcugucgccggggcucuggacugccaccagcaagccgccccggggccgguuacuggggggaauauucuaaaugcgaucugccacucaggacccuggagaguuugcugagcggccuggggccugcuggaccauucgacauggucuauuggacaggcgauauacccgcacaugacguguggcaccagacaaggcaggaucagcugagagcccuuaccacaguaacagcacucgugaggaaauuuuuaggaccugucccuguguacccugccguggguaaucacgaguccacucccgugaauagcuuuccaccaccauuuaucgagggcaaucauagcagucgauggcucuaugaagcaauggccaaggccugggagccauggcuccccgcugaggcccuucgcacccucaggauuggcggauuuuaugcucuuuccccuuacccgggauugcgccugauuagccucaauaugaacuuuugcagccgggagaauuucuggcuccuuauaaacagcacagaccccgcaggacaacuucaguggcuuguuggagaacugcaggcugccgaggaccggggugacaagguucauaucaucggacacaucccaccggggcacugccuaaaaagcugguccuggaacuauuauagaaucguggcuagguaugagaauacacuggcugcucaauuuuuuggccacacucauguugacgaauucgagguguucuaugacgaggaaacacucagcagacccuuggcugucgcauuuuuggcuccauccgccacaacauacauuggccucaacccuggguacagaguguaccagaucgauggaaacuauaguggcuccucucacguggugcuugaccacgagacuuauauccugaaucuuacacaagccaauauaccuggggccauuccucauuggcaguugcuuuaucgagcucgcgaaacauacgggcuuccaaacacacugcccacugccuggcauaaucuaguauaccgcaugagaggagacaugcagcucuuucaaacuuucugguucuuauaccauaaagggcacccccccucagagccaugcggaacccccugccgccuggcaacauuaugcgcucagcuguccgcccgugccgauucucccgccuugugucgccauuugaugccugaugggagccuuccggaagcacagucccuguggccacguccucucuucuguuag

SEQ ID NO: 12158 - RNA, 1896 nt, Artificial Sequence
  derived and/or modified sequence
augccccgcuacggagccuccuuacgacaaagcugucccagaagcgguagggaacaggggcaagaugggacagccggugcacccggacugcuauggaugggccugguucuggcacuggccuuggcucucgcacuagcacuugcgcugagugauucucgcguucugugggccccggcagaagcucacccccuaucgccacaaggucauccggccaggcuacaucguaucguccccagacugagagauguauucgguugggguaaucucaccuguccaaucugcaaaggccucuuuacugccauuaaccuaggucuaaaaaaggaaccgaacguggccagagucggcuccguggcuauaaaauugugcaaucuguuaaagauugcccccccagcagucugccaaucaaucgugcauuuguuugaggaugacaugguggaaguguggcgaagaucagucuugucccccagcgaagccugcgggcuguuacucgggagcaccugcggccacugggacaucuucucuaguuggaauaucucacugccuaccgugccuaaaccaccaccuaaaccuccaagcccacccgccccuggcgcccccgugagccgcauccucuuuuugaccgaucuccacugggaucacgacuaccuagaaggcaccgaucccgacugugcagacccucuguguugccggcgcggguccggucuaccccccgcaucccgcccaggcgccggauacuggggugaguacuccaaaugcgaucuccccuuacggacgcuggaaucucuuuugucaggcuuaggccccgcugggcccuuugauaugguguauuggacaggcgacauccccgcccaugacguauggcaucagacacgccaagaucagcuucgcgcccugacaacaguuaccgcccuuguuagaaaguuucuuggacccguucccguguacccugcagugggcaaucaugaaucaacaccagugaacucguuccccccuccuuucaucgagggcaaucacucuucgcggugguuauaugaggccauggcaaaagcuugggagcccuggcugccggcugaggcgcugcgaacccucagaaucgguggcuucuacgcccucucgcccuacccuggauuacgauugaucagccugaacaugaauuucugcucuagagagaauuuuugguuacugauaaacucaacagauccugccggccaacuacagugguuaguaggugagcugcaggccgccgaggacagaggagauaagguccacaucauaggacauaucccccccgggcauuguuuaaagucauggaguuggaauuacuaccggauugucgcccgauacgagaauacuuuggccgcacaauucuucgggcauacacacguugacgaauucgagguauucuaugaugaggagacccuaagccguccucucgcuguggccuuuuuggccccuuccgcaaccacguacaucggacugaacccagguuaccguguuuaccagauagauggaaacuauaguggaagcucucauguuguucucgaccacgaaaccuauaucuuaaaccuuacucaggcaaauauucccggugcgauuccccauuggcagcuccucuaccgcgcacgggaaaccuauggacuaccgaauacccugccuaccgcauggcacaaccugguguauagaaugcgcggcgacaugcaauuguuccaaacuuucugguuccuuuaccacaagggucacccaccuucggagccgugcggcaccccuugccggcuggccacacuaugcgcucaacucagugcccgcgccgacucccccgcccugugcagacaucugaugccggacgguucacugccagaagcccagucucuguggccccgaccucuguuuugcuag

SEQ ID NO: 12159 - protein, 703 aa, Artificial Sequence
  derived and/or modified sequence
MRLPDLRPWTSLLLVDAALLWLLQGPLGTLLPQGLPGLWLEGTLRLGGLWGLLKLRGLLGFVGTLLLPLCLATPLTVSLRALVAGASRAPPARVASAPWSWLLVGYGAAGLSWSLWAVLSPPGAQEKEQDQVNNKVLMWRLLKLSRPDLPLLVAAFFFLVLAVLGETLIPHYSGRVIDILGGDFDPHAFASAIFFMCLFSFGSSLSAGCRGGCFTYTMSRINLRIREQLFSSLLRQDLGFFQETKTGELNSRLSSDTTLMSNWLPLNANVLLRSLVKVVGLYGFMLSISPRLTLLSLLHMPFTIAAEKVYNTRHQEVLREIQDAVARAGQVVREAVGGLQTVRSFGAEEHEVCRYKEALEQCRQLYWRRDLERALYLLVRRVLHLGVQMLMLSCGLQQMQDGELTQGSLLSFMIYQESVGSYVQTLVYIYGDMLSNVGAAEKVFSYMDRQPNLPSPGTLAPTTLQGVVKFQDVSFAYPNRPDRPVLKGLTFTLRPGEVTALVGPNGSGKSTVAALLQNLYQPTGGQVLLDEKPISQYEHCYLHSQVVSVGQEPVLFSGSVRNNIAYGLQSCEDDKVMAAAQAAHADDFIQEMEHGIYTDVGEKGSQLAAGQKQRLAIARALVRDPRVLILDEATSALDVQCEQALQDWNSRGDRTVLVIAHRLQAVQRAHQILVLQEGKLQKLAQLQEGQDLYSRLVQQRLMD

SEQ ID NO: 12160 - DNA, 2112 bp, Artificial Sequence
  derived and/or modified sequence
atgagactgcccgacctgagaccctggaccagcctgctgctggtggacgccgccctgctgtggctgctgcagggccccctgggcaccctgctgccccagggcctgcccggcctgtggctggagggcaccctgagactgggcggcctgtggggcctgctgaagctgagaggcctgctgggcttcgtgggcaccctgctgctgcccctgtgcctggccacccccctgaccgtgagcctgagagccctggtggccggcgccagcagagccccccccgccagagtggccagcgccccctggagctggctgctggtgggctacggcgccgccggcctgagctggagcctgtgggccgtgctgagcccccccggcgcccaggagaaggagcaggaccaggtgaacaacaaggtgctgatgtggagactgctgaagctgagcagacccgacctgcccctgctggtggccgccttcttcttcctggtgctggccgtgctgggcgagaccctgatcccccactacagcggcagagtgatcgacatcctgggcggcgacttcgacccccacgccttcgccagcgccatcttcttcatgtgcctgttcagcttcggcagcagcctgagcgccggctgcagaggcggctgcttcacctacaccatgagcagaatcaacctgagaatcagagagcagctgttcagcagcctgctgagacaggacctgggcttcttccaggagaccaagaccggcgagctgaacagcagactgagcagcgacaccaccctgatgagcaactggctgcccctgaacgccaacgtgctgctgagaagcctggtgaaggtggtgggcctgtacggcttcatgctgagcatcagccccagactgaccctgctgagcctgctgcacatgcccttcaccatcgccgccgagaaggtgtacaacaccagacaccaggaggtgctgagagagatccaggacgccgtggccagagccggccaggtggtgagagaggccgtgggcggcctgcagaccgtgagaagcttcggcgccgaggagcacgaggtgtgcagatacaaggaggccctggagcagtgcagacagctgtactggagaagagacctggagagagccctgtacctgctggtgagaagagtgctgcacctgggcgtgcagatgctgatgctgagctgcggcctgcagcagatgcaggacggcgagctgacccagggcagcctgctgagcttcatgatctaccaggagagcgtgggcagctacgtgcagaccctggtgtacatctacggcgacatgctgagcaacgtgggcgccgccgagaaggtgttcagctacatggacagacagcccaacctgcccagccccggcaccctggcccccaccaccctgcagggcgtggtgaagttccaggacgtgagcttcgcctaccccaacagacccgacagacccgtgctgaagggcctgaccttcaccctgagacccggcgaggtgaccgccctggtgggccccaacggcagcggcaagagcaccgtggccgccctgctgcagaacctgtaccagcccaccggcggccaggtgctgctggacgagaagcccatcagccagtacgagcactgctacctgcacagccaggtggtgagcgtgggccaggagcccgtgctgttcagcggcagcgtgagaaacaacatcgcctacggcctgcagagctgcgaggacgacaaggtgatggccgccgcccaggccgcccacgccgacgacttcatccaggagatggagcacggcatctacaccgacgtgggcgagaagggcagccagctggccgccggccagaagcagagactggccatcgccagagccctggtgagagaccccagagtgctgatcctggacgaggccaccagcgccctggacgtgcagtgcgagcaggccctgcaggactggaacagcagaggcgacagaaccgtgctggtgatcgcccacagactgcaggccgtgcagagagcccaccagatcctggtgctgcaggagggcaagctgcagaagctggcccagctgcaggagggccaggacctgtacagcagactggtgcagcagagactgatggactag

SEQ ID NO: 12161 - DNA, 2112 bp, Artificial Sequence
  derived and/or modified sequence
atgagacttccggaccttcggccttggaccagtctgcttctagtggatgccgcgcttctgtggcttttgcagggtcccctggggactctgctgccccaaggactcccaggactgtggctcgaaggcacactgaggcttggcgggctctggggccttctgaaactgaggggcctcctcgggtttgtcgggacactactgctgccactgtgtctggccacacccctgacggtttccctgagggccctggttgccggcgcctcaagggctcccccagccagagtggcgtccgccccatggtcttggctgcttgtggggtacggcgctgcaggcctgtcttggagcttatgggctgtgttatcacctccgggggcccaggaaaaagaacaggatcaagttaacaacaaagttctaatgtggagactgctgaagctttcacgacctgatttacccctgttggtggcagcctttttctttctggtgcttgccgtgctgggcgagactctgatcccacactatagcggtcgggtcattgatatcttgggaggtgattttgatccccatgcttttgcctccgccatcttctttatgtgcctcttttcgtttggatcgtctctgagcgccggatgtcgcggaggctgtttcacatacactatgtccaggataaacctgcgcattcgcgagcaattatttagttctctgctgcgccaagatctcggcttcttccaggagacgaaaaccggcgagttgaattctaggctatcgagcgacacaaccctcatgtccaattggttacctctcaacgctaacgtcctgcttcggagtcttgtcaaggtggtggggctttacggcttcatgttgtcaatcagccccagactcaccttgctgtcactccttcacatgccgttcacaatcgcggctgagaaagtatataacacacggcatcaggaagtcctgcgtgagatccaggacgccgtagcaagagctggccaagttgtgcgggaagcagtgggggggttgcagactgtcagaagcttcggcgcggaagaacacgaggtgtgtcggtacaaagaagcgttggagcaatgccggcagttgtattggcgcagggacctcgagcgcgcactctacctgcttgtgaggcgagtgctccacctaggtgtgcagatgcttatgcttagctgcgggttgcaacagatgcaagacggagaactcacgcagggatctctactctcttttatgatctatcaggagtccgtcggctcctacgtgcagactctggtgtatatctatggcgatatgctgtctaacgtgggtgccgcagaaaaggtattctcttacatggaccggcaaccaaatctgcctagcccggggaccttagccccaaccactctgcagggagtggtgaaatttcaggacgtgagttttgcataccccaaccggcctgatcggcctgtgctgaagggactcacctttactctgcgccctggtgaggtgacagcactggtggggccaaatggctcaggtaagtccaccgtagcggcgcttcttcagaatctgtatcagcccactgggggacaagtcctgctcgatgaaaaacccatttcccaatacgagcattgttacttgcacagtcaagttgtatccgtcggtcaggagcccgtgttgttttccgggtcggtgaggaataacatcgcttatggattacagagctgcgaggacgacaaagtcatggccgctgcccaggcggcgcacgcagatgactttattcaggaaatggaacacggtatttataccgatgtcggagaaaaaggttcacaactcgccgccggccagaaacagcgcctcgcaatcgctcgagctctggtccgagaccctcgcgtgctcatcctggatgaggcaacatccgctcttgatgtacagtgtgagcaggccctgcaagattggaatagcaggggcgatcgcacagtattagttatcgcccaccgcctgcaggccgttcagagggcacaccagatcctcgtgttacaggaagggaagctgcagaagctggctcagctccaagagggccaagacctgtattctcgactggtgcagcagaggctgatggactag

SEQ ID NO: 12162 - DNA, 2112 bp, Artificial Sequence
  derived and/or modified sequence
atgagactcccagacctccgcccatggacatcacttttgcttgtcgacgcagccctactgtggctgctgcagggccctctcggtacactgttacctcaaggattgccgggattgtggctggagggaactctgaggctgggaggactttgggggctgctaaagctgcgaggtctcctgggattcgtggggactttgttgctcccactgtgtttggcaactccactgaccgtctcacttagggcactggttgcaggcgccagtcgtgcgccccctgctcgcgtggcctctgccccatggtcctggctgcttgtaggctatggcgcagcaggacttagctggagcctttgggcagtgctgtctccacctggagcacaggagaaggaacaggatcaggtgaacaacaaggtcttaatgtggaggttgctgaagctgagcaggcctgatttaccactgctggttgctgcctttttcttcctggtgctggcagtgctgggggagaccctgatcccacactactccgggcgtgtgatcgatattctgggtggggacttcgatcctcacgctttcgcttcagctatcttcttcatgtgcctcttcagcttcgggagctccctttccgctggatgtcggggtgggtgcttcacatataccatgtcacggatcaacctgcgcatacgagagcagcttttttcttccctgcttcgtcaagacctcggatttttccaggaaacaaaaactggcgagctcaatagtcggcttagcagcgacacaaccctcatgtctaactggctcccgctgaacgctaacgtactcctgcgaagtctggtaaaggttgtgggcctttacgggttcatgctctcgatttcaccccgtctgactctgctctcgctgctgcatatgccgttcaccattgcggccgaaaaggtgtacaatactaggcaccaagaagtcctgcgagaaatacaggacgccgtggcacgggcagggcaggtcgtgagagaggcagttgggggcctccagaccgtgcggagttttggggccgaggaacatgaggtgtgccggtataaagaagccctggaacagtgccggcagctgtactggaggcgagatctggagagagctctgtatcttctggtgagacgggtgttacaccttggtgtgcagatgctgatgctgtcctgcggactgcaacagatgcaggacggcgagcttacccagggttccctgctctcatttatgatctaccaagagagcgtgggatcttacgtacagaccctagtgtatatttacggggacatgttatccaacgtgggggctgcagaaaaggtgttcagctatatggaccgtcagcctaacctgccaagccccggaaccctcgctccaactacccttcagggagtggtgaaattccaagacgtgtcttttgcctatcctaatcgccctgacaggcccgtcctgaaaggtctcactttcacgcttaggcctggagaggtcaccgccctggtggggcctaatgggtcaggcaaatcaacggttgcagccctgcttcaaaacctatatcagcctaccggagggcaagtcctccttgacgaaaaacccatatcacaatacgagcattgctacctgcactcacaggtagtctccgtcggccaagagcccgtgcttttcagcggaagtgttcggaacaatattgcctatggactgcagtcgtgtgaggatgataaagtgatggcagccgcacaagccgcccacgccgatgactttatacaggagatggagcacgggatctacaccgatgtaggggagaaagggagccagctggcagccggacagaaacagcgccttgccattgcccgcgccctggtgcgggaccccagggttctcatcctggacgaagcgactagcgcgctggacgtgcaatgtgagcaggccctacaggattggaattctagaggggatagaaccgtgctcgtgatcgcgcatcgcttgcaggccgtgcagcgggctcatcaaatactggtcctccaagaaggcaaactgcaaaagcttgcccagctgcaggaaggccaggacttatacagtcgtctcgtccagcaacgtctgatggactag

SEQ ID NO: 12163 - DNA, 2112 bp, Artificial Sequence
  derived and/or modified sequence
atgagattgcccgacctacgtccctggacctctcttctgttggtggatgctgccttactgtggttacttcagggaccactaggcaccttgctgccgcaggggctgccagggctgtggcttgaaggaacgcttcggttgggtggactgtggggattactgaaactgcgaggtctgcttggatttgtggggaccctcctgctcccgttgtgcctcgcgaccccgctaacggtgagccttcgggcccttgttgccggagcctcgcgggcgccccctgcccgggtggcctctgcaccctggagctggctgctcgtgggttacggcgccgctggactctcctggtctctgtgggcagtacttagcccgcctggagctcaggagaaggagcaagaccaggtcaataacaaagtgcttatgtggcgcctcctgaaactgtcccgacctgatctcccactactcgtggcggcgttcttcttcctggtgttggccgtactgggagaaaccttgatacctcactatagcggccgcgtcattgacatccttggaggcgattttgatcctcatgcctttgcctctgcaatattttttatgtgcctcttcagctttggatcgagcctgagtgctggatgcaggggcggatgcttcacatatactatgagtaggatcaatctccgaatcagagagcagctttttagctctttattacgccaagatctgggcttctttcaggagacaaaaacaggggaactgaactcacgattgtcttccgatactaccctaatgtccaactggctccctctcaacgccaatgtgctgctgcgcagtctcgttaaggtggtggggctgtatgggttcatgttgtctatctcgccccggctcaccctcctgtctcttctccacatgccattcactattgctgccgagaaggtgtacaatacccgacatcaggaagttctgcgcgagatacaggacgctgtggctagggctggtcaggtagttcgagaagcggtgggtggcctccagacggtgcgcagctttggggctgaggagcatgaagtgtgtaggtacaaagaagctctggaacaatgcagacagttatactggagacgggacctggagcgtgcattgtacttacttgtcagaagggtgctgcatctgggagtgcaaatgctgatgctgtcctgcggccttcaacagatgcaggatggggaacttacacagggttctctccttagcttcatgatttaccaggagagcgtcggtagctatgtccaaacgctcgtttatatctatggtgacatgctctctaacgtgggtgcggccgagaaagtcttctcctatatggaccggcagcctaaccttccatcgccaggcacgctggcacccacaaccttgcagggagtcgttaagttccaagacgtaagctttgcttacccgaatcggcccgacaggcccgtgttaaagggcttaacttttaccctgagacccggggaggttacagcccttgtgggtcccaacggaagcggaaaaagtacagttgcagccctcctgcagaatttgtaccaaccgactggggggcaagtcttactggatgaaaagccaatttctcagtacgaacactgctatttacactcacaggtcgtctcggtgggacaggaaccagtgttgttctcaggtagtgtcaggaataatatagcttatgggctgcagtcttgtgaagatgacaaagtgatggccgccgctcaggccgcacacgccgatgatttcatccaagagatggaacatggtatctacaccgatgtgggcgagaagggctcacagttggccgccgggcagaaacagcggctcgcaattgcaagggccctcgtcagggatcctcgggtgctaattctcgatgaggcaacaagtgccctggacgtgcaatgtgaacaggcacttcaagactggaactctcgaggcgatcgtacggttctggtcatcgcacaccgcctccaagcagtgcagcgcgcacaccaaatcctggtgttgcaagagggaaagttacagaagttagcccaactgcaggagggtcaggacttgtactccagactggtccaacaacggctcatggactag

SEQ ID NO: 12164 - DNA, 2112 bp, Artificial Sequence
  derived and/or modified sequence
atgaggctgcctgacctgcggccctggaccagcctgctgctggtggatgctgccctgctgtggctgctgcagggccccctgggcaccctgctgccccagggcctgcccggcctgtggctggagggcaccctgcggctgggcggcctgtggggcctgctgaagctgcggggcctgctgggctttgtgggcaccctgctgctgcccctgtgcctggccacccccctgactgtgtccctgcgggccctggtggccggggccagccgggcccccccagcccgggtggccagcgccccctggagctggctgctggtgggctacggggctgctggcctgtcctggagcctgtgggccgtgctgagccccccaggggcccaggagaaggagcaggaccaggtgaacaacaaggtgctgatgtggaggctgctgaagctgagcaggccagacctgcccctgctggtggccgccttcttcttcctggtgctggccgtgctgggggagaccctcatcccccactacagcggccgggtgattgacatcctgggcggggactttgacccccacgcctttgccagcgccatcttcttcatgtgcctcttctcctttggcagcagcctgtctgctggctgccggggcggctgcttcacctacaccatgagccgcatcaacctgcgcatccgggagcagctgttcagcagcctgctgcggcaggacctgggcttcttccaggagaccaagacaggagagctgaacagccggctgagcagtgacaccaccctgatgagcaactggctgcccctgaatgccaacgtgctgctgcggagcctggtgaaggtggtgggcctgtatggcttcatgctgagcatcagcccccggctgaccctgctgagcctgctgcacatgcccttcaccatcgctgctgagaaggtgtacaacaccaggcaccaggaggtgctgcgggagatccaggatgctgtggcccgggccggccaggtggtgcgggaggccgtgggcggcctgcagacagtgcgcagctttggagctgaggagcacgaggtgtgccgctacaaggaggccctggagcagtgccggcagctgtactggaggcgggacctggagcgggccctgtacctgctggtgcggcgggtgctgcacctgggcgtgcagatgctgatgctgagctgtggcctgcagcagatgcaggatggagagctgacccagggcagcctgctgtccttcatgatctaccaggagagcgtgggcagctatgtgcagaccctggtgtacatctacggggacatgctgagcaatgtgggcgctgctgagaaggtgttctcctacatggaccggcagcccaacctgcccagccctggcaccctggcccccaccaccctgcagggcgtggtgaagttccaggatgtgtcctttgcctaccccaacagaccagacaggcctgtgctgaagggcctgaccttcaccctgcggcctggagaggtgacagccctggtgggccccaatggaagtggcaagagcacagtggccgccctgctgcagaacctgtaccagcccactggaggccaggtgctgctggatgagaagcccatcagccagtatgagcactgctacctgcacagccaggtggtgtctgtgggccaggagcctgtgctcttcagcggctctgtgaggaacaacatcgcctacggcctgcagagctgtgaagatgacaaggtgatggctgctgcccaggccgcccatgctgatgacttcatccaggagatggagcacggcatctacacagatgtgggggagaagggcagccagctggccgccggccagaagcagaggctggccatcgcccgggccctggtgcgggacccccgggtgctgatcctggatgaggccaccagcgccctggatgtgcagtgtgagcaggccctgcaggactggaacagcagaggagacagaacagtgctggtgattgcccaccggctgcaggccgtgcagagggcccaccagatcctggtgctgcaggagggcaagctgcagaagctggcccagctgcaggagggccaggacctgtacagccggctggtgcagcagaggctgatggactag

SEQ ID NO: 12165 - DNA, 2112 bp, Artificial Sequence
  derived and/or modified sequence
atgcggctgcccgacctgcggccctggaccagcctgctgctggtggacgcagctctgctgtggctgcttcaggggcctctgggaacactactccctcagggcctgcccggcctgtggctcgagggcactctccgtctcggggggttatggggactgctgaagttgcgcggcttactggggtttgttggcacgcttctgctccccctgtgtctggccactccactgaccgtctctctccgggcactggtggctggggcctctagagcaccacccgcccgcgtcgcctccgccccctggagttggcttctcgtgggctacggcgctgccggcctgagttggagcttgtgggctgtgctgtctccacctggagcacaggaaaaagaacaagatcaggtgaacaataaagtgctcatgtggcgccttcttaaattgagtagacccgatcttccactactagtggccgcatttttcttcctggttcttgcagtgctcggcgaaacactaatcccccattactccggacgggtcattgacattctgggcggagacttcgatccccatgcgttcgcctcagccatcttctttatgtgtctcttttcgttcggctccagtctgtctgccggatgccgaggaggctgttttacctacacgatgtcgcgaattaacttacgcatcagagagcagcttttctcaagcctactgagacaggaccttgggttcttccaagagactaagacaggcgaacttaactccaggttgtcgtcggatacgacgctgatgtcaaattggctcccactgaatgccaatgtgttgctccgctctcttgtgaaagtggtgggcctttacggcttcatgctatcaatatcccctaggctcacacttttgagcctactgcatatgccctttactattgccgctgaaaaagtatacaacacgagacatcaggaagtgctgcgagaaatccaagacgcagtggcccgcgctggccaggtagttcgggaggcagtcggtggactccaaaccgtgcgctcttttggagctgaagaacatgaagtgtgccgatataaggaggcactggaacagtgcagacagctttactggaggcgcgacctggaaagggcattgtatcttcttgtgcgccgggtactacacctgggtgtgcaaatgttaatgctgagctgcgggctacagcaaatgcaggatggcgagcttacccagggttcactgctgtcctttatgatttaccaagagtcggttggatcttatgttcagacactggtctatatctatggcgatatgctgagcaacgttggtgccgccgaaaaggtattctcttatatggacaggcagcctaatctaccttcccccgggacactggccccaaccactttgcagggtgtggtaaagttccaagacgtgtcatttgcctatcccaacagaccagatcggccagtcttaaaggggttgacttttacattgcgtcctggtgaggtgacggctttggtgggcccaaacggcagtggcaagtccactgtggccgctctcctccagaacctttatcagcctacagggggccaggtgctactcgatgagaaacccattagtcagtacgaacattgttatttgcattcacaagtcgtctccgtcggccaggaacccgtgctctttagtggaagtgtgaggaacaacattgcgtacggcctgcagagttgcgaggacgacaaggtgatggccgccgcccaggctgcacatgccgacgattttattcaggagatggaacatggaatctacaccgatgtcggcgagaagggatcacagctcgctgcaggccaaaaacagcggttggctattgccagggcacttgtacgggacccccgggtacttatattggacgaagccaccagtgcacttgacgtccagtgtgaacaagccctgcaagattggaactcaagaggagaccggaccgtgttggtcattgcccacagacttcaggccgttcagcgggcccaccagatcttagtgctgcaagaaggtaagctgcagaagctggcacagctgcaggaaggacaggatctctattctcgtctggtgcagcaacgactgatggactag

SEQ ID NO: 12166 - DNA, 2112 bp, Artificial Sequence
  derived and/or modified sequence
atgcggctgcccgacctgcggccctggaccagcctgctgctggtggatgctgcactcttgtggctgctccaagggcccttggggacccttttgccacagggtctaccaggcctgtggctggaggggaccctacgcctgggagggctgtggggcctcctaaagttgcgcggtctcttaggcttcgtcggaactctgttactgcctctgtgcctggcgacccccctgacggtgtcactgcgcgccctggttgccggggcctctcgcgcaccaccagcacgggtagcatctgccccttggtcatggctgttagttgggtacggcgccgcgggcctctcctggtccctatgggccgtgctttcacctccaggggcgcaggagaaggaacaagaccaggttaataataaagtattgatgtggcgactactcaaactttcacgcccagacctgcctctgctggtagccgccttcttcttcttggtgctggccgtgctaggggagacgctgatccctcactattctgggcgtgtgatcgacatcctgggaggtgacttcgatccacacgccttcgcttcggcgattttttttatgtgtctgttttctttcgggtctagcctgtccgccggctgtaggggtggatgcttcacctacactatgtctcggataaacttgcgcatccgagagcagctgttcagcagcctactcaggcaggatctaggatttttccaggaaactaagaccggcgagctcaattcgcgtctctcctccgacactacactgatgagcaactggttaccgctgaatgcaaatgtcctcttgcgctcactggtcaaagtggtggggctttatggatttatgctgtcaatctctccgcggctgactctgctgagcttgctgcacatgcctttcactatcgctgccgaaaaggtctacaatactcggcaccaggaagtgcttcgggagatccaggatgccgtcgcccgagctggccaggtggtacgggaggctgtcggcgggctgcaaaccgttaggagctttggagccgaagaacacgaagtgtgtcgctacaaagaagctcttgaacagtgccggcagctctattggcgccgcgatctggagcgcgccctctacctgctggtgagacgggtcctgcacctgggcgttcagatgctcatgctgtcctgcggcctacagcagatgcaggacggagaacttactcagggtagtttgcttagctttatgatttatcaggaaagcgtcggctcctatgtacaaaccctggtgtacatttacggagacatgctgtctaatgttggggcagccgagaaggtctttagctatatggatcgtcaaccgaatctgccctctcctggaaccctagcccccaccactttgcagggggtggtgaagttccaagatgtgagctttgcttatccaaacagacccgataggcctgttcttaaaggtttgacattcaccctccgtccaggggaagtgacagctctagtcggtcccaacggcagtggcaagtccactgtggccgctctgttgcagaacctctatcagccaaccggaggacaggtactgctggacgaaaagcctataagtcagtacgagcattgctatctgcacagccaggtagtgagcgtcggccaggaacccgtgttgttttccggttctgtgcgtaacaacatcgcttatggcctccagagctgcgaagacgacaaggtgatggccgccgcacaggcagcccacgcggacgacttcatccaggaaatggagcatggtatttacaccgacgttggcgagaaaggttcccagctggccgctgggcagaagcagcggcttgctattgcaagggcacttgtgcgcgatccgcgagtactgatcctggacgaggctacaagcgctcttgacgtacagtgtgaacaagcactgcaagattggaattcgaggggtgataggacagtgttagtcattgcacacaggctccaggcagtacagagagcccatcagatcctcgtgctacaggaaggaaagctgcaaaaactagctcagttacaggaggggcaggatttatatagcagactggtgcagcagaggctgatggattag

SEQ ID NO: 12167 - DNA, 2112 bp, Artificial Sequence
  derived and/or modified sequence
atgcggctgcccgacctgcggccctggaccagcctgctgctggtggatgccgccttactatggctgctccagggcccactaggtactttactgcctcagggactacccggactgtggctcgaggggaccctcagactgggtgggctatggggtctactaaagctgagaggccttcttggcttcgtgggaacactgctcctgcccttgtgtctcgccacccccctcaccgtctccctccgagcactagttgccggcgctagtcgagccccacctgcccgcgttgcctccgctccatggagctggcttttggtgggatatggtgccgcaggtttgagttggagcctctgggcagtgctttcacctcctggcgcgcaagaaaaggagcaagaccaggtgaacaacaaagtgctgatgtggagactgttgaagctgagtaggccagacttacccctactggtagccgccttcttctttctggtgttagcagtgcttggcgagacgttaatcccacactacagtgggcgagtgatcgacatcctgggtggggactttgacccccacgcctttgctagcgcaatctttttcatgtgcttattcagtttcggctccagcctgagcgctggctgccgcggtggttgcttcacttatactatgtcccggattaacctaaggatccgtgaacagctgttctcctcgctgctgcgacaggatctgggcttctttcaggagacaaaaacaggggagctgaactctcggctctcatctgataccacgttaatgtctaactggctacccctgaatgccaacgtgctcttgcgatcactggtcaaagtggtgggactatatggatttatgctctcaatcagtccacggctgaccttgctgagccttttgcatatgcctttcaccatcgctgccgagaaggtgtacaacacccgacatcaggaagtgctgagagagattcaagatgcagtggccagggccgggcaagtggtaagagaggccgtgggcggccttcagaccgttcgcagttttggggccgaagagcacgaggtttgcagatataaagaagctctcgaacagtgtcgacaactctattggagacgagacctggagcgggccctgtatctgctggtccgccgtgtgctgcaccttggcgtgcaaatgctcatgctgtcatgtgggctacaacagatgcaggacggggaacttacacagggctcacttctgtcttttatgatataccaggagtctgtgggatcctatgtgcagactttagtgtatatctatggcgatatgttatcgaacgtcggtgccgccgaaaaggtgtttagctacatggatcgtcagccaaatttgccttcccccggcaccctcgcaccaaccaccttacaaggcgtcgtcaaatttcaagacgtgtcttttgcgtacccaaaccggccagaccggcctgtgttgaaaggccttaccttcactctgaggccgggcgaagtgacggccctcgtgggtcctaatggttctgggaaaagtacagtcgccgctctgctccaaaatctataccaaccaactggtggtcaggtactgctggatgaaaagccaatttctcaatacgaacactgttacctgcattcgcaggtggtttcagtggggcaggaaccagtcctgtttagcggtagtgtgcgcaataatatcgcatatggtctgcaaagttgcgaggacgataaggttatggccgccgcccaggctgcccatgcagacgacttcatccaggagatggaacatggaatctacacagatgttggagagaaaggcagccagctcgctgcaggacagaagcagcggttagctatcgcaagagccctagtgcgcgacccacgggtattgatactcgatgaagctacctcagctctcgacgtgcagtgtgagcaggccctgcaggactggaactcaaggggtgatcgtacggtgctggtcatcgctcaccggttgcaggcagtgcagagggcccaccagatcctcgtgctgcaggagggaaagctccagaaactcgctcagctgcaggagggtcaggatctttactcgcggctggtgcagcagaggttgatggactag

SEQ ID NO: 12168 - DNA, 2112 bp, Artificial Sequence
  derived and/or modified sequence
atgcggctgccagatctcagaccctggacgtccctgttactagttgacgccgctctcctgtggctgctgcagggccctctcggcactctcctgcctcaggggctgccaggtctgtggctggaaggaacattaagactgggaggattatggggcctgctgaaactgagaggacttctcggcttcgtcggcacattgctgctgcccttatgtcttgccaccccactgacagtgagcctgcgggctctggtggcgggtgcctcccgggctcctcctgcaagagttgcatccgcgccatggtcatggctcctggtcggctacggcgctgcaggtttgagctggtcactctgggcagtgctctcccctccaggtgctcaggagaaagagcaggaccaggtgaataataaagtcctgatgtggagactactcaaacttagcaggccagacctgcccctgctcgtggcagcctttttcttcttggtactcgctgtgctgggggagaccctgataccccattactctgggcgtgtcatcgatatcctggggggagattttgatccccacgctttcgcaagcgccattttttttatgtgcctgttttcgttcgggagctccttgagtgctggctgtcgcggaggttgttttacatacacaatgtcaagaattaatctgcgcatccgggaacagcttttcagctccctgttgcgccaagacttgggattttttcaagagacaaagacaggtgagctgaattcaagattgtccagcgatactactctcatgagtaactggctcccccttaatgccaacgtgctgctgagatccttggtaaaagtagttgggctctatggattcatgctgagcatttctcctcgactgaccctgcttagtttgcttcacatgccatttactatagcagctgagaaagtgtataacacaaggcatcaggaggtgctgagggagatccaggacgccgttgctcgcgctggacaagttgtgcgagaggcggtgggcggtctgcaaactgtacgctcctttggtgccgaagaacatgaggtgtgtcgatacaaggaggcactcgaacagtgtagacagctgtattggcggcgtgatctggagcgcgcactttacctcctcgtccggagggtcttgcatctgggtgtccagatgcttatgttgtcctgcggcctgcagcagatgcaggacggcgagctgacgcaggggagcttactttctttcatgatttatcaggagagtgtgggatcttacgttcagactctggtctatatttacggcgatatgctatcaaatgtgggcgcagccgagaaggttttcagttacatggaccgtcaacctaatctccccagtcctggtaccttagcacccactacgttgcaaggcgtcgtcaagtttcaggacgtaagtttcgcttacccaaatagacctgatcgcccagtccttaagggcctgactttcactctaaggccgggagaggtgaccgcattggtgggaccaaatggctcaggaaagtccacggtagctgcgctcctgcagaacctttatcagcctactggaggtcaggtgctactcgacgaaaagcctatcagccagtacgaacactgttatcttcacagccaggtggtatccgtggggcaggaaccggtgctcttttccggttccgtgcgcaacaatatcgcttacggcctacagtcttgtgaagacgataaagtcatggcggctgctcaggcggctcatgcagacgactttatccaagagatggagcatgggatctacaccgatgtcggagagaaaggttcacagctggccgcagggcaaaagcagagactggccattgcacgcgctctggttcgggaccctcgggtgctgattctcgatgaggccacatcggcgctggatgtccagtgtgagcaggcgctgcaggattggaacagtagaggagacagaaccgtgctcgtaatcgcccatagactgcaggctgttcagagggcccatcagatcctagtcctgcaggaggggaagctccaaaaactcgcacagcttcaggaaggtcaggatctctatagcaggctcgtgcagcagcgcctgatggattag

SEQ ID NO: 12169 - DNA, 2112 bp, Artificial Sequence
  derived and/or modified sequence
atgcgcctcccagatttgagaccatggacctccctgctgctggtggatgcagccttactgtggctcctgcagggtccactcggcactttgttaccacagggtctgcccggactgtggcttgagggcaccctgaggctcggaggcctctggggtcttctgaagctgagggggttgttggggtttgttgggacccttctccttcctctgtgcctggccactcctctcaccgtgtcccttcgggctcttgtcgcaggagcatcaagggccccaccagcacgagtggcatccgccccatggagttggctgttagttggctacggggctgccggtctatcatggtcactgtgggccgtgctcagccctcccggagcacaggaaaaggagcaggaccaagtcaataacaaggtacttatgtggaggctgcttaaactgagcagacccgacctgcccttgctggttgccgctttcttctttctcgttttggcagtgctcggtgagaccttaatccctcattattccggccgtgtcatcgatattctcggcggtgatttcgacccccacgcttttgcaagcgcaatattcttcatgtgcctttttagtttcggttcatctctttcagccggatgtcggggaggctgctttacatatacgatgagccgcattaatcttcgaattcgtgaacagttgttctcctcactactgcggcaggacctaggctttttccaggagaccaagacaggggaactgaatagccggctgtcttcagatacaacgttgatgtccaactggctgcccttaaacgccaacgtgcttctgcgttctctggtgaaggtcgtgggcctgtacggttttatgcttagcataagtcccagattgaccctgctgagcctcctgcacatgcccttcacgatagctgctgagaaagtgtacaacactaggcaccaggaggtgctccgggaaatccaggacgcggtagccagagcaggtcaggtagtgcgggaagcggtcgggggactgcagacggtgcgttcttttggagccgaggagcacgaagtctgccgctacaaagaggctctggagcaatgtaggcaactgtactggcgtcgcgatttagaacgggctctttatctgcttgtgcggagagtgcttcacttgggtgtgcaaatgttgatgctgtcctgtggcttacagcagatgcaggatggagagttgacacaggggagccttctgtcattcatgatatatcaggaaagtgtcggctcctacgttcaaacactagtgtatatctacggcgatatgttgagcaacgtgggcgcagcagaaaaggtctttagctacatggaccgccaacctaacctgcctagtcctggcaccctggctcctaccactctacagggcgtggtgaagtttcaggacgtgtccttcgcctaccccaataggccagaccgaccagtcctgaagggcctgacatttacacttaggccaggcgaagtcaccgccttggtcggccctaacggtagcggcaagtcaactgtggccgctctattgcagaacctgtaccagcctaccggcggacaggtgctcctcgacgaaaaaccaatctcacagtacgagcattgctatctacactctcaggtcgtgtcggtggggcaagagccagtgctgttcagtgggagcgtgagaaataacattgcatacgggctccagtcctgcgaagacgacaaggtgatggcggctgcacaggcagcacatgctgacgattttatacaggaaatggagcatggaatctacactgacgtgggagagaaggggtcccagctcgcggctgggcaaaagcagcggctggctattgctcgcgcactcgtgcgcgatccacgagtgctcatcctcgacgaagcaacttccgccctggacgtgcagtgtgagcaagcactccaggattggaattcacgcggagataggacagtgctcgttattgctcacagactgcaggccgtgcaacgcgcacatcagatccttgtgttgcaagagggcaagctgcagaaactcgcacaactgcaggagggacaggatctttactctagactggtgcagcagcgtctaatggactag

SEQ ID NO: 12170 - DNA, 2112 bp, Artificial Sequence
  derived and/or modified sequence
atgagactgcctgatctaagaccttggaccagtctgttgcttgtcgacgcagccctactgtggctactacaggggcctctgggtactctactccctcagggcctgccgggactgtggctggaagggacgctcagactcggtggactgtggggccttctgaagcttagaggattgctcggcttcgtaggcactctcttgctgccactctgtctcgccactccactgacagtctcactcagagcactggtggctggcgcttccagggcaccccctgccagggtagcatccgcgccatggtcatggttgctggtgggttacggagcggcaggtcttagctggtccctgtgggctgtcctaagtccccctggcgctcaggagaaagagcaggatcaggttaataacaaggtgcttatgtggcgtctgctgaaactgagccgaccagacctgcctctgctggttgccgcttttttctttctggtgctggccgtgctgggcgagacccttattccacattattccgggagagttatcgacatcttaggcggtgatttcgacccacacgcttttgcgtctgctattttctttatgtgcctgtttagctttggcagttctctcagcgctggttgcagaggaggctgctttacatataccatgtcacgtatcaacctacgtatccgagagcaactgttctcctcgctcctgcgccaggacctgggcttcttccaggagaccaaaacgggagagttgaacagtagactgtcttcggacaccactctgatgagtaattggctgcctctgaatgcgaacgtgctgctgagatctctggttaaggttgttggtctatacggcttcatgctctctatatctccacggcttactctgctgtctctgctacatatgccgttcactatcgctgctgagaaagtgtataacacgaggcatcaggaggtattaagagaaatacaagacgccgtggcgagggcgggtcaggtggtgagagaagctgtggggggtctacaaactgtgcggtcattcggggctgaggaacacgaagtctgtaggtacaaggaagccctcgagcagtgcagacaactttactggcggagagacctggaacgtgccctgtacctccttgtcagacgcgtcctgcacttgggcgtccagatgctgatgctttcgtgtggcttgcaacaaatgcaggatggcgaactgacacaagggtcacttctgagttttatgatatatcaggaatcagtaggctcgtacgtccagaccttggtgtatatatacggggatatgctgagcaatgtcggagcagctgagaaagttttctcttatatggacaggcagccaaacctacccagtcccggtaccctggctcctacaaccctgcagggagttgtcaagtttcaggacgtctcttttgcataccccaatagaccagatcgtcccgtactgaaggggctcaccttcacgctccgtcccggagaagtgactgccttagttggacctaatggatccgggaagtccaccgtggccgctctgctccaaaatctttaccagccgacgggtggccaggtactgttagatgaaaaacctatttctcagtacgaacactgctatctccacagccaggtggtgagtgtggggcaggagccagtcttgttttcaggatccgtgcggaataatatcgcgtacgggcttcagtcctgcgaggatgataaggtgatggcagcagcccaagccgctcacgccgatgactttatccaggagatggaacacggtatttacaccgatgtaggcgagaagggctcacaactggccgctgggcaaaagcagaggctcgcaatcgctcgggctctcgtgcgtgatcctagagtcctgatattggacgaggccacatcagcgctggacgtgcagtgcgagcaagccctccaggattggaatagccggggtgaccgcaccgtcttggtcatcgcccacaggctccaggccgtgcaacgcgcacatcagatacttgtcctacaggagggcaaactccagaaactggcgcaactgcaagagggccaggatctctattcacggctcgtgcagcaacgactcatggattag

SEQ ID NO: 12171 - DNA, 5684 bp, Artificial Sequence
  derived and/or modified sequence
gagccctgacgcccgccctggccgagcgtagctggcggaccagagccggtagcgaggttgggagagacggagcggacctcagcgctgaagcagaagtccccggagctgcggtctccccgccgcggctgagccatgcggctccctgacctgagaccctggacctccctgctgctggtggacgcggctttactgtggctgcttcagggccctctggggactttgcttcctcaagggctgccaggactatggctggaggggaccctgcggctgggagggctgtgggggctgctaaagctaagagggctgctgggatttgtggggacactgctgctcccgctctgtctggccacccccctgactgtctccctgagagccctggtcgcgggggcctcacgtgctcccccagccagagtcgcttcagccccttggagctggctgctggtggggtacggggctgcggggctcagctggtcactgtgggctgttctgagccctcctggagcccaggagaaggagcaggaccaggtgaacaacaaagtcttgatgtggaggctgctgaagctctccaggccggacctgcctctcctcgttgccgccttcttcttccttgtccttgctgttttgggtgagacattaatccctcactattctggtcgtgtgattgacatcctgggaggtgattttgacccccatgcctttgccagtgccatcttcttcatgtgcctcttctcctttggcagctcactgtctgcaggctgccgaggaggctgcttcacctacaccatgtctcgaatcaacttgcggatccgggagcagcttttctcctccctgctgcgccaggacctcggtttcttccaggagactaagacaggggagctgaactcacggctgagctcggataccaccctgatgagtaactggcttcctttaaatgccaatgtgctcttgcgaagcctggtgaaagtggtggggctgtatggcttcatgctcagcatatcgcctcgactcaccctcctttctctgctgcacatgcccttcacaatagcagcggagaaggtgtacaacacccgccatcaggaagtgcttcgggagatccaggatgcagtggccagggcggggcaggtggtgcgggaagccgttggagggctgcagaccgttcgcagttttggggccgaggagcatgaagtctgtcgctataaagaggcccttgaacaatgtcggcagctgtattggcggagagacctggaacgcgccttgtacctgctcgtaaggagggtgctgcacttgggggtgcagatgctgatgctgagctgtgggctgcagcagatgcaggatggggagctcacccagggcagcctgctttcctttatgatctaccaggagagcgtggggagctatgtgcagaccctggtatacatatatggggatatgctcagcaacgtgggagctgcagagaaggttttctcctacatggaccgacagccaaatctgccttcacctggcacgcttgcccccaccactctgcagggggttgtgaaattccaagacgtctcctttgcatatcccaatcgccctgacaggcctgtgctcaaggggctgacgtttaccctacgtcctggtgaggtgacggcgctggtgggacccaatgggtctgggaagagcacagtggctgccctgctgcagaatctgtaccagcccacagggggacaggtgctgctggatgaaaagcccatctcacagtatgaacactgctacctgcacagccaggtggtttcagttgggcaggagcctgtgctgttctccggttctgtgaggaacaacattgcttatgggctgcagagctgcgaagatgataaggtgatggcggctgcccaggctgcccacgcagatgacttcatccaggaaatggagcatggaatatacacagatgtaggggagaagggaagccagctggctgcgggacagaaacaacgtctggccattgcccgggcccttgtacgagacccgcgggtcctcatcctggatgaggctactagtgccctagatgtgcagtgcgagcaggccctgcaggactggaattcccgtggggatcgcacagtgctggtgattgctcacaggctgcagacagttcagcgcgcccaccagatcctggtgctccaggagggcaagctgcagaagcttgcccagctctaggagggacaggacctctattcccgcctggtgcagcagcggctgatggactgaggccccagggatactgggccctcttctcaggggcgtctccaggacccagagctgttcctgctttgagtttccctagagctgtgcggccagatagctgttcctgagttgcaggcacgatggagatttggacactgtgtgcttttggtggggtagagaggtggggtggggtggggtgggggctgtctgtgtccaggaaacttaattccctggtgactagagctttgcctggtgatgaggagtattttgtggcataatacatatattttaaaatattttccttcttacatgaactgtatacattcatatagaaaatttagacaatataaaaaagtacaaagaagaaaagtaaaagtacccattgtttcacttcctggagataaccatagttgctattttgctgcctgtcccatcagtcgtttatctgttgtttgagatagaaattaaccaaaaatgacataaatattcatgagattgccttcctatatccttccttgttcctaccagtgtctgctattttgaagaagctagggtctggagggacagagaacagttccctgattaacagtattaatagcgacattggtaacagctaccatttatagagttttaatgggagtaggagctatgctaagtgtttttcatgtattatcgtttttaatcattatccccaaccctatgaggttggttattatccccattttacagatgaggaaactgaagctcaaagaggctcaatgactttcccaaggtggtcgtagtggtggagttggagtttgaacacaggcctgaccctagagtccacaccctgacccaatcaattatattgcatcttgggtccataaaccctaatccataatcccatcaagaaaagctctgctgctcttagctctaaataattcagaatctattctcttctctccagtcccgttgttatagtcttcactcatagacttaagatgatcccatcaccagagaggtttctctaccattagcttccctcttccggccattcttcacaaagtcatttttctaaattctgtgtcacatacgatgatggcatttctggaaattccttcaggtgctctcaagccctgctgcagagatccttttcagagcacacactgttccagcccatctgtctcaccctctcctgttgtatccagctccacgacaaacttctgccttccccaacacctttgtgcctttgcatatggtgttttcttgcccattttctgctcgactcgcccctgattttcaagttcaagacttaactcagggttcaggtcttccaggaggccttacttatgtcgtcagtctggggaactctccatgtgcttctatcactgtgcggttacctctttcacagcccttttaaagttctatcttccctttcccaccttttttgaccttccactagaccatgagcacctgggcggaaagccatatatcttattaagctttatatctgctacctggccgagggcctaattcatagtggagaataaatagtcaattgaataaatgaataaatatctccaccatcgtactaatcttaatcctccctgcccactcccaccactgaaaatgcaacattgtacacatcactggttgttgggagggacttaccttggaaagttgctattctaggaaagagaaaccttcatattcctggaaacagcaggtagtttccagtgctggcaatgaattccccagaactgctgttttggattttttcttgcctggcagctgttgggagcagggtgcagtgaggatggggtgagagtgggcagtttcttgtgcagatttgcctttctttcatcctggggctgacttgcagctccacacccatccatctctcaaatttcacagagggtaaaataggcatttggagagaaagaactctggcctgattcctttctctcccacaaatgtcctttattcataaaacaggaataataattcctgtatctcccaactacatggaagctgcagccctcacagaagaagatgatctgagaaattctttgatttcctcagtacagttatacccatgcatcataatactttaagcctggaaggcatcttaaaaataatgcaacagtcaaacctaattttacagagaaactgacatgaaatcacgcagctaatcatgataaagctgggtggaaaacttatcttgatgggcagtacaggaagatgcagtagaccttaagatgtcctgaaagtttcttatctcaggggaaactcccaggtaggctttatgtcagggacacagaaaaatgctccctgaaagtcaaaatattcgggctagacagacaaattcctgtaagtgtggtttgtctgggaaccacagatgtcactaatcctggtttgctccagagttctttttgttcactcctaccccccatcaccatttgattgatctccttaccctgtaatttccccttcttgtcgcttacctgcagtatctttcccacccaggcatgccttattctttctaaaggaaagtatgaatggagaggggaaagcttgggaaactgatagatttccttggatgccaaaacacctccatagcctgtctgcccggccctatgtggaaacagcattgagtttcaagtcctttatgcctccacccagggatagccacttgtaatccacatggcaattgtgaaacaagcaggaaatgcgtaattgtcagaattttgtggggaaaggactagggaataaggaaaacaaagatcttccttgtgttttagagctgtcagctagaggagcacctgcttgagtctgatgccatctaatggtcccagaagaaactgggttttgaacctagagttccatggactcttaggaattagactactactactactaagcattcactggtgcttactatgtgctattgctgtgccaagtatctgaaacctgtcttcttaccttatttttcaagataattctatgtggcaggtattactatctcaattctaagagtgagaaaatggagttttagaaacatttactaacttgcctgggtcacatagctaaggaagaggtggacttgcccagctttgcataaaactcctcaaaagagttgcctatactccctgactccacttatcttcctactatcctctttttaaaatatattatttatttatttaaataagcaatatatgaatgtggtttgaaattcaaaagacacaaagaagtatacagaggaaagcctcactctcaatccttctcaaggtttgctaattcctcttgcataggcaatccgttcttccagctttgtgtttatctttccagagaagtttactgtgtattaagcaaatatgtatatctttattcttgctcagtattttcgcaaacagcagctgtctaagttcactgttctgaactttattttttaaattaaaaatatatggctatgtagtattcta

SEQ ID NO: 12172 - DNA, 5684 bp, Artificial Sequence
  derived and/or modified sequence
gagccctgacgcccgccctggccgagcgtagctggcggaccagagccggtagcgaggttgggagagacggagcggacctcagcgctgaagcagaagtccccggagctgcggtctccccgccgcggctgagccatgcggctccctgacctgagaccctggacctccctgctgctggtggacgcggctttactgtggctgcttcagggccctctggggactttgcttcctcaagggctgccaggactatggctggaggggaccctgcggctgggagggctgtgggggctgctaaagctaagagggctgctgggatttgtggggacactgctgctcccgctctgtctggccacccccctgactgtctccctgagagccctggtcgcgggggcctcacgtgctcccccagccagagtcgcttcagccccttggagctggctgctggtggggtacggggctgcggggctcagctggtcactgtgggctgttctgagccctcctggagcccaggagaaggagcaggaccaggtgaacaacaaagtcttgatgtggaggctgctgaagctctccaggccggacctgcctctcctcgttgccgccttcttcttccttgtccttgctgttttgggtgagacattaatccctcactattctggtcgtgtgattgacatcctgggaggtgattttgacccccatgcctttgccagtgccatcttcttcatgtgcctcttctcctttggcagctcactgtctgcaggctgccgaggaggctgcttcacctacaccatgtctcgaatcaacttgcggatccgggagcagcttttctcctccctgctgcgccaggacctcggtttcttccaggagactaagacaggggagctgaactcacggctgagctcggataccaccctgatgagtaactggcttcctttaaatgccaatgtgctcttgcgaagcctggtgaaagtggtggggctgtatggcttcatgctcagcatatcgcctcgactcaccctcctttctctgctgcacatgcccttcacaatagcagcggagaaggtgtacaacacccgccatcaggaagtgcttcgggagatccaggatgcagtggccagggcggggcaggtggtgcgggaagccgttggagggctgcagaccgttcgcagttttggggccgaggagcatgaagtctgtcgctataaagaggcccttgaacaatgtcggcagctgtattggcggagagacctggaacgcgccttgtacctgctcgtaaggagggtgctgcacttgggggtgcagatgctgatgctgagctgtgggctgcagcagatgcaggatggggagctcacccagggcagcctgctttcctttatgatctaccaggagagcgtggggagctatgtgcagaccctggtatacatatatggggatatgctcagcaacgtgggagctgcagagaaggttttctcctacatggaccgacagccaaatctgccttcacctggcacgcttgcccccaccactctgcagggggttgtgaaattccaagacgtctcctttgcatatcccaatcgccctgacaggcctgtgctcaaggggctgacgtttaccctacgtcctggtgaggtgacggcgctggtgggacccaatgggtctgggaagagcacagtggctgccctgctgcagaatctgtaccagcccacagggggacaggtgctgctggatgaaaagcccatctcacagtatgaacactgctacctgcacagccaggtggtttcagttgggcaggagcctgtgctgttctccggttctgtgaggaacaacattgcttatgggctgcagagctgcgaagatgataaggtgatggcggctgcccaggctgcccacgcagatgacttcatccaggaaatggagcatggaatatacacagatgtaggggagaagggaagccagctggctgcgggacagaaacaacgtctggccattgcccgggcccttgtacgagacccgcgggtcctcatcctggatgaggctactagtgccctagatgtgcagtgcgagcaggccctgcaggactggaattcccgtggggatcgcacagtgctggtgattgctcacaggctgcagacagttcagcgcgcccaccagatcctggtgctccaggagggcaagctgcagaagcttgcccagctctaggagggacaggacctctattcccgcctggtgcagcagcggctgatggactgaggccccagggatactgggccctcttctcaggggcgtctccaggacccagagctgttcctgctttgagtttccctagagctgtgcggccagatagctgttcctgagttgcaggcacgatggagatttggacactgtgtgcttttggtggggtagagaggtggggtggggtggggtgggggctgtctgtgtccaggaaacttaattccctggtgactagagctttgcctggtgatgaggagtattttgtggcataatacatatattttaaaatattttccttcttacatgaactgtatacattcatatagaaaatttagacaatataaaaaagtacaaagaagaaaagtaaaagtacccattgtttcacttcctggagataaccatagttgctattttgctgcctgtcccatcagtcgtttatctgttgtttgagatagaaattaaccaaaaatgacataaatattcatgagattgccttcctatatccttccttgttcctaccagtgtctgctattttgaagaagctagggtctggagggacagagaacagttccctgattaacagtattaatagcgacattggtaacagctaccatttatagagttttaatgggagtaggagctatgctaagtgtttttcatgtattatcgtttttaatcattatccccaaccctatgaggttggttattatccccattttacagatgaggaaactgaagctcaaagaggctcaatgactttcccaaggtggtcgtagtggtggagttggagtttgaacacaggcctgaccctagagtccacaccctgacccaatcaattatattgcatcttgggtccataaaccctaatccataatcccatcaagaaaagctctgctgctcttagctctaaataattcagaatctattctcttctctccagtcccgttgttatagtcttcactcatagacttaagatgatcccatcaccagagaggtttctctaccattagcttccctcttccggccattcttcacaaagtcatttttctaaattctgtgtcacatacgatgatggcatttctggaaattccttcaggtgctctcaagccctgctgcagagatccttttcagagcacacactgttccagcccatctgtctcaccctctcctgttgtatccagctccacgacaaacttctgccttccccaacacctttgtgcctttgcatatggtgttttcttgcccattttctgctcgactcgcccctgattttcaagttcaagacttaactcagggttcaggtcttccaggaggccttacttatgtcgtcagtctggggaactctccatgtgcttctatcactgtgcggttacctctttcacagcccttttaaagttctatcttccctttcccaccttttttgaccttccactagaccatgagcacctgggcggaaagccatatatcttattaagctttatatctgctacctggccgagggcctaattcatagtggagaataaatagtcaattgaataaatgaataaatatctccaccatcgtactaatcttaatcctccctgcccactcccaccactgaaaatgcaacattgtacacatcactggttgttgggagggacttaccttggaaagttgctattctaggaaagagaaaccttcatattcctggaaacagcaggtagtttccagtgctggcaatgaattccccagaactgctgttttggattttttcttgcctggcagctgttgggagcagggtgcagtgaggatggagtgagagtgggcagtttcttgtgcagatttgcctttctttcatcctggggctgacttgcagctccacacccatccatctctcaaatttcacagagggtaaaataggcatttggagagaaagaactctggcctgattcctttctctcccacaaatgtcctttattcataaaacaggaataataattcctgtatctcccaactacatggaagctgcagccctcacagaagaagatgatctgagaaattctttgatttcctcagtacagttatacccatgcatcataatactttaagcctggaaggcatcttaaaaataatgcaacagtcaaacctaattttacagagaaactgacatgaaatcacgcagctaatcatgataaagctgggtggaaaacttatcttgatgggcagtacaggaagatgcagtagaccttaagatgtcctgaaagtttcttatctcaggggaaactcccaggtaggctttatgtcagggacacagaaaaatgctccctgaaagtcaaaatattcgggctagacagacaaattcctgtaagtgtggtttgtctgggaaccacagatgtcactaatcctggtttgctccagagttctttttgttcactcctaccccccatcaccatttgattgatctccttaccctgtaatttccccttcttgtcgcttacctgcagtatctttcccacccaggcatgccttattctttctaaaggaaagtatgaatggagaggggaaagcttgggaaactgatagatttccttggatgccaaaacacctccatagcctgtctgcccggccctatgtggaaacagcattgagtttcaagtcctttatgcctccacccagggatagccacttggaatccacatggcaattgtgaaacaagcaggaaatgcgtaattgtcagaattttgtggggaaaggactagggaataaggaaaacaaagatcttccttgtgttttagagctgtcagctagaggagcacctgcttgagtctgatgccatctaatggtcccagaagaaactgggttttgaacctagagttccatggactcttaggaattagactcctactactactaagcattcactggtgcttactatgtgctattgctgtgccaagtatctgaaacctgtcttcttaccttatttttcaagataattctatgtggcaggtattactatctcaattctaagagtgagaaaatggagttttagaaacatttactaacttgcctgggtcacatagctaaggaagaggtggacttgcccagctttgcataaaactcctcaaaagagttgcctatactccctgactccacttatcttcctactatcctctttttaaaatatattatttatttatttaaataagcaatatatgaatgtggtttgaaattcaaaagacacaaagaagtatacagaggaaagcctcactctcaatccttctcaaggtttgctaattcctcttgcataggcaatccgttcttccagctttgtgtttatctttccagagaagtttactgtgtattaagcaaatatgtatatctttattcttgctcagtattttcgcaaacagcagctgtctaagttcactgttctgaactttattttttaaattaaaaatatatggctatgtagtattcta

SEQ ID NO: 12173 - DNA, 5684 bp, Artificial Sequence
  derived and/or modified sequence
gagccctgacgcccgccctggccgagcgtagctggcggaccagagccggtagcgaggttgggagagacggagcggacctcagcgctgaagcagaagtccccggagctgcggtctccccgccgcggctgagccatgcggctccctgacctgagaccctggacctccctgctgctggtggacgcggctttactgtggctgcttcagggccctctggggactttgcttcctcaagggctgccaggactatggctggaggggaccctgcggctgggagggctgtgggggctgctaaagctaagagggctgctgggatttgtggggacactgctgctcccgctctgtctggccacccccctgactgtctccctgagagccctggtcgcgggggcctcacgtgctcccccagccagagtcgcttcagccccttggagctggctgctggtggggtacggggctgcggggctcagctggtcactgtgggctgttctgagccctcctggagcccaggagaaggagcaggaccaggtgaacaacaaagtcttgatgtggaggctgctgaagctctccaggccggacctgcctctcctcgttgccgccttcttcttccttgtccttgctgttttgggtgagacattaatccctcactattctggtcgtgtgattgacatcctgggaggtgattttgacccccatgcctttgccagtgccatcttcttcatgtgcctcttctcctttggcagctcactgtctgcaggctgccgaggaggctgcttcacctacaccatgtctcgaatcaacttgcggatccgggagcagcttttctcctccctgctgcgccaggacctcggtttcttccaggagactaagacaggggagctgaactcacggctgagctcggataccaccctgatgagtaactggcttcctttaaatgccaatgtgctcttgcgaagcctggtgaaagtggtggggctgtatggcttcatgctcagcatatcgcctcgactcaccctcctttctctgctgcacatgcccttcacaatagcagcggagaaggtgtacaacacccgccatcaggaagtgcttcgggagatccaggatgcagtggccagggcggggcaggtggtgcgggaagccgttggagggctgcagaccgttcgcagttttggggccgaggagcatgaagtctgtcgctataaagaggcccttgaacaatgtcggcagctgtattggcggagagacctggaacgcgccttgtacctgctcgtaaggagggtgctgcacttgggggtgcagatgctgatgctgagctgtgggctgcagcagatgcaggatggggagctcacccagggcagcctgctttcctttatgatctaccaggagagcgtggggagctatgtgcagaccctggtatacatatatggggatatgctcagcaacgtgggagctgcagagaaggttttctcctacatggaccgacagccaaatctgccttcacctggcacgcttgcccccaccactctgcagggggttgtgaaattccaagacgtctcctttgcatatcccaatcgccctgacaggcctgtgctcaaggggctgacgtttaccctacgtcctggtgaggtgacggcgctggtgggacccaatgggtctgggaagagcacagtggctgccctgctgcagaatctgtaccagcccacagggggacaggtgctgctggatgaaaagcccatctcacagtatgaacactgctacctgcacagccaggtggtttcagttgggcaggagcctgtgctgttctccggttctgtgaggaacaacattgcttatgggctgcagagctgcgaagatgataaggtgatggcggctgcccaggctgcccacgcagatgacttcatccaggaaatggagcatggaatatacacagatgtaggggagaagggaagccagctggctgcgggacagaaacaacgtctggccattgcccgggcccttgtacgagacccgcgggtcctcatcctggatgaggctactagtgccctagatgtgcagtgcgagcaggccctgcaggactggaattcccgtggggatcgcacagtgctggtgattgctcacaggctgcagacagttcagcgcgcccaccagatcctggtgctccaggagggcaagctgcagaagcttgcccagctctaggagggacaggacctctattcccgcctggtgcagcagcggctgatggactgaggccccagggatactgggccctcttctcaggggcgtctccaggacccagagctgttcctgctttgagtttccctagagctgtgcggccagatagctgttcctgagttgcaggcacgatggagatttggacactgtgtgcttttggtggggtagagaggtggggtggggtggggtgggggctgtctgtgtccaggaaacttaattccctggtgactagagctttgcctggtgatgaggagtattttgtggcataatacatatattttaaaatattttccttcttacatgaactgtatacattcatatagaaaatttagacaatataaaaaagtacaaagaagaaaagtaaaagtacccattgtttcacttcctggagataaccatagttgctattttgctgcctgtcccatcagtcgtttatctgttgtttgagatagaaattaaccaaaaatgacataaatattcatgagattgccttcctatatccttccttgttcctaccagtgtctgctattttgaagaagctagggtctggagggacagagaacagttccctgattaacagtattaatagcgacattggtaacagctaccatttatagagttttaatgggagtaggagctatgctaagtgtttttcatgtattatcgtttttaatcattatccccaaccctatgaggttggttattatccccattttacagatgaggaaactgaagctcaaagaggctcaatgactttcccaaggtggtcgtagtggtggagttggagtttgaacacaggcctgaccctagagtccacaccctgacccaatcaattatattgcatcttgggtccataaaccctaatccataatcccatcaagaaaagctctgctgctcttagctctaaataattcagaatctattctcttctctccagtcccgttgttatagtcttcactcatagacttaagatgatcccatcaccagagaggtttctctaccattagcttccctcttccggccattcttcacaaagtcatttttctaaattctgtgtcacatacgatgatggcatttctggaaattccttcaggtgctctcaagccctgctgcagagatccttttcagagcacacactgttccagcccatctgtctcaccctctcctgttgtatccagctccacgacaaacttctgccttccccaacacctttgtgcctttgcatatggtgttttcttgcccattttctgctcgactcgcccctgattttcaagttcaagacttaactcagggttcaggtcttccaggaggccttacttatgtcgtcagtctggggaactctccatgtgcttctatcactgtgcggttacctctttcacagcccttttaaagttctatcttccctttcccaccttttttgaccttccactagaccatgagcacctgggcggaaagccatatatcttattaagctttatatctgctacctggccgagggcctaattcatagtggagaataaatagtcaattgaataaatgaataaatatctccaccatcgtactaatcttaatcctccctgcccactcccaccactgaaaatgcaacattgtacacatcactggttgttgggagggacttaccttggaaagttgctattctaggaaagagaaaccttcatattcctggaaacagcaggtagtttccagtgctggcaatgaattccccagaactgctgttttggattttttcttgcctggcagctgttgggagcagggtgcagtgaggatggggtgagagtgggcagtttcttgtgcagatttgcctttctttcatcctggggctgacttgcagctccacacccatccatctctcaaatttcacagagggtaaaataggcatttggagagaaagaactctggcctgattcctttctctcccacaaatgtcctttattcataaaacaggaataataattcctgtatctcccaactacatggaagctgcagccctcacagaagaagatgatctgagaaattctttgatttcctcagtacagttatacccatgcatcataatactttaagcctggaaggcatcttaaaaataatgcaacagtcaaacctaattttacagagaaactgacatgaaatcacgcagctaatcatgataaagctgggtggaaaacttatcttgatgggcagtacaggaagatgcagtagaccttaagatgtcctgaaagtttcttatctcaggggaaactcccaggtaggctttatgtcagggacacagaaaaatgctccctgaaagtcaaaatattcgggctagacagacaaattcctgtaagtgtggtttgtctgggaaccacagatgtcactaatcctggtttgctccagagttctttttgttcactcctaccccccatcaccatttgattgatctccttaccctgtaatttccccttcttgtcgcttacctgcagtatctttcccacccaggcatgccttattctttctaaaggaaagtatgaatggagaggggaaagcttgggaaactgatagatttccttggatgccaaaacacctccatagcctgtctgcccggccctatgtggaaacagcattgagtttcaagtcctttatgcctccacccagggatagccacttggaatccacatggcaattgtgaaacaagcaggaaatgcgtaattgtcagaattttgtggggaaaggactagggaataaggaaaacaaagatcttccttgtgttttagagctgtcagctagaggagcacctgcttgagtctgatgccatctaatggtcccagaagaaactgggttttgaacctagagttccatggactcttaggaattagactcctactactactaagcattcactggtgcttactatgtgctattgctgtgccaagtatctgaaacctgtcttcttaccttatttttcaagataattctatgtggcaggtattactatctcaattctaagagtgagaaaatggagttttagaaacatttactaacttgcctgggtcacatagctaaggaagaggtggacttgcccagctttgcataaaactcctcaaaagagttgcctatactccctgactccacttatcttcctactatcctctttttaaaatatattatttatttatttaaataagcaatatatgaatgtggtttgaaattcaaaagacacaaagaagtatacagaggaaagcctcactctcaatccttctcaaggtttgctaattcctcttgcataggcaatccgttcttccagctttgtgtttatctttccagagaagtttactgtgtattaagcaaatatgtatatctttattcttgctcagtattttcgcaaacagcagctgtctaagttcactgttctgaactttattttttaaattaaaaatatatggctatgtagtattcta

SEQ ID NO: 12174 - DNA, 5684 bp, Artificial Sequence
  derived and/or modified sequence
gagccctgacgcccgccctggccgagcgtagctggcggaccagagccggtagcgaggttgggagagacggagcggacctcagcgctgaagcagaagcccccggagctgcggtctccccgccgcggctgagccatgcggctccctgacctgagaccctggacctccctgctgctggtggacgcggctttactgtggctgcttcagggccctctggggactttgcttcctcaagggctgccaggactatggctggaggggaccctgcggctgggagggctgtgggggctgctaaagctaagagggctgctgggatttgtggggacactgctgctcccgctctgtctggccacccccctgactgtctccctgagagccctggtcgcgggggcctcacgtgctcccccagccagagtcgcttcagccccttggagctggctgctggtggggtacggggctgcggggctcagctggtcactgtgggctgttctgagccctcctggagcccaggagaaggagcaggaccaggtgaacaacaaagtcttgatgtggaggctgctgaagctctccaggccggacctgcctctcctcgttgccgccttcttcttccttgtccttgctgttttgggtgagacattaatccctcactattctggtcgtgtgattgacatcctgggaggtgattttgacccccatgcctttgccagtgccatcttcttcatgtgcctcttctcctttggcagctcactgtctgcaggctgccgaggaggctgcttcacctacaccatgtctcgaatcaacttgcggatccgggagcagcttttctcctccctgctgcgccaggacctcggtttcttccaggagactaagacaggggagctgaactcacggctgagctcggataccaccctgatgagtaactggcttcctttaaatgccaatgtgctcttgcgaagcctggtgaaagtggtggggctgtatggcttcatgctcagcatatcgcctcgactcaccctcctttctctgctgcacatgcccttcacaatagcagcggagaaggtgtacaacacccgccatcaggaagtgcttcgggagatccaggatgcagtggccagggcggggcaggtggtgcgggaagccgttggagggctgcagaccgttcgcagttttggggccgaggagcatgaagtctgtcgctataaagaggcccttgaacaatgtcggcagctgtattggcggagagacctggaacgcgccttgtacctgctcataaggagggtgctgcacttgggggtgcagatgctgatgctgagctgtgggctgcagcagatgcaggatggggagctcacccagggcagcctgctttcctttatgatctaccaggagagcgtggggagctatgtgcagaccctggtatacatatatggggatatgctcagcaacgtgggagctgcagagaaggttttctcctacatggaccgacagccaaatctgccttcacctggcacgcttgcccccaccactctgcagggggttgtgaaattccaagacgtctcctttgcatatcccaatcgccctgacaggcctgtgctcaaggggctgacgtttaccctacgtcctggtgaggtgacggcgctggtgggacccaatgggtctgggaagagcacagtggctgccctgctgcagaatctgtaccagcccacagggggacaggtgctgctggatgaaaagcccatctcacagtatgaacactgctacctgcacagccaggtggtttcagttgggcaggagcctgtgctgttctccggttctgtgaggaacaacattacttatgggctgcagagctgcgaagatgataaggtgatggcggctgcccaggctgcccacgcagatgacttcatccaggaaatggagcatggaatatacacagatgtaggggagaagggaagccagctggctgcgggacagaaacaacgtctggccattgcccgggcccttgtacgagacccgcgggtcctcatcctggatgaggctactagtgccctagatgtgcagtgcgagcaggccctgcaggactggaattcccgtggggatcgcacagtgctggtgattgctcacaggctgcagacagttcagcgcgcccaccagatcctggtgctccaggagggcaagctgcagaagcttgcccagctctaggagggacaggacctctattcccgcctggtgcagcagcggctgatggactgaggccccagggatactgggccctcttctcaggggcgtctccaggacccagagctgttcctgctttgagtttccctagagctgtgcggccagatagctgttcctgagttgcaggcacgatggagatttggacactgtgtgcttttggtggggtagagaggtggggtggggtggggtgggggctgtctgtgtccaggaaacttaattccctggtgactagagctttgcctggtgatgaggagtattttgtggcataatacatatattttaaaatattttccttcttacatgaactgtatacattcatatagaaaatttagacaatataaaaaagtacaaagaagaaaagtaaaagtacccattgtttcacttcctggagataaccatagttgctattttgctgcctgtcccatcagtcgtttatctgttgtttgagatagaaattaaccaaaaatgacataaatattcatgagattgccttcctatatccttccttgttcctaccagtgtctgctattttgaagaagctagggtctggagggacagagaacagttccctgattaacagtattaatagcgacattggtaacagctaccatttatagagttttaatgggagtaggagctatgctaagtgtttttcatgtattatcgtttttaatcattatccccaaccctatgaggttggttattatccccattttacagatgaggaaactgaagctcaaagaggctcaatgactttcccaaggtggtcgtagtggtggagttggagtttgaacacaggcctgaccctagagtccacaccctgacccaatcaattatattgcatcttgggtccataaaccctaatccataatcccatcaagaaaagctctgctgctcttagctctaaataattcagaatctattctcttctctccagtcccgttgttatagtcttcactcatagacttaagatgatcccatcaccagagaggtttctctaccattagcttccctcttccggccattcttcacaaagtcatttttctaaattctgtgtcacatacgatgatggcatttctggaaattccttcaggtgctctcaagccctgctgcagagatccttttcagagcacacactgttccagcccatctgtctcaccctctcctgttgtatccagctccacgacaaacttctgccttccccaacacctttgtgcctttgcatatggtgttttcttgcccattttctgctcgactcgcccctgattttcaagttcaagacttaactcagggttcaggtcttccaggaggccttacttatgtcgtcagtctggggaactctccatgtgcttctatcactgtgcggttacctctttcacagcccttttaaagttctatcttccctttcccaccttttttgaccttccactagaccatgagcacctgggcggaaagccatatatcttattaagctttatatctgctacctggccgagggcctaattcatagtggagaataaatagtcaattgaataaatgaataaatatctccaccatcgtactaatcttaatcctccctgcccactcccaccactgaaaatgcaacattgtacacatcactggttgttgggagggacttaccttggaaagttgctattctaggaaagagaaaccttcatattcctggaaacagcaggtagtttccagtgctggcaatgaattccccagaactgctgttttggattttttcttgcctggcagctgttgggagcagggtgcagtgaggatggggtgagagtgggcagtttcttgtgcagatttgcctttctttcatcctggggctgacttgcagctccacacccatccatctctcaaatttcacagagggtaaaataggcatttggagagaaagaactctggcctgattcctttctctcccacaaatgtcctttattcataaaacaggaataataattcctgtatctcccaactacatggaagctgcagccctcacagaagaagatgatctgagaaattctttgatttcctcagtacagttatacccatgcatcataatactttaagcctggaaggcatcttaaaaataatgcaacagtcaaacctaattttacagagaaactgacatgaaatcacgcagctaatcatgataaagctgggtggaaaacttatcttgatgggcagtacaggaagatgcagtagaccttaagatgtcctgaaagtttcttatctcaggggaaactcccaggtaggctttatgtcagggacacagaaaaatgctccctgaaagtcaaaatattcgggctagacagacaaattcctgtaagtgtggtttgtctgggaaccacagatgtcactaatcctggtttgctccagagttctttttgttcactcctaccccccatcaccatttgattgatctccttaccctgtaatttccccttcttgtcgcttacctgcagtatctttcccacccaggcatgccttattctttctaaaggaaagtatgaatggagaggggaaagcttgggaaactgatagatttccttggatgccaaaacacctccatagcctgtctgcccggccctatgtggaaacagcattgagtttcaagtcctttatgcctccacccagggatagccacttggaatccacatggcaattgtgaaacaagcaggaaatgcgtaattgtcagaattttgtggggaaaggactagggaataaggaaaacaaagatcttccttgtgttttagagctgtcagctagaggagcacctgcttgagtctgatgccatctaatggtcccagaagaaactgggttttgaacctagagttccatggactcttaggaattagactactactactactaagcattcactggtgcttactatgtgctattgctgtgccaagtatctgaaacctgtcttcttaccttatttttcaagataattctatgtggcaggtattactatctcaattctaagagtgagaaaatggagttttagaaacatttactaacttgcctgggtcacatagctaaggaagaggtggacttgcccagctttgcataaaactcctcaaaagagttgcctatactccctgactccacttatcttcctactatcctctttttaaaatatattatttatttatttaaataagcaatatatgaatgtggtttgaaattcaaaagacacaaagaagtatacagaggaaagcctcactctcaatccttctcaaggtttgctaattcctcttgcataggcaatccgttcttccagctttgtgtttatctttccagagaagtttactgtgtattaagcaaatatgtatatctttattcttgctcagtattttcgcaaacagcagctgtctaagttcactgttctgaactttattttttaaattaaaaatatatggctatgtagtattcta

SEQ ID NO: 12175 - DNA, 5684 bp, Artificial Sequence
  derived and/or modified sequence
gagccctgacgcccgccctggccgagcgtagctggcggaccagagccggtagcgaggttgggagagacggagcggacctcagcgctgaagcagaagtccccggagctgcggtctccccgccgcggctgagccatgcggctccctgacctgagaccctggacctccctgctgctggtggacgcggctttactgtggctgcttcagggccctctggggactttgcttcctcaagggctgccaggactatggctggaggggaccctgcggctgggagggctgtgggggctgctaaagctaagagggctgctgggatttgtggggacactgctgctcccgctctgtctggccacccccctgactgtctccctgagagccctggtcgcgggggcctcacgtgctcccccagccagagtcgcttcagccccttggagctggctgctggtggggtacggggctgcggggctcagctggtcactgtgggctgttctgagccctcctggagcccaggagaaggagcaggaccaggtgaacaacaaagtcttgatgtggaggctgctgaagctctccaggccggacctgcctctcctcgttgccgccttcttcttccttgtccttgctgttttgggtgagacattaatccctcactattctggtcgtgtgattgacatcctgggaggtgattttgacccccatgcctttgccagtgccatcttcttcatgtgcctcttctcctttggcagctcactgtctgcaggctgccgaggaggctgcttcacctacaccatgtctcgaatcaacttgcggatccgggagcagcttttctcctccctgctgcgccaggacctcggtttcttccaggagactaagacaggggagctgaactcacggctgagctcggataccaccctgatgagtaactggcttcctttaaatgccaatgtgctcttgcgaagcctggtgaaagtggtggggctgtatggcttcatgctcagcatatcgcctcgactcaccctcctttctctgctgcacatgcccttcacaatagcagcggagaaggtgtacaacacccgccatcaggaagtgcttcgggagatccaggatgcagtggccagggcggggcaggtggtgcgggaagccgttggagggctgcagaccgttcgcagttttggggccgaggagcatgaagtctgtcgctataaagaggcccttgaacaatgtcggcagctgtattggcggagagacctggaacgcgccttgtacctgctcgtaaggagggtgctgcacttgggggtgcagatgctgatgctgagctgtgggctgcagcagatgcaggatggggagctcacccagggcagcctgctttcctttatgatctaccaggagagcgtggggagctatgtgcagaccctggtatacatatatggggatatgctcagcaatgtgggagctgcagagaaggttttctcctacatggaccgacagccaaatctgccttcacctggcacgcttgcccccaccactctgcagggggttgtgaaattccaagacgtctcctttgcatatcccaatcgccctgacaggcctgtgctcaaggggctgacgtttaccctacgtcctggtgaggtgacggcgctggtgggacccaatgggtctgggaagagcacagtggctgccctgctgcagaatctgtaccagcccacagggggacaggtgctgctggatgaaaagcccatctcacagtatgaacactgctacctgcacagccaggtggtttcagttgggcaggagcctgtgctgttctccggttctgtgaggaacaacattgcttatgggctgcagagctgcgaagatgataaggtgatggcggctgcccaggctgcccacgcagatgacttcatccaggaaatggagcatggaatatacacagatgtaggggagaagggaagccagctggctgcgggacagaaacaacgtctggccattgcccgggcccttgtacgagacccgcgggtcctcatcctggatgaggctactagtgccctagatgtgcagtgcgagcaggccctgcaggactggaattcccgtggggatcgcacagtgctggtgattgctcacaggctgcagacagttcagcgcgcccaccagatcctggtgctccaggagggcaagctgcagaagcttgcccagctctaggagggacaggacctctattcccgcctggtgcagcagcggctgatggactgaggccccagggatactgggccctcttctcaggggcgtctccaggacccagagctgttcctgctttgagtttccctagagctgtgcggccagatagctgttcctgagttgcaggcacgatggagatttggacactgtgtgcttttggtggggtagagaggtggggtggggtggggtgggggctgtctgtgtccaggaaacttaattccctggtgactagagctttgcctggtgatgaggagtattttgtggcataatacatatattttaaaatattttccttcttacatgaactgtatacattcatatagaaaatttagacaatataaaaaagtacaaagaagaaaagtaaaagtacccattgtttcacttcctggagataaccatagttgctattttgctgcctgtcccatcagtcgtttatctgttgtttgagatagaaattaaccaaaaatgacataaatattcatgagattgccttcctatatccttccttgttcctaccagtgtctgctattttgaagaagctagggtctggagggacagagaacagttccctgattaacagtattaatagcgacattggtaacagctaccatttatagagttttaatgggagtaggagctatgctaagtgtttttcatgtattatcgtttttaatcattatccccaaccctatgaggttggttattatccccattttacagatgaggaaactgaagctcaaagaggctcaatgactttcccaaggtggtcgtagtggtggagttggagtttgaacacaggcctgaccctagagtccacaccctgacccaatcaattatattgcatcttgggtccataaaccctaatccataatcccatcaagaaaagctctgctgctcttagctctaaataattcagaatctattctcttctctccagtcccgttgttatagtcttcactcatagacttaagatgatcccatcaccagagaggtttctctaccattagcttccctcttccggccattcttcacaaagtcatttttctaaattctgtgtcacatacgatgatggcatttctggaaattccttcaggtgctctcaagccctgctgcagagatccttttcagagcacacactgttccagcccatctgtctcaccctctcctgttgtatccagctccacgacaaacttctgccttccccaacacctttgtgcctttgcatatggtgttttcttgcccattttctgctcgactcgcccctgattttcaagttcaagacttaactcagggttcaggtcttccaggaggccttacttatgtcgtcagtctggggaactctccatgtgcttctatcactgtgcggttacctctttcacagcccttttaaagttctatcttccctttcccaccttttttgaccttccactagaccatgagcacctgggcggaaagccatatatcttattaagctttatatctgctacctggccgagggcctaattcatagtggagaataaatagtcaattgaataaatgaataaatatctccaccatcgtactaatcttaatcctccctgcccactcccaccactgaaaatgcaacattgtacacatcactggttgttgggagggacttaccttggaaagttgctattctaggaaagagaaaccttcatattcctggaaacagcaggtagtttccagtgctggcaatgaattccccagaactgctgttttggattttttcttgcctggcagctgttgggagcagggtgcagtgaggatggggtgagagtgggcagtttcttgtgcagatttgcctttctttcatcctggggctgacttgcagctccacacccatccatctctcaaatttcacagagggtaaaataggcatttggagagaaagaactctggcctgattcctttctctcccacaaatgtcctttattcataaaacaggaataataattcctgtatctcccaactacatggaagctgcagccctcacagaagaagatgatctgagaaattctttgatttcctcagtacagttatacccatgcatcataatactttaagcctggaaggcatcttaaaaataatgcaacagtcaaacctaattttacagagaaactgacatgaaatcacgcagctaatcatgataaagctgggtggaaaacttatcttgatgggcagtacaggaagatgcagtagaccttaagatgtcctgaaagtttcttatctcaggggaaactcccaggtaggctttatgtcagggacacagaaaaatgctccctgaaagtcaaaatattcgggctagacagacaaattcctgtaagtgtggtttgtctgggaaccacagatgtcactaatcctggtttgctccagagttctttttgttcactcctaccccccatcaccatttgattgatctccttaccctgtaatttccccttcttgtcgcttacctgcagtatctttcccacccaggcatgccttattctttctaaaggaaagtatgaatggagaggggaaagcttgggaaactgatagatttccttggatgccaaaacacctccatagcctgtctgcccggccctatgtggaaacagcattgagtttcaagtcctttatgcctccacccagggatagccacttggaatccacatggcaattgtgaaacaagcaggaaatgcgtaattgtcagaattttgtggggaaaggactagggaataaggaaaacaaagatcttccttgtgttttagagctgtcagctagaggagcacctgcttgagtctgatgccatctaatggtcccagaagaaactgggttttgaacctagagttccatggactcttaggaattagactactactactactaagcattcactggtgcttactatgtgctattgctgtgccaagtatctgaaacctgtcttcttaccttatttttcaagataattctatgtggcaggtattactatctcaattctaagagtgagaaaatggagttttagaaacatttactaacttgcctgggtcacatagctaaggaagaggtggacttgcccagctttgcataaaactcctcaaaagagttgcctatactccctgactccacttatcttcctactatcctctttttaaaatatattatttatttatttaaataagcaatatatgaatgtggtttgaaattcaaaagacacaaagaagtatacagaggaaagcctcactctcaatccttctcaaggtttgctaattcctcttgcataggcaatccgttcttccagctttgtgtttatctttccagagaagtttactgtgtattaagcaaatatgtatatctttattcttgctcagtattttcgcaaacagcagctgtctaagttcactgttctgaactttattttttaaattaaaaatatatggctatgtagtattcta

SEQ ID NO: 12176 - DNA, 5511 bp, Artificial Sequence
  derived and/or modified sequence
gagccctgacgcccgccctggccgagcgtagctggcggaccagagccggtagcgaggttgggagagacggagcggacctcagcgctgaagcagaagcccccggagctgcggtctccccgccgcggctgagccatgcggctccctgacctgagaccctggacctccctgctgctggtggacgcggctttactgtggctgcttcagggccctctggggactttgcttcctcaagggctgccaggactatggctggaggggaccctgcggctgggagggctgtgggggctgctaaagctaagagggctgctgggatttgtggggacactgctgctcccgctctgtctggccacccccctgactgtctccctgagagccctggtcgcgggggcctcacgtgctcccccagccagagtcgcttcagccccttggagctggctgctggtggggtacggggctgcggggctcagctggtcactgtgggctgttctgagccctcctggagcccaggagaaggagcaggaccaggtgaacaacaaagtcttgatgtggaggctgctgaagctctccaggccggacctgcctctcctcgttgccgccttcttcttccttgtccttgctgttttgggtgagacattaatccctcactattctggtcgtgtgattgacatcctgggaggtgattttgacccccatgcctttgccagtgccatcttcttcatgtgcctcttctcctttggcagctcactgtctgcaggctgccgaggaggctgcttcacctacaccatgtctcgaatcaacttgcggatccgggagcagcttttctcctccctgctgcgccaggacctcggtttcttccaggagactaagacaggggagctgaactcacggctgagctcggataccaccctgatgagtaactggcttcctttaaatgccaatgtgctcttgcgaagcctggtgaaagtggtggggctgtatggcttcatgctcagcatatcgcctcgactcaccctcctttctctgctgcacatgcccttcacaatagcagcggagaaggtgtacaacacccgccatcaggaagtgcttcgggagatccaggatgcagtggccagggcggggcaggtggtgcgggaagccgttggagggctgcagaccgttcgcagttttggggccgaggagcatgaagtctgtcgctataaagaggcccttgaacaatgtcggcagctgtattggcggagagacctggaacgcgccttgtacctgctcgtaaggagggtgctgcacttgggggtgcagatgctgatgctgagctgtgggctgcagcagatgcaggatggggagctcacccagggcagcctgctttcctttatgatctaccaggagagcgtggggagctatgtgcagaccctggtatacatatatggggatatgctcagcaacgtgggagctgcagagaaggttttctcctacatggaccgacagccaaatctgccttcacctggcacgcttgcccccaccactctgcagggggttgtgaaattccaagacgtctcctttgcatatcccaatcgccctgacaggcctgtgctcaaggggctgacgtttaccctacgtcctggtgaggtgacggcgctggtgggacccaatgggtctgggaagagcacagtggctgccctgctgcagaatctgtaccagcccacagggggacaggtgctgctggatgaaaagcccatctcacagtatgaacactgctacctgcacagccaggtggtttcagttgggcaggagcctgtgctgttctccggttctgtgaggaacaacattgcttatgggctgcagagctgcgaagatgataaggtgatggcggctgcccaggctgcccacgcagatgacttcatccaggaaatggagcatggaatatacacagatgtaggggagaaggggagccagctggctgcgggacagaaacaacgtctggccattgcccgggcccttgtacgagacccgcgggtcctcatcctggatgaggctactagtgccctagatgtgcagtgcgagcaggccctgcaggactggaattcccgtggggatcgcacagtgctggtgattgctcacaggctgcaggcagttcagcgcgcccaccagatcctggtgctccaggagggcaagctgcagaagcttgcccagctccaggagggacaggacctctattcccgcctggttcagcagcggctgatggactgaggccccagggatactgggccctcttctcaggggcgtctccaggacccagagctgttcctgctttgagtttccctagagctgtgcggccagatagctgttcctgagttgcaagcacgatggagatttggacactgtgtgcttttggtggggtggagaggtggggtggggtggggtgtggtggggtggaggctgtctgtgtccaggaaacttaattccctggtgactagagctttgcctggtgatgaggagtattttgtggcataatacatatattttaaaatattttccttcttacgtgaactgtatacattcatatagaaaatttagacaatataaaaaagtacaaagaagaaaagtaaaagtacccattgtttcacttcctggagataaccatagttgctattttgctgcctgttccatcagtcgtttatctgttgtttgagatagaaattaaccaaaaatgacataaatattcatgagattgccttcctatatccctccttgttcctaccagtgtctgctattttgaagaagctagggtctggagggacagagaacagttccctgattaacagtattaataatgacattggtaacagctaccatttatagagttttaatgtgagtaggagctatgctaagtgtttttcatgtattatcgtttttaatcattatctccaaccctatgaggttggttattatccccattttacagatgaggaaactgaagctcaaagaggctcaatgactttcccaaggtggtcgtagtggtggagttggagtttgaacacaggcctgaccctagagtccacaccctgacccaatcaattatattgcatcttgggtccataaaccctaatccataatcccatcaagaaaagctctgctgctcttagctctaaataattcagaatctattctcttctctccagtcccgttgttatagtcttcactcatagacagcccatctgtctcaccctctcctgttgtatccagctccacgacaaacttctgccttccccaacacctttgtgcctttgcatatggtgttttcttgcccattttctgctcgactcgcccctgattttcaagttcaagacttaactcagggttcaggtcttccaggaggccttacttatgtcgtcagtctggggaactctccatgtgcttctatcactgtgcggttacctctttcacagcccttttaaagttctatcttccctttcccaccttttttgaccttccactagaccatgagcacctgggcggaaagccatatatcttattaagctttatatctgctacctggccgagggcctaattcatagtggagaataaatagtcaattgaataaatgaataaatatctccaccatcgtactaatcttaatcctccctgcccactcccaccactgaaaatgcaacattgtacacatcactggttgttgggagggacttaccttggaaagttgctattctaggaaagagaaaccttcatattcctggaaacagcaggtagtttccagtgctggcaatgaattccccagaactgctgttttggattttttcttgcctggcagctgttgggagcagggtgcagtgaggatggggtgagagtgggcagtttcttgtgcagatttgcctttctttcatcctggggctgacttgcagctccacacccatccatctctcaaatttcacagagggtaaaataggcatttggagagaaagaactctggcctgattcctttctctcccacaaatgtcctttattcataaaacaggaatagtaattcctgtatctcccaactacatggaagctgcagccctcacagaagaagatgatctgagaaattctttgatttcctcagtacagttatacccatgcatcataatactttaagcctggaaggcatcttaaaaataatgcaacagtcaaacctaattttacagagaaactgacatgaaatcacgcagctaatcatgataaagctgggtggaaaacttatcttgatgggcagtacaggaagatgcagtagaccttaagatgtcctgaaagtttcttatctcaggggaaactcccaggtaggctttatgtcagggacacagaaaaatgctccctgaaagtcaaaatattcgggctagacagacaaattcctgtaagtgtggtttgtctgggaaccacagatgtcactaatcctggtttgctccagagttctttttgttcactcctaccccccatcaccatttgattgatctccttaccctgtaatttccccttcttgtcgcttacctgcagtatctttcccacccaggcatgccttattctttctaaaggaaagtatgaatggagaggggaaagcttgggaaactgatagatttccttggatgccaaaacacctccatagcctgtctgcccggccctatgtggaaacagcattgagtttcaagtcctttatgcctccacccagggatagccacttggaatccacatggcaattgtgaaacaagcaggaaatgcgtaattgtcagaattttgtggggaaaggactagggaataaggaaaacaaagatcttccttgtgttttagagctgtcagctagaggagcacctgcttgagtctgatgccatctaatggtcccagaagaaactgggttttgaacctagagttccatggactcttaggaattagactactactactactaagcattcactggtgcttactatgtgctattgctgtgccaagtatctgaaacctgtcttcttaccttatttttcaagataattctatgtggcaggtattactatctcaattctaagagtgagaaaatggagttttagaaacatttactaacttgcctgggtcacatagctaaggaagaggtggacttgcccagctttgcataaaactcctcaaaagagttgcctatactccctgattccacttatcttcctactatcctctttttaaaatatattatttatttatttaaataagcaatatatgaatgtggtttgaaattcaaaagacacaaagaagtatacagaggaaagcctcactctcaatccttctcaaggtttgctaattcctcttgcataggcaatccgttcttccagctttgtgtttatctttccagagaagtttactgtgtattaagcaaatatgtatatctttattcttgctcagtattttcgcaaacagcagctgtctaagttcactgttctgaactttattttttaaattaaaaatatatggctatgtagt

SEQ ID NO: 12177 - DNA, 5517 bp, Artificial Sequence
  derived and/or modified sequence
gagccctgacgcccgccctggccgagcgtagctggcggaccagagccggtagcgaggttgggagagacggagcggacctcagcgctgaagcagaagcccccggagctgcggtctccccgccgcggctgagccatgcggctccctgacctgagaccctggacctccctgctgctggtggacgcggctttactgtggctgcttcagggccctctggggactttgcttcctcaagggctgccaggactatggctggaggggaccctgcggctgggagggctgtgggggctgctaaagctaagagggctgctgggatttgtggggacactgctgctcccgctctgtctggccacccccctgactgtctccctgagagccctggtcgcgggggcctcacgtgctcccccagccagagtcgcttcagccccttggagctggctgctggtggggtacggggctgcggggctcagctggtcactgtgggctgttctgagccctcctggagcccaggagaaggagcaggaccaggtgaacaacaaagtcttgatgtggaggctgctgaagctctccaggccggacctgcctctcctcgttgccgccttcttcttccttgtccttgctgttttgggtgagacattaatccctcactattctggtcgtgtgattgacatcctgggaggtgattttgacccccatgcctttgccagtgccatcttcttcatgtgcctcttctcctttggcagctcactgtctgcaggctgccgaggaggctgcttcacctacaccatgtctcgaatcaacttgcggatccgggagcagcttttctcctccctgctgcgccaggacctcggtttcttccaggagactaagacaggggagctgaactcacggctgagctcggataccaccctgatgagtaactggcttcctttaaatgccaatgtgctcttgcgaagcctggtgaaagtggtggggctgtatggcttcatgctcagcatatcgcctcgactcaccctcctttctctgctgcacatgcccttcacaatagcagcggagaaggtgtacaacacccgccatcaggaagtgcttcgggagatccaggatgcagtggccagggcggggcaggtggtgcgggaagccgttggagggctgcagaccgttcgcagttttggggccgaggagcatgaagtctgtcgctataaagaggcccttgaacaatgtcggcagctgtattggcggagagacctggaacgcgccttgtacctgctcgtaaggagggtgctgcacttgggggtgcagatgctgatgctgagctgtgggctgcagcagatgcaggatggggagctcacccagggcagcctgctttcctttatgatctaccaggagagcgtggggagctatgtgcagaccctggtatacatatatggggatatgctcagcaacgtgggagctgcagagaaggttttctcctacatggaccgacagccaaatctgccttcacctggcacgcttgcccccaccactctgcagggggttgtgaaattccaagacgtctcctttgcatatcccaatcgccctgacaggcctgtgctcaaggggctgacgtttaccctacgtcctggtgaggtgacggcgctggtgggacccaatgggtctgggaagagcacagtggctgccctgctgcagaatctgtaccagcccacagggggacaggtgctgctggatgaaaagcccatctcacagtatgaacactgctacctgcacagccaggtggtttcagttgggcaggagcctgtgctgttctccggttctgtgaggaacaacattgcttatgggctgcagagctgcgaagatgataaggtgatggcggctgcccaggctgcccacgcagatgacttcatccaggaaatggagcatggaatatacacagatgtaggggagaaggggagccagctggctgcgggacagaaacaacgtctggccattgcccgggcccttgtacgagacccgcgggtcctcatcctggatgaggctactagtgccctagatgtgcagtgcgagcaggccctgcaggactggaattcccgtggggatcgcacagtgctggtgattgctcacaggctgcaggcagttcagcgcgcccaccagatcctggtgctccaggagggcaagctgcagaagcttgcccagctccaggagggacaggacctctattcccgcctggttcagcagcggctgatggactgaggccccagggatactgggccctcttctcaggggcgtctccaggacccagagctgttcctgctttgagtttccctagagctgtgcggccagatagctgttcctgagttgcaagcacgatggagatttggacactgtgtgcttttggtggggtggagaggtggggtggggtggggtgtggtggggtggaggctgtctgtgtccaggaaacttaattccctggtgactagagctttgcctggtgatgaggagtattttgtggcataatacatatattttaaaatattttccttcttacgtgaactgtatacattcatatagaaaatttagacaatataaaaaagtacaaagaagaaaagtaaaagtacccattgtttcacttcctggagataaccatagttgctattttgctgcctgttccatcagtcgtttatctgttgtttgagatagaaattaaccaaaaatgacataaatattcatgagattgccttcctatatccctccttgttcctaccagtgtctgctattttgaagaagctagggtctggagggacagagaacagttccctgattaacagtattaataatgacattggtaacagctaccatttatagagttttaatgtgagtaggagctatgctaagtgtttttcatgtattatcgtttttaatcattatctccaaccctatgaggttggttattatccccattttacagatgaggaaactgaagctcaaagaggctcaatgactttcccaaggtggtcgtagtggtggagttggagtttgaacacaggcctgaccctagagtccacaccctgacccaatcaattatattgcatcttgggtccataaaccctaatccataatcccatcaagaaaagctctgctgctcttagctctaaataattcagaatctattctcttctctccagtcccgttgttatagtcttcactcatagacagcccatctgtctcaccctctcctgttgtatccagctccacgacaaacttctgccttccccaacacctttgtgcctttgcatatggtgttttcttgcccattttctgctcgactcgcccctgattttcaagttcaagacttaactcagggttcaggtcttccaggaggccttacttatgtcgtcagtctggggaactctccatgtgcttctatcactgtgcggttacctctttcacagcccttttaaagttctatcttccctttcccaccttttttgaccttccactagaccatgagcacctgggcggaaagccatatatcttattaagctttatatctgctacctggccgagggcctaattcatagtggagaataaatagtcaattgaataaatgaataaatatctccaccatcgtactaatcttaatcctccctgcccactcccaccactgaaaatgcaacattgtacacatcactggttgttgggagggacttaccttggaaagttgctattctaggaaagagaaaccttcatattcctggaaacagcaggtagtttccagtgctggcaatgaattccccagaactgctgttttggattttttcttgcctggcagctgttgggagcagggtgcagtgaggatggggtgagagtgggcagtttcttgtgcagatttgcctttctttcatcctggggctgacttgcagctccacacccatccatctctcaaatttcacagagggtaaaataggcatttggagagaaagaactctggcctgattcctttctctcccacaaatgtcctttattcataaaacaggaatagtaattcctgtatctcccaactacatggaagctgcagccctcacagaagaagatgatctgagaaattctttgatttcctcagtacagttatacccatgcatcataatactttaagcctggaaggcatcttaaaaataatgcaacagtcaaacctaattttacagagaaactgacatgaaatcacgcagctaatcatgataaagctgggtggaaaacttatcttgatgggcagtacaggaagatgcagtagaccttaagatgtcctgaaagtttcttatctcaggggaaactcccaggtaggctttatgtcagggacacagaaaaatgctccctgaaagtcaaaatattcgggctagacagacaaattcctgtaagtgtggtttgtctgggaaccacagatgtcactaatcctggtttgctccagagttctttttgttcactcctaccccccatcaccatttgattgatctccttaccctgtaatttccccttcttgtcgcttacctgcagtatctttcccacccaggcatgccttattctttctaaaggaaagtatgaatggagaggggaaagcttgggaaactgatagatttccttggatgccaaaacacctccatagcctgtctgcccggccctatgtggaaacagcattgagtttcaagtcctttatgcctccacccagggatagccacttggaatccacatggcaattgtgaaacaagcaggaaatgcgtaattgtcagaattttgtggggaaaggactagggaataaggaaaacaaagatcttccttgtgttttagagctgtcagctagaggagcacctgcttgagtctgatgccatctaatggtcccagaagaaactgggttttgaacctagagttccatggactcttaggaattagactactactactactaagcattcactggtgcttactatgtgctattgctgtgccaagtatctgaaacctgtcttcttaccttatttttcaagataattctatgtggcaggtattactatctcaattctaagagtgagaaaatggagttttagaaacatttactaacttgcctgggtcacatagctaaggaagaggtggacttgcccagctttgcataaaactcctcaaaagagttgcctatactccctgattccacttatcttcctactatcctctttttaaaatatattatttatttatttaaataagcaatatatgaatgtggtttgaaattcaaaagacacaaagaagtatacagaggaaagcctcactctcaatccttctcaaggtttgctaattcctcttgcataggcaatccgttcttccagctttgtgtttatctttccagagaagtttactgtgtattaagcaaatatgtatatctttattcttgctcagtattttcgcaaacagcagctgtctaagttcactgttctgaactttattttttaaattaaaaatatatggctatgtagtattcta

SEQ ID NO: 12178 - protein, 631 aa, Artificial Sequence
  derived and/or modified sequence
MVSKLSQLQTELLAALLESGLSKEALIQALGEPGPYLLAGEGPLDKGESCGGGRGELAELPNGLGETRGSEDETDDDGEDFTPPILKELENLSPEEAAHQKAVVETLLQEDPWRVAKMVKSYLQQHNIPQREVVDTTGLNQSHLSQHLNKGTPMKTQKRAALYTWYVRKQREVAQQFTHAGQGGLIEEPTGDELPTKKGRRNRFKWGPASQQILFQAYERQKNPSKEERETLVEECNRAECIQRGVSPSQAQGLGSNLVTEVRVYNWFANRRKEEAFRHKLAMDTYSGPPPGPGPGPALPAHSSPGLPPPALSPSKVHGVRYGQPATSETAEVPSSSGGPLVTVSTPLHQVSPTGLEPSHSLLSTEAKLVSAAGGPLPPVSTLTALHSLEQTSPGLNQQPQNLIMASLPGVMTIGPGEPASLGPTFTNTGASTLVIGLASTQAQSVPVINSMGSSLTTLQPVQFSQPLHPSYQQPLMPPVQSHVTQSPFMATMAQLQSPHALYSHKPEVAQYTHTGLLPQTMLITDTTNLSALASLTPTKQVFTSDTEASSESGLHTPASQATTLHVPSQDPASIQHLQPAHRLSASPTVSSSSLVLYQSSDSSNGQSHLLPSNHSVIETFISTQMASSSQ

SEQ ID NO: 12179 - protein, 572 aa, Artificial Sequence
  derived and/or modified sequence
MVSKLSQLQTELLAALLESGLSKEALIQALGEPGPYLLAGEGPLDKGESCGGGRGELAELPNGLGETRGSEDETDDDGEDFTPPILKELENLSPEEAAHQKAVVETLLQEDPWRVAKMVKSYLQQHNIPQREVVDTTGLNQSHLSQHLNKGTPMKTQKRAALYTWYVRKQREVAQQFTHAGQGGLIEEPTGDELPTKKGRRNRFKWGPASQQILFQAYERQKNPSKEERETLVEECNRAECIQRGVSPSQAQGLGSNLVTEVRVYNWFANRRKEEAFRHKLAMDTYSGPPPGPGPGPALPAHSSPGLPPPALSPSKVHGVRYGQPATSETAEVPSSSGGPLVTVSTPLHQVSPTGLEPSHSLLSTEAKLVSAAGGPLPPVSTLTALHSLEQTSPGLNQQPQNLIMASLPGVMTIGPGEPASLGPTFTNTGASTLVIGLASTQAQSVPVINSMGSSLTTLQPVQFSQPLHPSYQQPLMPPVQSHVTQSPFMATMAQLQSPHGERPVPHTAGDDDRGWLSMDAGERGAWQALQSACVSGTSVFPYSSNGQSHLLPSNHSVIETFISTQMASSSQ

SEQ ID NO: 12180 - protein, 521 aa, Artificial Sequence
  derived and/or modified sequence
MVSKLSQLQTELLAALLESGLSKEALIQALGEPGPYLLAGEGPLDKGESCGGGRGELAELPNGLGETRGSEDETDDDGEDFTPPILKELENLSPEEAAHQKAVVETLLQEDPWRVAKMVKSYLQQHNIPQREVVDTTGLNQSHLSQHLNKGTPMKTQKRAALYTWYVRKQREVAQQFTHAGQGGLIEEPTGDELPTKKGRRNRFKWGPASQQILFQAYERQKNPSKEERETLVEECNRAECIQRGVSPSQAQGLGSNLVTEVRVYNWFANRRKEEAFRHKLAMDTYSGPPPGPGPGPALPAHSSPGLPPPALSPSKVHGVRYGQPATSETAEVPSSSGGPLVTVSTPLHQVSPTGLEPSHSLLSTEAKLVSAAGGPLPPVSTLTALHSLEQTSPGLNQQPQNLIMASLPGVMTIGPGEPASLGPTFTNTGASTLVIGKLVGMGGHLGGRLMGQPQNPGAGRATGTHSFIHQHVFIQCLLWTSHCATSVIPGDSSNGQSHLLPSNHSVIETFISTQMASSSQ

SEQ ID NO: 12181 - protein, 603 aa, Artificial Sequence [sequence omitted]

SEQ ID NO: 12182 - protein, 278 aa, Artificial Sequence
  derived and/or modified sequence
MVSKLSQLQTELLAALLESGLSKEALIQALGEPGPYLLAGEGPLDKGESCGGGRGELAELPNGLGETRGSEDETDDDGEDFTPPILKELENLSPEEAAHQKAVVETLLQEDPWRVAKMVKSYLQQHNIPQREVVDTTGLNQSHLSQHLNKGTPMKTQKRAALYTWYVRKQREVAQRRNASREGCPHHRHRGWAPTSSRRCVSTTGLPTGAKKKPSGTSWPWTRTAGPPQGQARDLRCPLTAPLACLHLPSPPVRSTVCAMDSLRPVRLQKYPQAAAVP

SEQ ID NO: 12183 - protein, 452 aa, Artificial Sequence
  derived and/or modified sequence
MVSKLSQLQTELLAALLESGLSKEALIQALGEPGPYLLAGEGPLDKGESCGGGRGELAELPNGLGETRGSEDETDDDGEDFTPPILKELENLSPEEAAHQKAVVETLLQEDPWRVAKMVKSYLQQHNIPQREVVDTTGLNQSHLSQHLNKGTPMKTQKRAALYTWYVRKQREVAQQFTHAGQGGLIEEPTGDELPTKKGRRNRFKWGPASQQTSPGLNQQPQNLIMASLPGVMTIGPGEPASLGPTFTNTGASTLVIGLASTQAQSVPVINSMGSSLTTLQPVQFSQPLHPSYQQPLMPPVQSHVTQSPFMATMAQLQSPHALYSHKPEVAQYTHTGLLPQTMLITDTTNLSALASLTPTKQVFTSDTEASSESGLHTPASQATTLHVPSQDPASIQHLQPAHRLSASPTVSSSSLVLYQSSDSSNGQSHLLPSNHSVIETFISTQMASSSQ

SEQ ID NO: 12184 - protein, 394 aa, Artificial Sequence
  derived and/or modified sequence
MVSKLSQLQTELLAALLESGLSKEALIQALGEPGPYLLAGEGPLDKGESCGGGRGELAELPNGLGETRGSEDETDDDGEDFTPPILKELENLSPEEAAHQKAVVETLLQEDPWRVAKMVKSYLQQHNIPQREVVDTTGLNQSHLSQHLNKGTPMKTQKRAALYTWYVRKQREVAQQFTHAGQGGLIEEPTGDELPTKKGRRNRFKWGPASQQILFQAYERQKNPSKEERETLVEECNRAECIQRGVSPSQAQGLGSNLVTEVRVYNWFANRRKEEAFRHKLAMDTYSGPPPGPGPGPALPAHSSPGLPPPALSPSKVHGVRYGQPATSETAEVPSSSGGPLVTVSTPLHQVSPTGLEPSHSLLSTEAKLVSAAGGPLPPAACSQPGRVARLFNF

SEQ ID NO: 12185 - protein, 452 aa, Artificial Sequence
  derived and/or modified sequence
MVSKLSQLQTELLAALLESGLSKEALIQALGEPGPYLLAGEGPLDKGESCGGGRGELAELPNGLGETRGSEDETDDDGEDFTPPILKELENLSPEEAAHQKAVVETLLQEDPWRVAKMVKSYLQQHNIPQREVVDTTGLNQSHLSQHLNKGTPMKTQKRAALYTWYVRKQREVAQQFTHAGQGGLIEEPTGDELPTKKGRRNRFKWGPASQQILFQAYERQKNPSKEERETLVEECNRAECIQRGVSPSQAQGLGSNLVTEVRVYNWFANRRKEEAFRHKLAMDTYSGPPPGPGPGPALPAHSSPGLPPPALSPSKVHGVRYGQPATSETAEVPSSSGGPLVTVSTPLHQVSPTGLEPSHSLLSTEAKLVSAAGGPLPPVSTLTALHSLEQTSPGLNQQPQNLIMASLPGVMTIGPGEPASLGPTFTNTGASTLPLFGAGVAELTRQQGPSS

SEQ ID NO: 12186 - DNA, 3241 bp, Artificial Sequence
  derived and/or modified sequence
cgtggccctgtggcagccgagccatggtttctaaactgagccagctgcagacggagctcctggcggccctgctcgagtcagggctgagcaaagaggcactgatccaggcactgggtgagccggggccctacctcctggctggagaaggccccctggacaagggggagtcctgcggcggcggtcgaggggagctggctgagctgcccaatgggctgggggagactcggggctccgaggacgagacggacgacgatggggaagacttcacgccacccatcctcaaagagctggagaacctcagccctgaggaggcggcccaccagaaagccgtggtggagacccttctgcaggaggacccgtggcgtgtggcgaagatggtcaagtcctacctgcagcagcacaacatcccacagcgggaggtggtcgataccactggcctcaaccagtcccacctgtcccaacacctcaacaagggcactcccatgaagacgcagaagcgggccgccctgtacacctggtacgtccgcaagcagcgagaggtggcgcagcagttcacccatgcagggcagggagggctgattgaagagcccacaggtgatgagctaccaaccaagaaggggcggaggaaccgtttcaagtggggcccagcatcccagcagatcctgttccaggcctatgagaggcagaagaaccctagcaaggaggagcgagagacgctagtggaggagtgcaatagggcggaatgcatccagagaggggtgtccccatcacaggcacaggggctgggctccaacctcgtcacggaggtgcgtgtctacaactggtttgccaaccggcgcaaagaagaagccttccggcacaagctggccatggacacgtacagcgggccccccccagggccaggcccgggacctgcgctgcccgctcacagctcccctggcctgcctccacctgccctctcccccagtaaggtccacggtgtgcgctatggacagcctgcgaccagtgagactgcagaagtaccctcaagcagcggcggtcccttagtgacagtgtctacacccctccaccaagtgtcccccacgggcctggagcccagccacagcctgctgagtacagaagccaagctggtctcagcagctgggggccccctcccccctgtcagcaccctgacagcactgcacagcttggagcagacatccccaggcctcaaccagcagccccagaacctcatcatggcctcacttcctggggtcatgaccatcgggcctggtgagcctgcctccctgggtcctacgttcaccaacacaggtgcctccaccctggtcatcggcctggcctccacgcaggcacagagtgtgccggtcatcaacagcatgggcagcagcctgaccaccctgcagcccgtccagttctcccagccgctgcacccctcctaccagcagccgctcatgccacctgtgcagagccatgtgacccagagccccttcatggccaccatggctcagctgcagagcccccacgccctctacagccacaagcccgaggtggcccagtacacccacacgggcctgctcccgcagactatgctcatcaccgacaccaccaacctgagcgccctggccagcctcacgcccaccaagcaggtcttcacctcagacactgaggcctccagtgagtccgggcttcacacgccggcatctcaggccaccaccctccacgtccccagccaggaccctgccggcatccagcacctgcagccggcccaccggctcagcgccagccccacagtgtcctccagcagcctggtgctgtaccagagctcagactccagcaatggccagagccacctgctgccatccaaccacagcgtcatcgagaccttcatctccacccagatggcctcttcctcccagtaaccacggcacctgggccctggggcctgtactgcctgcttggggggtgatgagggcagcagccagccctgcctggaggacctgagcctgccgagcaaccgtggcccttcctggacagctgtgcctcgctccccactctgctctgatgcatcagaaagggagggctctgaggcgccccaacccgtggaggctgctcggggtgcacaggagggggtcgtggagagctaggagcaaagcctgttcatggcagatgtaggagggactgtcgctgcttcgtgggatacagtcttcttacttggaactgaagggggcggcctatgacttgggcacccccagcctgggcctatggagagccctgggaccgctacaccactctggcagccacacttctcaggacacaggcctgtgtagctgtgacctgctgagctctgagaggccctggatcagcgtggccttgttctgtcaccaatgtacccaccgggccactccttcctgccccaactccttccagctagtgacccacatgccatttgtactgaccccatcacctactcacacaggcatttcctgggtggctactctgtgccagagcctggggctctaacgcctgagcccagggaggccgaagctaacagggaaggcaggcagggctctcctggcttcccatccccagcgattccctctcccaggccccatgacctccagctttcctgtatttgttcccaagagcatcatgcctctgaggccagcctggcctcctgcctctactgggaaggctacttcggggctgggaagtcgtccttactcctgtgggagcctcgcaacccgtgccaagtccaggtcctggtggggcagctcctctgtctcgagcgccctgcagaccctgcccttgtttggggcaggagtagctgagctcacaaggcagcaaggcccgagcagctgagcagggccggggaactggccaagctgaggtgcccaggagaagaaagaggtgaccccagggcacaggagctacctgtgtggacaggactaacactcagaagcctgggggcctggctggctgagggcagttcgcagccaccctgaggagtctgaggtcctgagcactgccaggagggacaaaggagcctgtgaacccaggacaagcatggtcccacatccctgggcctgctgctgagaacctggccttcagtgtaccgcgtctaccctgggattcaggaaaaggcctggggtgacccggcaccccctgcagcttgtagccagccggggcgagtggcacgtttatttaacttttagtaaagtcaaggagaaatgcggtggaaaaa

SEQ ID NO: 12187 - DNA, 1896 bp, Artificial Sequence
  derived and/or modified sequence
atggtgtctaaattgagccagttgcagactgagctgctggcagccctgttagaaagcggcctgtcaaaagaggcactgattcaggcgctcggggagcccggaccctacctgctggcaggcgaaggccccctcgataagggcgagtcttgtggtggcggacgcggcgagttggctgagctgcccaatggactaggcgagaccagagggagcgaagacgaaacggatgacgacggcgaagacttcacaccgcccatcctcaaagagcttgaaaacctgagtccagaggaggcagcccaccagaaagcagtagttgagactctactgcaggaagacccctggcgggttgccaaaatggtgaaatcctatttacaacagcacaatattcctcaacgcgaggttgtcgatacaaccggccttaaccagtcacacctgtcccagcatctgaataaggggacaccaatgaagacccagaaaagggccgccctgtatacctggtatgtgcggaaacagagggaagtggctcaacagttcacacacgccggccagggaggcttgatagaggaacccaccggcgatgagctccctacaaagaagggcaggcgcaaccggttcaaatggggccccgcaagccagcagatcctgttccaagcatatgaaagacagaaaaatcctagcaaagaagaaagagaaacactcgtggaggagtgtaatcgggccgagtgcatccaacgcggagtctccccttctcaggcccaaggtttgggcagcaatctggtgaccgaagtgcgggtctacaactggttcgcaaatcggaggaaagaagaggcgtttaggcacaagcttgccatggacacatacagcgggcccccacccggcccgggtcctgggccggcgttgcctgcgcactcttctccagggctgcctcctcccgcattgagcccatccaaggtgcatggtgttaggtatggccagccagctacgtccgaaacggccgaggttccctcttcctctggaggcccattggtcactgtatcgactcccctgcatcaggtaagtcctaccggactagaaccctcacattccctcctctcgacagaggccaagctagtcagcgcggctggtggccccctcccccctgtatccaccctgactgccctgcacagtctcgagcaaacgtctccaggcctgaatcagcagcctcagaatttgatcatggcatccctgccgggcgtcatgacaatcggccccggggagcctgcctctctagggccaacgttcaccaatacaggtgcatctaccctggtgatcggcctggcttccacacaagcccaatctgtgcccgtgatcaactccatggggtcttccctgactactctacagcccgtccaattctctcagcccttacacccttcttaccaacagcccctcatgccaccggttcagtctcacgtgacccagagccccttcatggcaaccatggctcagttacagagcccccatgccttgtattctcataaacccgaggtagcacagtacacccacacaggactgctgccccagaccatgcttatcaccgacaccactaatttgtctgcactcgcgtctctcacccccaccaagcaagtcttcactagcgatacagaggcctctagtgagtctgggcttcacacacccgccagccaggctaccacattgcatgtaccttcccaggaccctgcctctatccagcacctccagccagcccacaggctttccgcctctcctaccgtctcttctagtagcctggttctgtaccaatctagcgactcaagtaacggccagtcgcatctcctccctagtaaccactccgtcatcgagacctttatctctactcagatggcctctagcagtcaatag

SEQ ID NO: 12188 - DNA, 1719 bp, Artificial Sequence
  derived and/or modified sequence
atggtctcaaagctctcccagctgcaaaccgaacttctagcagcgctgctggaatccgggttgtcaaaggaggctctgatccaggcactgggtgagcctggtccttacctcttggctggagaaggtccactggataagggtgaatcatgtgggggcggccggggagagctggccgagctgccaaatggtctcggagagacacgaggaagcgaggacgagactgacgacgatggagaagattttaccccgcccatattgaaggaactggaaaatttatcgccagaggaagcagctcaccagaaagcggtagtggagacactgctacaggaggatccttggcgggtcgccaaaatggtgaaaagctatcttcagcaacacaacatcccccagcgcgaggtcgtggacacaaccggtctgaatcagagccatttgtcacagcatttaaacaagggcacccccatgaaaacccagaagagggccgctctgtatacatggtatgtaaggaagcagcgtgaggtggcccagcagtttacccatgcagggcaggggggactgattgaggagcccacaggggatgaactgccaacgaaaaaaggccgtaggaatagatttaaatgggggccagcatcacagcagattctcttccaagcctatgaaaggcagaaaaatccctccaaggaggagagagagacactcgtggaggaatgtaaccgagccgaatgtatccagcgcggcgtgtcaccctcacaagcccagggactcggctcaaacctggtgactgaggtccgggtctataactggttcgcaaaccgccgaaaggaagaggccttccgtcacaaattagctatggacacctatagtggtcctcccccggggcctggccctggacccgctctgccagcgcattcatcacccgggctccccccacccgccctgtccccgtctaaagtgcatggggtcaggtatggacagcctgccacgtccgagaccgcagaagtaccttcttcctcaggcgggcccctcgtgaccgtgtcgacgcccttgcatcaggtttcaccgaccggactcgaaccgagtcacagtttactgtctaccgaagccaaacttgtgtctgcagcaggaggtccactccccccggtgtccaccctaactgctctccatagtctggagcagaccagccccggactaaaccagcaaccccagaacctgattatggcgagcctcccaggtgtgatgaccatagggcccggggagccagcatccttggggcccaccttcactaacacaggagctagtactctggtgataggcctcgccagcacgcaggcacagagcgtccctgttatcaattccatggggtcctctttgactacgcttcagcctgtgcagttcagccagcccctccacccatcttaccagcagcccctcatgccccctgtgcaatcccacgtgacacaaagcccctttatggcaaccatggctcagctgcagtcaccacacggtgagagaccagtcccccacacagctggagacgatgacagggggtggttgtccatggacgctggcgaaaggggcgcttggcaggcattgcagagtgcatgcgtgtctggtacgtccgtgttcccttacagctcaaacggccaaagccacctgctgccctcaaaccactcagtgatcgagaccttcatttccactcagatggcgtccagtagtcagtag

SEQ ID NO: 12189 - DNA, 1566 bp, Artificial Sequence
  derived and/or modified sequence
atggtttccaaacttagccaactccaaacagagttgttggccgccctgcttgaatccggtctgtcgaaggaggccctgattcaggcattgggcgaaccaggcccatatttgctggcaggagagggcccacttgataaaggtgaatcctgcggcggcggacggggggaactagcggaactgcccaacggcttaggagaaaccaggggtagcgaggacgagactgacgacgatggagaagattttacgccaccgatcctgaaagaactggaaaacctgtcacctgaggaggcagcccatcagaaggctgtggtcgagacgctcctgcaggaagatccatggcgcgtggcaaagatggttaagagctacctccagcagcataatataccgcagcgggaagtggtagataccaccgggcttaaccagtcacacctgtctcagcatcttaacaagggaacacccatgaagactcaaaaacgggctgctctatatacttggtatgtccgtaagcagcgggaggtagctcagcagtttactcatgccggccagggaggattgatcgaggagccaacaggagatgaattgccgacgaaaaaaggacgacggaaccgctttaagtggggccccgctagccagcagatcctgtttcaggcctacgagcggcaaaagaacccttcaaaggaggaaagagaaacactcgttgaggaatgtaacagggccgagtgcatccagcgcggagtgagcccctcacaggcccaagggcttggttcaaacctcgttactgaggtacgcgtttacaactggtttgcaaatcggcgaaaagaggaggccttccggcacaagctggctatggacacttactctggcccgccgcccgggccaggtccggggcccgctttgcctgctcactccagccccggcctcccacctccagccctgtcaccatctaaggtccatggcgtgcgatatgggcaacctgctacatccgagacagccgaggtcccatctagttccggaggccctctggtgaccgtcagtacccctctccatcaagtttcacctactggcttggagccctcacactctctgctctccacggaggccaaactggtgagtgctgcgggaggacccttacccccagtgagtacgctgactgccctgcactctttagagcagactagcccaggtcttaatcaacagccgcaaaacttgataatggcttccctgcctggggtcatgaccatcggtccaggcgagcccgcaagcctgggtcccacttttactaacactggcgcttcaactcttgttataggcaagcttgtcggaatgggaggtcatctgggggggcgattgatgggccagccccaaaaccccggcgccggtcgagccacagggacacactcttttatccatcagcacgtgttcattcagtgtctgctatggacgtctcactgtgcgactagcgtcatacctggggacagcagcaacggtcagtcccatctgcttccctccaatcatagtgtaattgagacttttatcagtacccagatggcatcctcatcccagtag

SEQ ID NO: 12190 - DNA, 1572 bp, Artificial Sequence
  derived and/or modified sequence
atggtttcaaagctcagccaattacaaactgagttacttgctgcactgctcgagagcggcttatcaaaagaagccctgatacaggctctgggagagccggggccgtaccttctggccggcgaggggcctctggacaagggtgagtcgtgcggtggaggcaggggggagctggctgaactgcccaatgggctgggagaaaccaggggtagcgaagacgaaactgatgacgatggcgaggattttaccccccccattttaaaggaattagaaaatctttccccggaggaagcggctcatcagaaagccgttgtcgagactctattacaggaggacccctggagagtggcaaagatggttaaaagttatctccagcagcacaacattccacagcgggaggtcgtggataccacaggacttaatcagagccacctctcccagcacctgaataaggggacccctatgaaaacgcagaagagagccgccttgtacacctggtacgtacgcaagcagcgcgaggtggctcaacagtttacacacgcaggccagggaggcctgattgaggaaccgactggagatgagctgcccacaaaaaagggcagacgaaatagattcaaatgggggcccgcttctcagcagatccttttccaggcatatgaacggcaaaaaaacccttcaaaggaagaaagagagactctggtcgaggaatgtaaccgtgccgagtgcattcagcgaggagtgtccccctcccaggcacagggtttagggtcaaacctcgtcactgaagtcagcgccgctggggggccactgccccctgtgagcacacttaccgccctccattccttggagcagacatctccagggctgaatcagcagccccaaaatctgattatggccagcctgccgggcgtgatgaccattggaccgggtgaacctgcctcgctgggtccaacattcaccaatacgggggctagtaccctggttataggccttgcgtcaacccaagctcagtccgtcccagtgatcaattcgatgggctcttctctcacgacgttgcaaccagtgcaattcagccagcccctgcacccttcatatcagcagcctctgatgccacccgttcaaagtcatgtaacacagtctccttttatggcaacaatggcacaactgcagagcccacacgcactctacagccataagccagaagtagcacaatacacacatacaggccttttaccgcaaacaatgcttattacagacacaacaaacctctcagccctcgccagcctaactcctaccaagcaagtgttcacttcagacactgaggcctcgagtgagagcggcctgcatacacctgccagccaggcaaccacactgcacgtcccttctcaggaccccgccagtattcagcacctccagcctgcccaccgtctttccgcatcccctacggtgagcagctctagcctggtcctctatcagagctcggactccagcaacgggcaatcgcacctccttccatcaaatcactccgtgatagaaaccttcatcagcacccagatggcctctagctctcagtag

SEQ ID NO: 12191 - DNA, 1812 bp, Artificial Sequence
  derived and/or modified sequence
atggttagcaagctgagtcagctgcaaaccgaactcctggcagctctgttagaatcagggttgtctaaagaggcactaatacaggcactcggggagcctgggccatatctcctggcaggcgaggggcccttagacaaaggcgagagctgcgggggtgggaggggagagctcgcggagctgccaaacggccttggcgagacaaggggcagcgaagacgaaacggatgacgacggcgaggacttcacacccccaatactgaaagagctcgagaacctgagcccagaggaggcagcccaccaaaaagccgtggtagaaacactgctgcaggaagatccctggcgagtcgctaagatggtcaagtcatacctacagcagcataacatcccacaacgggaggtcgtggacacaactggactgaaccagtcgcatctgagtcagcatcttaataagggcaccccgatgaagactcagaagagggctgccctttacacatggtacgtgagaaagcaacgcgaagtagcccagcagtttacccacgctggccaggggggcctgattgaggaacccaccggtgatgagctgcctaccaagaaggggcggcgcaatcggtttaaatggggcccagcctcccagcagattttgttccaggcttatgagcgtcagaaaaatccctccaaagaagagagagaaactttggtggaagagtgcaatcgtgcagagtgcattcaacgcggtgtgagtccgtcccaggcccaaggtctagggtctaacttagttacggaggtgcgagtgtataactggttcgccaacaggagaaaagaggaggcgtttcgccacaaattagcaatggacacctactccggccctcctcctggtcctggtcctggtcccgccctgcctgcccattcgagccctgggctgcccccacctgcgctgtcccctagtaaggtccacggcgtgagatatggacagccagcgacgtctgagaccgctgaggtaccttcctcttcagggggacccttagtcacagtttctacacccttacaccaggtgtcgccaacaggccttgaaccatcccattccctgttaagtaccgaggcaaagctggtaagcgcagctggcgggccacttccccccgtttcaacgctcactgcactccactcgctggaacagacttctcctggcctgaaccagcagccccagaacctcattatggcttcgctcccaggggtgatgacaatcggacctggagaacccgcgagccttgggccgacatttactaacaccggcgcctccactcttgtcatcggattggcatcaacacaggctcaaagtgttcctgttattaattcaatggggtcatctctgacgactttacagccagtgcagttctcccagcccctgcacccaagttaccagcaacccctgatgcctccagttcagtctcatgtcacccagtccccattcatggccaccatggcccagcttcaatctccccacgctttgtattctcataaacccgaagtcgcacagtatactcacactggcctattgccacagacgatgttaattaccgacactaccaatctgtccgccttggctagcctcacccctacaaagcaggtgttcacaagcgacacagaggcttcaagtgaaagcggcctgcacactcccgctagccaggccactacgctgcacgtcccctctcaggatccagcctcaattcagcatctacagccggctcaccgtctgtcggcctccccaacagtgagcagcagtagtttggtcctctatcagtcgctcgggctctag

SEQ ID NO: 12192 - DNA, 837 bp, Artificial Sequence
  derived and/or modified sequence
atggtgtccaaactgtcccagctacaaacagagctcctggcagcgctgctcgagagcgggttgtcgaaggaggccttgatccaggcactgggcgagcccggcccgtaccttctggccggcgaaggccctttggataagggtgagtcctgtggcggcggaaggggggaactggcagagctgccaaatggtttgggggaaacccgcggaagtgaagacgagactgatgacgacggtgaagacttcaccccgccaattttaaaggaactggaaaatctgtcacctgaagaggcagcacatcaaaaggccgttgtcgaaaccctgttgcaggaggacccgtggcgcgtggcaaagatggtaaagagctacttgcagcagcataatattcctcagcgggaggtagtcgacacaaccgggttgaatcagtcacatttatcccagcatctcaataaaggaactccgatgaaaactcagaaaagagccgccctgtatacctggtacgtgcgaaaacagagagaagtggcccagcgtcgcaatgcttcacgggaaggatgtccccatcaccgccacagaggttgggctcctactagtagccggaggtgtgtctccactacagggctgcccactggggccaagaagaagccgtcgggcacctcttggccctggacccgcaccgcagggccaccacaggggcaggccagagatctcagatgcccactcactgccccactcgcctgccttcacctccccagcccaccagtccggagcactgtgtgtgccatggacagcctgcggcccgtgcggctgcaaaagtacccgcaggcggccgcggtgccatag

SEQ ID NO: 12193 - DNA, 360 bp, Artificial Sequence
  derived and/or modified sequence
atggtgagtaagctctcccagctgcaaacagagctgctggctgccctgttggagtccgggctctccaaagaagccctgattcaggctttaggcgaacctggtccttacctcttagccggcgagggcccactggataagggagaaagttgtggggggggcagaggagagttggctgagcttccgaatggtcttggcgaaacaagggggtcagaggatgagacggatgatgacggggaggatttcacaccacctatcctgaaagagttggaaaacctttcacccgaagaggctgcacatcagaaagccgtggtggaaacattactgcaagtgcacccgtgtagggccggtagggccgactag

SEQ ID NO: 12194 - DNA, 744 bp, Artificial Sequence
  derived and/or modified sequence
atggtgagcaagctgagtcagctccagaccgagctgctggctgccctccttgagagcggcctgtctaaggaggccttgattcaagctctcggcgagccaggaccttacctgctggccggagaaggcccgctggataaaggagaatcatgtggagggggcagaggagaactggccgagttacctaacggattgggagagactcgcggctcagaggacgaaaccgacgatgatggtgaggactttaccccacccatcctgaaagaacttgaaaacctgagcccagaggaggctgcgcatcagaaggcggtagtcgaaaccctgctgcaggaggatccctggagagtggcaaagatggttaagtcctacctccagcagcacaacattccacagcgcgaagttgtcgataccacaggcctgaaccagagtcacctgtcccagcaccttaacaagggcaccccgatgaaaacccagaagagggcggccctgtacacctggtacgtgcggaagcagagggaagtagcgcaacagttcactcacgccgggcaaggcgggctaatcgaggagccaactggggacgagctgccgactaagaagggcaggcggaatcgttttaaatggggcccagcgagtcagcagatcttgttccaggcctatgaaagacagaaaaatccatccaaagaggagcgggaaacactcgtggaggagtgcaacagatgtgctctgtggactgcttgtgatcaatag

SEQ ID NO: 12195 - DNA, 1359 bp, Artificial Sequence
  derived and/or modified sequence
atggtctctaagttatctcagcttcagacagagttgctcgcagccctgctcgaatctggtctctccaaggaggcactgattcaggccttaggagagcccggtccgtatctgttagcgggtgagggaccactggataaaggagaaagctgcggggggggtaggggtgaattggccgaactccccaatggcctgggcgagacccgtggctctgaggacgaaacagatgatgacggagaagacttcactcccccgattctgaaagaactggaaaatctgagccccgaggaggccgcgcaccagaaggccgtagtggaaaccttactccaggaggatccctggagagtggccaaaatggtgaagtcgtacctgcagcaacataatataccacagagggaggtggtggacactactggcttaaatcagagtcacctgtctcagcacctgaacaagggaaccccaatgaagacacagaagagggctgcattgtatacatggtacgttcggaaacagcgagaagtggcccagcagtttacacatgccggtcaagggggactgattgaggagcctactggagatgagctccctactaaaaaagggcgtaggaaccgcttcaaatgggggcccgcttcacagcaaacttcaccaggcctcaaccagcagccacagaatctgatcatggcctccctgcccggagtgatgactattggaccgggtgagcccgcctcgctgggcccaacatttacaaatacaggggctagcacgctggtgatagggttggcttctacccaagcacaaagcgtccctgtcataaattccatgggtagttcccttactactctgcagcccgtgcaattcagccagccactacatccatcataccagcagccactaatgccacccgttcaatcacatgtcactcaatctcctttcatggcaactatggcccagttacagtcccctcacgccctgtacagtcataaacccgaggtcgctcagtatacccataccggattgcttccccagactatgttaatcactgacacgacgaatctgtctgccctggccagcctgactcccacgaaacaggtttttacaagcgacactgaagctagtagcgagtcaggccttcatacccctgcaagccaggccacaaccctgcacgtgccttcccaggacccagcatccattcagcacctgcagccagcacaccgcctaagcgcttctcccaccgtgtcttcctccagtcttgtcctgtaccagtcaagtgattcatcaaacggccagagtcaccttctgccatccaaccacagtgtgattgagacctttatttctacccagatggcttctagttcccagtag

SEQ ID NO: 12196 - DNA, 1212 bp, Artificial Sequence
  derived and/or modified sequence
atggtgaaatcctatctgcagcagcataatatcccccagcgagaagtcgttgacaccaccgggcttaatcagagccatctctcacagcatctcaataaagggacgcccatgaaaacccagaagcgagcagcactgtatacttggtatgtcaggaaacagagagaggtggcccaacagtttacacacgccggccagggtggtctcattgaagaacccacaggcgatgagttgccaaccaagaagggaagacggaatagatttaaatggggacccgccagtcaacaaatcttgttccaggcttatgagcggcagaaaaacccttctaaagaggagcgtgaaaccttagtagaagagtgcaatcgggccgagtgcatccagcgcggggtgagtccgtcacaggctcagggcctgggcagcaatctggtgaccgaagttcgagtgtataactggtttgccaaccgccgcaaggaagaggctttcaggcacaagctcgcaatggacacctactccggtccaccccctgggcccggcccgggcccagccctgcccgcccatagcagcccaggacttccacctcctgcgctgagcccaagtaaggtccatggcgttagatatggtcaaccggccacatctgagaccgctgaggtgccatccagcagcggcggacctttggtgacagtgagcacacccctgcaccaggtgagccccaccggattagagcccagccactcactccttagtaccgaggccaagctggtgtctgccgctggcgggccccttccacctgtctcgacgttaacagctctacattcactcgagcaaacctcccccggactgaatcagcagccccaaaatctgattatggcttctctgcccggggtgatgacaataggccctggtgagcccgccagcctcgggccaactttcacaaataccggagcgtctacactggtgataggaaagctagtaggcatgggcggacacctcggcgggcgactaatggggcaaccccagaacccaggagccggaagggcaacgggtacacactccttcattcacaccacctgcatctatcccgtgcccacattggaccagagtttgtgttatatatcggacacatgggtgaatcagaccgaccagaatttgtcaaacagctctcgcgaggccgggacgaaacacaatacgagcatcctttggtacctgaggcggtag

SEQ ID NO: 12197 - DNA, 1185 bp, Artificial Sequence
  derived and/or modified sequence
atggtgagcaaactttcacagctgcagaccgaattgctggcagccctacttgaatccggtttgtcaaaggaggccctcatccaggcattgggcgaacctggtccttacttacttgctggtgaggggccactggataaaggtgaatcatgtggcggcgggcgcggtgagctcgccgagctgcccaacggcctgggtgagacgagaggctcagaagatgaaaccgatgacgacggtgaggattttacaccaccaattttgaaggaactggaaaatctgagcccagaagaggccgcccaccagaaagccgtggtagaaaccctgctgcaggaagatccttggcgggtggctaagatggtcaagagctatttacagcagcacaacatcccccagagagaagttgtggataccaccggcctgaaccagtcccatctttcccagcatctgaacaaaggcacgcctatgaagactcagaaacgtgccgcactgtacacgtggtacgttcgaaagcagcgcgaagtggctcagcagttcacgcatgccggacaggggggcctgatcgaggagccaaccggcgatgagttacctaccaaaaaaggcagaaggaaccgcttcaaatggggccctgccagccagcagatcctcttccaggcttacgagcgccagaagaaccccagtaaggaggagagagaaactctggtggaggagtgcaatcgggctgaatgtatccagcgcggtgtgtctccctctcaagcccagggccttggatctaatctagtcacagaagttagagtgtataactggttcgccaatcggcggaaagaagaagcattcaggcataagctagctatggacacatacagcggtccaccacccgggcccggccccggacccgcactgcccgcacatagcagtcccgggctaccaccacccgcactttcaccttccaaggtccacggcgtaagatatggccaaccagccacgtccgaaactgcggaagtgccgagcagcagcggtggcccgctcgtaaccgtgtcaacccctcttcaccaggtgtctccaacagggttggagccttcccattccctattatcaacagaggcaaagcttgtctcggcggcgggtggccctttgccaccagccgcctgctcgcagcctggccgtgtcgctcggcttttcaatttttag

SEQ ID NO: 12198 - DNA, 1416 bp, Artificial Sequence
  derived and/or modified sequence
atggtgtccaagctgtcacagctgcagaccgagctgcttgccgctctattggaatccggactgtccaaagaagcgttgatccaagctctgggggaaccagggccctacctgcttgctggggagggcccactggacaagggagagtcatgcgggggagggcggggagagctagctgaactacctaacggtttgggtgagacacggggatccgaggacgaaaccgatgacgacggcgaggactttacccctcctattctgaaagagcttgaaaatctttcgcctgaggaagctgcgcatcagaaggccgtggtggagaccctcctgcaggaagatccttggagggtagcgaagatggtaaagtcgtacctgcagcaacacaacattccccagagagaggtggtggacaccactgggctcaaccaatcccatttatctcagcatttaaacaaaggtacacccatgaagacccagaagcgggcggctttgtacacttggtatgtgaggaaacagcgggaggttgctcagcagttcacacacgcaggacagggtggcctcattgaagagcctacaggcgacgagttaccaacgaaaaagggaaggcgaaacaggtttaagtggggccccgcctctcagcagatattattccaagcttacgaacgtcagaagaaccccagcaaggaagaaagggagacccttgtggaggaatgcaatcgggcagaatgtatccagagaggcgtgtctccctcacaggcccagggtctagggtcaaacttagttactgaagtcagagtctacaactggtttgcaaatcgccgaaaagaggaagcctttagacacaaactcgcgatggatacatacagtggccccccccctggccccggacccgggcctgcgctgcctgcccatagcagtccgggactgccccctccagccctgagcccaagcaaggtgcatggagtgagatatggtcagccggcaacttcagagactgccgaggtgccaagcagctctggtggcccactcgtaacagtatccactcccctgcatcaggtctctccaaccggccttgagccttctcattcccttctctcgaccgaggctaagctcgtttctgctgcaggtggcccattacctcccgtgtcaaccctcacagctctccactcccttgagcaaacttcgccaggccttaatcagcaaccccaaaatctgatcatggcctccctccccggcgtgatgactatcgggcctggagagccagcatctttaggtcctaccttcaccaacacaggcgcatctaccctggtgattggactggcatccacgcaagcccagtctgtgccagtgattaattcaatggggtcttccttaacaacactccagcctgtgcagttctcgcagcagggtccaagttcatag

SEQ ID NO: 12199 - DNA, 1359 bp, Artificial Sequence
  derived and/or modified sequence
atggtgagtaagctgagccagctgcaaacagaacttctggccgcgctgctggaatctgggttatctaaagaggcgctcattcaggcgctgggagaaccgggcccatatctcttggcaggcgaggggcctctggacaaaggcgaaagctgcggtggcggtcgtggcgagctggctgaattgcccaatggcctgggtgaaacccgggggtccgaggatgagaccgatgacgatggggaagactttacccccccaattctgaaagaactggagaatttaagccctgaagaggctgcgcaccagaaggccgttgtggagactctcctccaggaagacccttggcgcgtggccaaaatggtcaagagctacctgcagcagcataacatcccccagcgggaagtggttgatactaccggcctgaatcaatcccacttatcacagcatctgaacaaagggacccctatgaagactcaaaaacgggccgccctgtacacatggtatgtgagaaagcagagggaagttgcccaacaattcacccatgcaggccaggggggcctgatcgaggagcccacaggtgatgagctccccaccaaaaagggaagacggaatcgcttcaaatggggccccgcatcccagcaaatcttattccaagcatacgagaggcagaagaacccatcgaaagaggagcgtgaaactctggttgaggagtgtaatcgggccgagtgcatccagaggggagtgtcgccatctcaggcacagggtctaggcagcaacctggttactgaggttcgcgtctacaactggtttgcaaataggaggaaagaagaggcattccggcacaagctagccatggatacgtatagcgggcctcctcccggacctggcccaggccccgcgctgcccgcccatagcagtcctggcctgcctcctccagccctgtccccgagcaaagtccacggtgtgagatacggccagcccgcaaccagcgagactgccgaggtcccttcctcttctggcggtcctttggtgaccgtgtccactcccctgcatcaagtgtcaccgacaggcctggaaccctcacattctcttttgtcgactgaggctaaactggtcagcgcagcaggcggccctctcccgcctgtgagcacgcttaccgcgttgcacagtctagaacagacttctccaggcctgaaccagcagccccagaatctgatcatggcatctctccctggtgtcatgaccatcgggcccggggagcccgccagtctgggacccacattcaccaacacaggcgcatcaaccttgccactctttggagccggtgttgccgagcttacccggcagcaaggtcccagcagttag

SEQ ID NO: 12200 - DNA, 1071 bp, Artificial Sequence
  derived and/or modified sequence
taatggctggtaggattctggggaggcagcggctgcaaggagtttggcctgtgcctacccgcgggccgccagacacagccaacaaggtggggcagacgcctggcgtggtggactagggccgcctggccatgcgggtcacgcgcgatggtgtccaagttgtctcagttgcagacagagcttttggcagcgctcctggagtccggtctgtcaaaggaggctctgatccaagcccttggcgaaccggggccctatctgcttgccggggagggtcccctcgacaagggggagagttgcggaggaggtagaggagagctggccgaattgcccaatggcctgggagagacaaggggatcggaggacgagaccgatgatgatggagaagattttacaccaccgatactgaaagaactcgaaaacttaagccccgaagaagctgcacaccagaaggcagttgttgaaaccctgctacaggaagatccttggcgcgtagcaaaaatggtgaagagctacttgcagcagcacaacatcccccagcgagaagtggttgacacaaccggacttaaccaatctcacctgagtcagcacctgaacaagggcacccctatgaagacccaaaaaagagccgccctgtacacttggtacgttagaaaacagagagaagtcgctcagcagttcactcatgctgggcagggggggctgatagaagagcccactggagacgagttacctaccaaaaaggggcgaaggaataggtttaaatggggacctgcaagtcagcaaatcctctttcaggcatatgaacgccagaagaatccaagtaaagaggagcgggaaaccctagtagaggaatgcaaccgtgctgaatgcattcaaaggggggtctccccctctcaaccccagccagcagaatatcggtcccaggccgggctgagttcctggggacccccaccaccttgccagcatccggattcaaccgcacagctcggagccgacattcctaggccacaaccagctgctcctgagccacaccatggactgacatcctggggacacgatcatcgcgcctggtag

SEQ ID NO: 12201 - DNA, 5423 bp, Artificial Sequence
  derived and/or modified sequence
agctccaatgtaaacagaacaggcaggggccctgattcacgggccgctggggccagggttgggggttgggggtgcccacagggcttggctagtggggttttgggggggcagtgggtgcaaggagtttggtttgtgtctgccggccggcaggcaaacgcaacccacgcggtgggggaggcggctagcgtggtggacccgggccgcgtggccctgtggcagccgagccatggtttctaaactgagccagctgcagacggagctcctggcggccctgctcgagtcagggctgagcaaagaggcactgatccaggcactgggtgagccggggccctacctcctggctggagaaggccccctggacaagggggagtcctgcggcggcggtcgaggggagctggctgagctgcccaatgggctgggggagactcggggctccgaggacgagacggacgacgatggggaagacttcacgccacccatcctcaaagagctggagaacctcagccctgaggaggcggcccaccagaaagccgtggtggagacccttctgcaggaggacccgtggcgtgtggcgaagatggtcaagtcctacctgcagcagcacaacatcccacagcgggaggtggtcgataccactggcctcaaccagtcccacctgtcccaacacctcaacaagggcactcccatgaagacgcagaagcgggccgccctgtacacctggtacgtccgcaagcagcgagaggtggcgcagcagttcacccatgcagggcagggagggctgattgaagagcccacaggtgatgagctaccaaccaagaaggggcggaggaaccgtttcaagtggggcccagcatcccagcagatcctgttccaggcctatgagaggcagaagaaccctagcaaggaggagcgagagacgctagtggaggagtgcaatagggcggaatgcatccagagaggggtgtccccatcacaggcacaggggctgggctccaacctcgtcacggaggtgcgtgtctacaactggtttgccaaccggcgcaaagaagaagccttccggcacaagctggccatggacacgtacagcgggccccccccagggccaggcccgggacctgcgctgcccgctcacagctcccctggcctgcctccacctgccctctcccccagtaaggtccacggtgtgcgctatggacagcctgcgaccagtgagactgcagaagtaccctcaagcagcggcggtcccttagtgacagtgtctacacccctccaccaagtgtcccccacgggcctggagcccagccacagcctgctgagtacagaagccaagctggtctcagcagctgggggccccctcccccctgtcagcaccctgacagcactgcacagcttggagcagacatccccaggcctcaaccagcagccccagaacctcatcatggcctcacttcctggggtcatgaccatcgggcctggtgagcctgcctccctgggtcctacgttcaccaacacaggtgcctccaccctggtcatcggcctggcctccacgcaggcacagagtgtgccggtcatcaacagcatgggcagcagcctgaccaccctgcagcccgtccagttctcccagccgctgcacccctcctaccagcagccgctcatgccacctgtgcagagccatgtgacccagagccccttcatggccaccatggctcagctgcagagcccccacgccctctacagccacaagcccgaggtggcccagtacacccacacgggcctgctcccgcagactatgctcatcaccgacaccaccaacctgagcgccctggccagcctcacgcccaccaagcaggtcttcacctcagacactgaggcctccagtgagtccgggcttcacacgccggcatctcaggccaccaccctccacgtccccagccaggaccctgccagcatccagcacctgcagccggcccaccggctcagcgccagccccacagtgtcctccagcagcctggtgctgtaccagagctcagactccagcaatggccagagccacctgctgccatccaaccacagcgtcatcgagaccttcatctccacccagatggcctcttcctcccagtaaccacggcacctgggccctggggcctgtactgcctgcttggggggtgatgagggcagcagccagccctgcctggaggacctgagcctgccgagcaaccgtggcccttcctggacagctgtgcctcgctccccactctgctctgatgcatcagaaagggagggctctgaggcgccccaacccgtggaggctgctcggggtgcacaggagggggtcgtggagagctaggagcaaagcctgttcatggcagatgtaggagggactgtcgctgcttcgtgggatacagtcttcttacttggaactgaagggggcggcctatgacttgggcacccccagcctgggcctatggagagccctgggaccgctacaccactctggcagccacacttctcaggacacaggcctgtgtagctgtgacctgctgagctctgagaggccctggatcagcgtggccttgttctgtcaccaatgtacccaccgggccactccttcctgccccaactccttccagctagtgacccacatgccatttgtactgaccccatcacctactcacacaggcatttcctgggtggctactctgtgccagagcctggggctctaacgcctgagcccagggaggccgaagctaacagggaaggcaggcagggctctcctggcttcccatccccagcgattccctctcccaggccccatgacctccagctttcctgtatttgttcccaagagcatcatgcctctgaggccagcctggcctcctgcctctactgggaaggctacttcggggctgggaagtcgtccttactcctgtgggagcctcgcaacccgtgccaagtccaggtcctggtggggcagctcctctgtctcgagcgccctgcagaccctgcccttgtttggggcaggagtagctgagctcacaaggcagcaaggcccgagcagctgagcagggccggggaactggccaagctgaggtgcccaggagaagaaagaggtgaccccagggcacaggagctacctgtgtggacaggactaacactcagaagcctgggggcctggctggctgagggcagttcgcagccaccctgaggagtctgaggtcctgagcactgccaggagggacaaaggagcctgtgaacccaggacaagcatggtcccacatccctgggcctgctgctgagaacctggccttcagtgtaccgcgtctaccctgggattcaggaaaaggcctggggtgacccggcaccccctgcagcttgtagccagccggggcgagtggcacgtttatttaacttttagtaaagtcaaggagaaatgcggtggaaacttcttgcttgtccacaaatcattcagatggggtttgggcaggtagcgggaggctggggcaggccagaggcctgcgaagaggagacaggctccagcacccacgctctcacaccccacatctctgcttttcttgctctgctgagactctaatgacaaagccagatttcatcttaacctcaagcttctactttttaaaaaaattttgttttggagacagggtctcactgtcacccaggctggactgcagtggcattatacagctcactgcagccttgaactcctggactaaagggatcctcccacctcagcctcacaagcagcctcacaggcgctcactaccatgcccaactaatttttgtattcttttttttatagagacgaggtttcaccatgttgcctaggctggtctggaactcggctcaagtgatccacctgcctcggcctcccaaagtgctgggattacaggtgtgagccaccatccctggccatgagcttctacttcttttctttttctttttctttttttttttttgagatagggtcttgctccattgcttaggctagagtgcagtggcgcaatctcggctcactgcaacctgcacctcctgggttcaagcgattctcccacctcagcctcctgagtagctgggattacgggcgtgtgtcaacatgctcagctaatttttgtatttttagtagagatggggtctcgccatgttggccaggctggtctcaaactcctggcctcaattgatccacctccttggcctctcaaaatgcttggattacaggcatgagccactgcacccggccacaagcttctacttcttgcagaatgcctttgtcccatgaaacctagtccacgagtgctatgacacttcctgaagtcttgggtggggtgaacgcacaaatcctgggggtgtagagaggaggaggatgtttacttaaaatgtcttaaggttcagcattgacagagaggcaatatccaaatcactctaagttttgttttgggtcctctgacaattgagtttccataatctggtcggctcagagacaccatcatgtgtggtatattcacaaatgcagacaaagaaaattctagaaagccaggggtgaaaaagctctcctttctcagacgattctgtgaagtctatgtgggctaaggagagaagaacaaaagtttctctgggccttggcctcttggggatcccttctctcattttctaaaaactgtttctcacaccaggctaaggaggtggtggggaaggtctcccttcccctgcccacctcagacagttctagggagatggaggtttcaccacttggccactagtctcaaataactggaaggttccttttttcctgaggtcatgaaatgttctggaaccacagcgcccccgccagccctccgtgggagcacagaggggcaggccttgattggtcttctcaccctacagccacttttttggcccaactctcgagcaagccttcatcaccatcagggtctcatgggcagtctgggtttgccagcccagtccttgaacttggagagggaggtggggcttggaaatgccttgtccccagggtgggggggacaccttgtccttggagctggctgagccctgtgcccatggctgggttcagtttgcaggtatagctgtagcactctttgctggtgggaatggagaggtctcgctggccttctttgcctttttcttctttttggtcccaagcgacacctggtccccgttgagctcacctgacttctgcttctggactgtggccatgctggtgggggtggtggcagcgacagccgagtcgacactggccaccttcttggctttctttttcaacttccttttcttctttgcctccttctccactgttccagggctgtggatggctgactcctgtaggatgtcggacgccgacacagctgcctcccggcaccgccgccactcctcgtcactgtcctcactgc

SEQ ID NO: 12202 - DNA, 1742 bp, Artificial Sequence
  derived and/or modified sequence
cgtggccctgtggcagccgagccatggtttctaaactgagccagctgcagacggagctcctggcggccctgctcgagtcagggctgagcaaagaggcactgatccaggcactgggtgagccggggccctacctcctggctggagaaggccccctggacaagggggagtcctgcggcggcggtcgaggggagctggctgagctgcccaatgggctgggggagactcggggctccgaggacgagacggacgacgatggggaagacttcacgccacccatcctcaaagagctggagaacctcagccctgaggaggcggcccaccagaaagccgtggtggagacccttctgcaggaggacccgtggcgtgtggcgaagatggtcaagtcctacctgcagcagcacaacatcccacagcgggaggtggtcgataccactggcctcaaccagtcccacctgtcccaacacctcaacaagggcactcccatgaagacgcagaagcgggccgccctgtacacctggtacgtccgcaagcagcgagaggtggcgcagcagttcacccatgcagggcagggagggctgattgaagagcccacaggtgatgagctaccaaccaagaaggggcggaggaaccgtttcaagtggggcccagcatcccagcagatcctgttccaggcctatgagaggcagaagaaccctagcaaggaggagcgagagacgctagtggaggagtgcaatagggcggaatgcatccagagaggggtgtccccatcacaggcacaggggctgggctccaacctcgtcacggaggtgcgtgtctacaactggtttgccaaccggcgcaaagaagaagccttccggcacaagctggccatggacacgtacagcgggccccccccagggccaggcccgggacctgcgctgcccgctcacagctcccctggcctgcctccacctgccctctcccccagtaaggtccacggtgtgcgctatggacagcctgcgaccagtgagactgcagaagtaccctcaagcagcggcggtcccttagtgacagtgtctacacccctccaccaagtgtcccccacgggcctggagcccagccacagcctgctgagtacagaagccaagctggtctcagcagctgggggccccctcccccctgtcagcaccctgacagcactgcacagcttggagcagacatccccaggcctcaaccagcagccccagaacctcatcatggcctcacttcctggggtcatgaccatcgggcctggtgagcctgcctccctgggtcctacgttcaccaacacaggtgcctccaccctggtcatcggcctggcctccacgcaggcacagagtgtgccggtcatcaacagcatgggcagcagcctgaccaccctgcagcccgtccagttctcccagccgctgcacccctcctaccagcagccgctcatgccacctgtgcagagccatgtgacccagagccccttcatggccaccatggctcagctgcagagcccccacggtgagcgccctgtgccccacacagcaggagatgatgatagaggttggctgtcaatggatgcaggggaaaggggtgcctggcaggcattgcagtctgcatgtgtctctgggacaagtgtgtttccgtactccagcaatggccagagccacctgctgccatccaaccacagcgtcatcgagaccttcatctccacccagatggcctcttcctcccagtaa

SEQ ID NO: 12203 - DNA, 1589 bp, Artificial Sequence
  derived and/or modified sequence
cgtggccctgtggcagccgagccatggtttctaaactgagccagctgcagacggagctcctggcggccctgctcgagtcagggctgagcaaagaggcactgatccaggcactgggtgagccggggccctacctcctggctggagaaggccccctggacaagggggagtcctgcggcggcggtcgaggggagctggctgagctgcccaatgggctgggggagactcggggctccgaggacgagacggacgacgatggggaagacttcacgccacccatcctcaaagagctggagaacctcagccctgaggaggcggcccaccagaaagccgtggtggagacccttctgcaggaggacccgtggcgtgtggcgaagatggtcaagtcctacctgcagcagcacaacatcccacagcgggaggtggtcgataccactggcctcaaccagtcccacctgtcccaacacctcaacaagggcactcccatgaagacgcagaagcgggccgccctgtacacctggtacgtccgcaagcagcgagaggtggcgcagcagttcacccatgcagggcagggagggctgattgaagagcccacaggtgatgagctaccaaccaagaaggggcggaggaaccgtttcaagtggggcccagcatcccagcagatcctgttccaggcctatgagaggcagaagaaccctagcaaggaggagcgagagacgctagtggaggagtgcaatagggcggaatgcatccagagaggggtgtccccatcacaggcacaggggctgggctccaacctcgtcacggaggtgcgtgtctacaactggtttgccaaccggcgcaaagaagaagccttccggcacaagctggccatggacacgtacagcgggccccccccagggccaggcccgggacctgcgctgcccgctcacagctcccctggcctgcctccacctgccctctcccccagtaaggtccacggtgtgcgctatggacagcctgcgaccagtgagactgcagaagtaccctcaagcagcggcggtcccttagtgacagtgtctacacccctccaccaagtgtcccccacgggcctggagcccagccacagcctgctgagtacagaagccaagctggtctcagcagctgggggccccctcccccctgtcagcaccctgacagcactgcacagcttggagcagacatccccaggcctcaaccagcagccccagaacctcatcatggcctcacttcctggggtcatgaccatcgggcctggtgagcctgcctccctgggtcctacgttcaccaacacaggtgcctccaccctggtcatcggtaagctggtggggatgggtgggcacctgggtgggaggctcatggggcaaccgcagaatccaggagctggaagagccactgggactcattcattcattcatcaacatgtatttatccagtgcctactctggaccagtcactgtgctacatcagtgatacctggagactccagcaatggccagagccacctgctgccatccaaccacagcgtcatcgagaccttcatctccacccagatggcctcttcctcccagtaa

SEQ ID NO: 12204 - DNA, 3032 bp, Artificial Sequence
  derived and/or modified sequence
cttggctagtggggttttgggggggcagtgggtgcaaggagtttggtttgtgtctgccggccggcaggcaaacgcaacccacgcggtgggggaggcggctagcgtggtggacccgggccgcgtggccctgtggcagccgagccatggtttctaaactgagccagctgcagacggagctcctggcggccctgctcgagtcagggctgagcaaagaggcactgatccaggcactgggtgagccggggccctacctcctggctggagaaggccccctggacaagggggagtcctgcggcggcggtcgaggggagctggctgagctgcccaatgggctgggggagactcggggctccgaggacgagacggacgacgatggggaagacttcacgccacccatcctcaaagagctggagaacctcagccctgaggaggcggcccaccagaaagccgtggtggagacccttctgcaggaggacccgtggcgtgtggcgaagatggtcaagtcctacctgcagcagcacaacatcccacagcgggaggtggtcgataccactggcctcaaccagtcccacctgtcccaacacctcaacaagggcactcccatgaagacgcagaagcgggccgccctgtacacctggtacgtccgcaagcagcgagaggtggcgcagcagttcacccatgcagggcagggagggctgattgaagagcccacaggtgatgagctaccaaccaagaaggggcggaggaaccgtttcaagtggggcccagcatcccagcagatcctgttccaggcctatgagaggcagaagaaccctagcaaggaggagcgagagacgctagtggaggagtgcaatagggcggaatgcatccagagaggggtgtccccatcacaggcacaggggctgggctccaacctcgtcacggaggtctcagcagctgggggccccctcccccctgtcagcaccctgacagcactgcacagcttggagcagacatccccaggcctcaaccagcagccccagaacctcatcatggcctcacttcctggggtcatgaccatcgggcctggtgagcctgcctccctgggtcctacgttcaccaacacaggtgcctccaccctggtcatcggcctggcctccacgcaggcacagagtgtgccggtcatcaacagcatgggcagcagcctgaccaccctgcagcccgtccagttctcccagccgctgcacccctcctaccagcagccgctcatgccacctgtgcagagccatgtgacccagagccccttcatggccaccatggctcagctgcagagcccccacgccctctacagccacaagcccgaggtggcccagtacacccacacgggcctgctcccgcagactatgctcatcaccgacaccaccaacctgagcgccctggccagcctcacgcccaccaagcaggtcttcacctcagacactgaggcctccagtgagtccgggcttcacacgccggcatctcaggccaccaccctccacgtccccagccaggaccctgccagcatccagcacctgcagccggcccaccggctcagcgccagccccacagtgtcctccagcagcctggtgctgtaccagagctcagactccagcaatggccagagccacctgctgccatccaaccacagcgtcatcgagaccttcatctccacccagatggcctcttcctcccagtaaccacggcacctgggccctggggcctgtactgcctgcttggggggtgatgagggcagcagccagccctgcctggaggacctgagcctgccgagcaaccgtggcccttcctggacagctgtgcctcgctccccactctgctctgatgcatcagaaagggagggctctgaggcgccccaacccgtggaggctgctcggggtgcacaggagggggtcgtggagagctaggagcaaagcctgttcatggcagatgtaggagggactgtcgctgcttcgtgggatacagtcttcttacttggaactgaagggggcggcctatgacttgggcacccccagcctgggcctatggagagccctgggaccgctacaccactctggcagccacacttctcaggacacaggcctgtgtagctgtgacctgctgagctctgagaggccctggatcagcgtggccttgttctgtcaccaatgtacccaccgggccactccttcctgccccaactccttccagctagtgacccacatgccatttgtactgaccccatcacctactcacacaggcatttcctgggtggctactctgtgccagagcctggggctctaacgcctgagcccagggaggccgaagctaacagggaaggcaggcagggctctcctggcttcccatccccagcgattccctctcccaggccccatgacctccagctttcctgtatttgttcccaagagcatcatgcctctgaggccagcctggcctcctgcctctactgggaaggctacttcggggctgggaagtcgtccttactcctgtgggagcctcgcaacccgtgccaagtccaggtcctggtggggcagctcctctgtctcgagcgccctgcagaccctgcccttgtttggggcaggagtagctgagctcacaaggcagcaaggcccgagcagctgagcagggccggggaactggccaagctgaggtgcccaggagaagaaagaggtgaccccagggcacaggagctacctgtgtggacaggactaacactcagaagcctgggggcctggctggctgagggcagttcgcagccaccctgaggagtctgaggtcctgagcactgccaggagggacaaaggagcctgtgaacccaggacaagcatggtcccacatccctgggcctgctgctgagaacctggccttcagtgtaccgcgtctaccctgggattcaggaaaaggcctggggtgacccggcaccccctgcagcttgtagccagccggggcgagtggcacgtttatttaacttttagtaaagtcaaggagaaatgcggtgg

SEQ ID NO: 12205 - DNA, 2671 bp, Artificial Sequence
  derived and/or modified sequence
cttggctagtggggttttgggggggcagtgggtgcaaggagtttggtttgtgtctgccggccggcaggcaaacgcaacccacgcggtgggggaggcggctagcgtggtggacccgggccgcgtggccctgtggcagccgagccatggtttctaaactgagccagctgcagacggagctcctggcggccctgctcgagtcagggctgagcaaagaggcactgatccaggcactgggtgagccggggccctacctcctggctggagaaggccccctggacaagggggagtcctgcggcggcggtcgaggggagctggctgagctgcccaatgggctgggggagactcggggctccgaggacgagacggacgacgatggggaagacttcacgccacccatcctcaaagagctggagaacctcagccctgaggaggcggcccaccagaaagccgtggtggagacccttctgcaggaggacccgtggcgtgtggcgaagatggtcaagtcctacctgcagcagcacaacatcccacagcgggaggtggtcgataccactggcctcaaccagtcccacctgtcccaacacctcaacaagggcactcccatgaagacgcagaagcgggccgccctgtacacctggtacgtccgcaagcagcgagaggtggcgcagcagttcacccatgcagggcagggagggctgattgaagagcccacaggtgatgagctaccaaccaagaaggggcggaggaaccgtttcaagtggggcccagcatcccagcagatcctgttccaggcctatgagaggcagaagaaccctagcaaggaggagcgagagacgctagtggaggagtgcaatagggcggaatgcatccagagaggggtgtccccatcacaggcacaggggctgggctccaacctcgtcacggaggtgcgtgtctacaactggtttgccaaccggcgcaaagaagaagccttccggcacaagctggccatggacacgtacagcgggccccccccagggccaggcccgggacctgcgctgcccgctcacagctcccctggcctgcctccacctgccctctcccccagtaaggtccacggtgtgcgctatggacagcctgcgaccagtgagactgcagaagtaccctcaagcagcggcggtcccttagtgacagtgtctacacccctccaccaagtgtcccccacgggcctggagcccagccacagcctgctgagtacagaagccaagctggtctcagcagctgggggccccctcccccctgtcagcaccctgacagcactgcacagcttggagcagacatccccaggcctcaaccagcagccccagaacctcatcatggcctcacttcctggggtcatgaccatcgggcctggtgagcctgcctccctgggtcctacgttcaccaacacaggtgcctccaccctggtcatcggcctggcctccacgcaggcacagagtgtgccggtcatcaacagcatgggcagcagcctgaccaccctgcagcccgtccagttctcccagccgctgcacccctcctaccagcagccgctcatgccacctgtgcagagccatgtgacccagagccccttcatggccaccatggctcagctgcagagcccccacgccctctacagccacaagcccgaggtggcccagtacacccacacgggcctgctcccgcagactatgctcatcaccgacaccaccaacctgagcgccctggccagcctcacgcccaccaagcaggtcttcacctcagacactgaggcctccagtgagtccgggcttcacacgccggcatctcaggccaccaccctccacgtccccagccaggaccctgccagcatccagcacctgcagccggcccaccggctcagcgccagccccacagtgtcctccagcagcctggtgctgtaccagagcctggggctctaacgcctgagcccagggaggccgaagctaacagggaaggcaggcagggctctcctggcttcccatccccagcgattccctctcccaggccccatgacctccagctttcctgtatttgttcccaagagcatcatgcctctgaggccagcctggcctcctgcctctactgggaaggctacttcggggctgggaagtcgtccttactcctgtgggagcctcgcaacccgtgccaagtccaggtcctggtggggcagctcctctgtctcgagcgccctgcagaccctgcccttgtttggggcaggagtagctgagctcacaaggcagcaaggcccgagcagctgagcagggccggggaactggccaagctgaggtgcccaggagaagaaagaggtgaccccagggcacaggagctacctgtgtggacaggactaacactcagaagcctgggggcctggctggctgagggcagttcgcagccaccctgaggagtctgaggtcctgagcactgccaggagggacaaaggagcctgtgaacccaggacaagcatggtcccacatccctgggcctgctgctgagaacctggccttcagtgtaccgcgtctaccctgggattcaggaaaaggcctggggtgacccggcaccccctgcagcttgtagccagccggggcgagtggcacgtttatttaacttttagtaaagtcaaggagaaatgcggtgg

SEQ ID NO: 12206 - DNA, 1649 bp, Artificial Sequence
  derived and/or modified sequence
cagtgggtgcaaggagtttggtttgtgtctgccggccggcaggcaaacgcaacccacgcggtgggggaggcggctagcgtggtggacccgggccgcgtggccctgtggcagccgagccatggtttctaaactgagccagctgcagacggagctcctggcggccctgctcgagtcagggctgagcaaagaggcactgatccaggcactgggtgagccggggccctacctcctggctggagaaggccccctggacaagggggagtcctgcggcggcggtcgaggggagctggctgagctgcccaatgggctgggggagactcggggctccgaggacgagacggacgacgatggggaagacttcacgccacccatcctcaaagagctggagaacctcagccctgaggaggcggcccaccagaaagccgtggtggagacccttctgcaggaggacccgtggcgtgtggcgaagatggtcaagtcctacctgcagcagcacaacatcccacagcgggaggtggtcgataccactggcctcaaccagtcccacctgtcccaacacctcaacaagggcactcccatgaagacgcagaagcgggccgccctgtacacctggtacgtccgcaagcagcgagaggtggcgcagcggcggaatgcatccagagaggggtgtccccatcacaggcacaggggctgggctccaacctcgtcacggaggtgcgtgtctacaactggtttgccaaccggcgcaaagaagaagccttccggcacaagctggccatggacacgtacagcgggccccccccagggccaggcccgggacctgcgctgcccgctcacagctcccctggcctgcctccacctgccctctcccccagtaaggtccacggtgtgcgctatggacagcctgcgaccagtgagactgcagaagtaccctcaagcagcggcggtcccttagtgacagtgtctacacccctccaccaagtgtcccccacgggcctggagcccagccacagcctgctgagtacagaagccaagctggtctcagcagctgggggccccctcccccctgtcagcaccctgacagcactgcacagcttggagcagacatccccaggcctcaaccagcagccccagaacctcatcatggcctcacttcctggggtcatgaccatcgggcctggtgagcctgcctccctgggtcctacgttcaccaacacaggtgcctccaccctggtcatcggcctggcctccacgcaggcacagagtgtgccggtcatcaacagcatgggcagcagcctgaccaccctgcagcccgtccagttctcccagccgctgcacccctcctaccagcagccgctcatgccacctgtgcagagccatgtgacccagagccccttcatggccaccatggctcagctgcagagcccccacggtgagcgccctgtgccccacacagcaggagatgatgatagaggttggctgtcaatggatgcaggggaaaggggtgcctggcaggcattgcagtctgcatgtgtctctgggacaagtgtgtttccgtgattgagggtgtctgcaggccagtgtgttcccatgtgaatgcacgtatctgtgtgtgtgcacgactgcttgtgtgagcagatccctagtgc

SEQ ID NO: 12207 - DNA, 3039 bp, Artificial Sequence
  derived and/or modified sequence
cgtggccctgtggcagccgagccatggtttctaaactgagccagctgcagacggagctcctggcggccctgctcgagtcagggctgagcaaagaggcactgatccaggcactgggtgagccggggccctacctcctggctggagaaggccccctggacaagggggagtcctgcggcggcggtcgaggggagctggctgagctgcccaatgggctgggggagactcggggctccgaggacgagacggacgacgatggggaagacttcacgccacccatcctcaaagagctggagaacctcagccctgaggaggcggcccaccagaaagccgtggtggagacccttctgcaagttcacccatgcagggcagggagggctgattgaagagcccacaggtgatgagctaccaaccaagaaggggcggaggaaccgtttcaagtggggcccagcatcccagcagatcctgttccaggcctatgagaggcagaagaaccctagcaaggaggagcgagagacgctagtggaggagtgcaatagggcggaatgcatccagagaggggtgtccccatcacaggcacaggggctgggctccaacctcgtcacggaggtgcgtgtctacaactggtttgccaaccggcgcaaagaagaagccttccggcacaagctggccatggacacgtacagcgggccccccccagggccaggcccgggacctgcgctgcccgctcacagctcccctggcctgcctccacctgccctctcccccagtaaggtccacggtgtgcgctatggacagcctgcgaccagtgagactgcagaagtaccctcaagcagcggcggtcccttagtgacagtgtctacacccctccaccaagtgtcccccacgggcctggagcccagccacagcctgctgagtacagaagccaagctggtctcagcagctgggggccccctcccccctgtcagcaccctgacagcactgcacagcttggagcagacatccccaggcctcaaccagcagccccagaacctcatcatggcctcacttcctggggtcatgaccatcgggcctggtgagcctgcctccctgggtcctacgttcaccaacacaggtgcctccaccctggtcatcggcctggcctccacgcaggcacagagtgtgccggtcatcaacagcatgggcagcagcctgaccaccctgcagcccgtccagttctcccagccgctgcacccctcctaccagcagccgctcatgccacctgtgcagagccatgtgacccagagccccttcatggccaccatggctcagctgcagagcccccacgccctctacagccacaagcccgaggtggcccagtacacccacacgggcctgctcccgcagactatgctcatcaccgacaccaccaacctgagcgccctggccagcctcacgcccaccaagcaggtcttcacctcagacactgaggcctccagtgagtccgggcttcacacgccggcatctcaggccaccaccctccacgtccccagccaggaccctgccagcatccagcacctgcagccggcccaccggctcagcgccagccccacagtgtcctccagcagcctggtgctgtaccagagctcagactccagcaatggccagagccacctgctgccatccaaccacagcgtcatcgagaccttcatctccacccagatggcctcttcctcccagtaaccacggcacctgggccctggggcctgtactgcctgcttggggggtgatgagggcagcagccagccctgcctggaggacctgagcctgccgagcaaccgtggcccttcctggacagctgtgcctcgctccccactctgctctgatgcatcagaaagggagggctctgaggcgccccaacccgtggaggctgctcggggtgcacaggagggggtcgtggagagctaggagcaaagcctgttcatggcagatgtaggagggactgtcgctgcttcgtgggatacagtcttcttacttggaactgaagggggcggcctatgacttgggcacccccagcctgggcctatggagagccctgggaccgctacaccactctggcagccacacttctcaggacacaggcctgtgtagctgtgacctgctgagctctgagaggccctggatcagcgtggccttgttctgtcaccaatgtacccaccgggccactccttcctgccccaactccttccagctagtgacccacatgccatttgtactgaccccatcacctactcacacaggcatttcctgggtggctactctgtgccagagcctggggctctaacgcctgagcccagggaggccgaagctaacagggaaggcaggcagggctctcctggcttcccatccccagcgattccctctcccaggccccatgacctccagctttcctgtatttgttcccaagagcatcatgcctctgaggccagcctggcctcctgcctctactgggaaggctacttcggggctgggaagtcgtccttactcctgtgggagcctcgcaacccgtgccaagtccaggtcctggtggggcagctcctctgtctcgagcgccctgcagaccctgcccttgtttggggcaggagtagctgagctcacaaggcagcaaggcccgagcagctgagcagggccggggaactggccaagctgaggtgcccaggagaagaaagaggtgaccccagggcacaggagctacctgtgtggacaggactaacactcagaagcctgggggcctggctggctgagggcagttcgcagccaccctgaggagtctgaggtcctgagcactgccaggagggacaaaggagcctgtgaacccaggacaagcatggtcccacatccctgggcctgctgctgagaacctggccttcagtgtaccgcgtctaccctgggattcaggaaaaggcctggggtgacccggcaccccctgcagcttgtagccagccggggcgagtggcacgtttatttaacttttagtaaagtcaaggagaaatgcggtggaaa

SEQ ID NO: 12208 - DNA, 1594 bp, Artificial Sequence
  derived and/or modified sequence
cagtgggtgcaaggagtttggtttgtgtctgccggccggcaggcaaacgcaacccacgcggtgggggaggcggctagcgtggtggacccgggccgcgtggccctgtggcagccgagccatggtttctaaactgagccagctgcagacggagctcctggcggccctgctcgagtcagggctgagcaaagaggcactgatccaggcactgggtgagccggggccctacctcctggctggagaaggccccctggacaagggggagtcctgcggcggcggtcgaggggagctggctgagctgcccaatgggctgggggagactcggggctccgaggacgagacggacgacgatggggaagacttcacgccacccatcctcaaagagctggagaacctcagccctgaggaggcggcccaccagaaagccgtggtggagacccttctgcaggaggacccgtggcgtgtggcgaagatggtcaagtcctacctgcagcagcacaacatcccacagcgggaggtggtcgataccactggcctcaaccagtcccacctgtcccaacacctcaacaagggcactcccatgaagacgcagaagcgggccgccctgtacacctggtacgtccgcaagcagcgagaggtggcgcagcagttcacccatgcagggcagggagggctgattgaagagcccacaggtgatgagctaccaaccaagaaggggcggaggaaccgtttcaagtggggcccagcatcccagcagatcctgttccaggcctatgagaggcagaagaaccctagcaaggaggagcgagagacgctagtggaggagtgcaataggtgtgcgctatggacagcctgcgaccagtgagactgcagaagtaccctcaagcagcggcggtcccttagtgacagtgtctacacccctccaccaagtgtcccccacgggcctggagcccagccacagcctgctgagtacagaagccaagctggtctcagcagctgggggccccctcccccctgtcagcaccctgacagcactgcacagcttggagcagacatccccaggcctcaaccagcagccccagaacctcatcatggcctcacttcctggggtcatgaccatcgggcctggtgagcctgcctccctgggtcctacgttcaccaacacaggtgcctccaccctggtcatcggcctggcctccacgcaggcacagagtgtgccggtcatcaacagcatgggcagcagcctgaccaccctgcagcccgtccagttctcccagccgctgcacccctcctaccagcagccgctcatgccacctgtgcagagccatgtgacccagagccccttcatggccaccatggctcagctgcagagcccccacggtgagcgccctgtgccccacacagcaggagatgatgatagaggttggctgtcaatggatgcaggggaaaggggtgcctggcaggcattgcagtctgcatgtgtctctgggacaagtgtgtttccgtgattgagggtgtctgcaggccagtgtgttcccatgtgaatgcacgtatctgtgtgtgtgcacgactgcttgtgtgagcagatccctagtgc

SEQ ID NO: 12209 - DNA, 2819 bp, Artificial Sequence
  derived and/or modified sequence
cttggctagtggggttttgggggggcagtgggtgcaaggagtttggtttgtgtctgccggccggcaggcaaacgcaacccacgcggtgggggaggcggctagcgtggtggacccgggccgcgtggccctgtggcagccgagccatggtttctaaactgagccagctgcagacggagctcctggcggccctgctcgagtcagggctgagcaaagaggcactgatccaggcactgggtgagccggggccctacctcctggctggagaaggccccctggacaagggggagtcctgcggcggcggtcgaggggagctggctgagctgcccaatgggctgggggagactcggggctccgaggacgagacggacgacgatggggaagacttcacgccacccatcctcaaagagctggagaacctcagccctgaggaggcggcccaccagaaagccgtggtggagacccttctgcaggaggacccgtggcgtgtggcgaagatggtcaagtcctacctgcagcagcacaacatcccacagcgggaggtggtcgataccactggcctcaaccagtcccacctgtcccaacacctcaacaagggcactcccatgaagacgcagaagcgggccgccctgtacacctggtacgtccgcaagcagcgagaggtggcgcagcagttcacccatgcagggcagggagggctgattgaagagcccacaggtgatgagctaccaaccaagaaggggcggaggaaccgtttcaagtggggcccagcatcccagcagacatccccaggcctcaaccagcagccccagaacctcatcatggcctcacttcctggggtcatgaccatcgggcctggtgagcctgcctccctgggtcctacgttcaccaacacaggtgcctccaccctggtcatcggcctggcctccacgcaggcacagagtgtgccggtcatcaacagcatgggcagcagcctgaccaccctgcagcccgtccagttctcccagccgctgcacccctcctaccagcagccgctcatgccacctgtgcagagccatgtgacccagagccccttcatggccaccatggctcagctgcagagcccccacgccctctacagccacaagcccgaggtggcccagtacacccacacgggcctgctcccgcagactatgctcatcaccgacaccaccaacctgagcgccctggccagcctcacgcccaccaagcaggtcttcacctcagacactgaggcctccagtgagtccgggcttcacacgccggcatctcaggccaccaccctccacgtccccagccaggaccctgccagcatccagcacctgcagccggcccaccggctcagcgccagccccacagtgtcctccagcagcctggtgctgtaccagagctcagactccagcaatggccagagccacctgctgccatccaaccacagcgtcatcgagaccttcatctccacccagatggcctcttcctcccagtaaccacggcacctgggccctggggcctgtactgcctgcttggggggtgatgagggcagcagccagccctgcctggaggacctgagcctgccgagcaaccgtggcccttcctggacagctgtgcctcgctccccactctgctctgatgcatcagaaagggagggctctgaggcgccccaacccgtggaggctgctcggggtgcacaggagggggtcgtggagagctaggagcaaagcctgttcatggcagatgtaggagggactgtcgctgcttcgtgggatacagtcttcttacttggaactgaagggggcggcctatgacttgggcacccccagcctgggcctatggagagccctgggaccgctacaccactctggcagccacacttctcaggacacaggcctgtgtagctgtgacctgctgagctctgagaggccctggatcagcgtggccttgttctgtcaccaatgtacccaccgggccactccttcctgccccaactccttccagctagtgacccacatgccatttgtactgaccccatcacctactcacacaggcatttcctgggtggctactctgtgccagagcctggggctctaacgcctgagcccagggaggccgaagctaacagggaaggcaggcagggctctcctggcttcccatccccagcgattccctctcccaggccccatgacctccagctttcctgtatttgttcccaagagcatcatgcctctgaggccagcctggcctcctgcctctactgggaaggctacttcggggctgggaagtcgtccttactcctgtgggagcctcgcaacccgtgccaagtccaggtcctggtggggcagctcctctgtctcgagcgccctgcagaccctgcccttgtttggggcaggagtagctgagctcacaaggcagcaaggcccgagcagctgagcagggccggggaactggccaagctgaggtgcccaggagaagaaagaggtgaccccagggcacaggagctacctgtgtggacaggactaacactcagaagcctgggggcctggctggctgagggcagttcgcagccaccctgaggagtctgaggtcctgagcactgccaggagggacaaaggagcctgtgaacccaggacaagcatggtcccacatccctgggcctgctgctgagaacctggccttcagtgtaccgcgtctaccctgggattcaggaaaaggcctggggtgacccggcaccccctgcagcttgtagccagccggggcgagtggcacgtttatttaacttttagtaaagtcaaggagaaatgcggtgg

SEQ ID NO: 12210 - DNA, 1493 bp, Artificial Sequence
  derived and/or modified sequence
cagtgggtgcaaggagtttggtttgtgtctgccggccggcaggcaaacgcaacccacgcgaaagccgtggtggagacccttctgcaggaggacccgtggcgtgtggcgaagatggtcaagtcctacctgcagcagcacaacatcccacagcgggaggtggtcgataccactggcctcaaccagtcccacctgtcccaacacctcaacaagggcactcccatgaagacgcagaagcgggccgccctgtacacctggtacgtccgcaagcagcgagaggtggcgcagcagttcacccatgcagggcagggagggctgattgaagagcccacaggtgatgagctaccaaccaagaaggggcggaggaaccgtttcaagtggggcccagcatcccagcagatcctgttccaggcctatgagaggcagaagaaccctagcaaggaggagcgagagacgctagtggaggagtgcaatagggcggaatgcatccagagaggggtgtccccatcacaggcacaggggctgggctccaacctcgtcacggaggtgcgtgtctacaactggtttgccaaccggcgcaaagaagaagccttccggcacaagctggccatggacacgtacagcgggccccccccagggccaggcccgggacctgcgctgcccgctcacagctcccctggcctgcctccacctgccctctcccccagtaaggtccacggtgtgcgctatggacagcctgcgaccagtgagactgcagaagtaccctcaagcagcggcggtcccttagtgacagtgtctacacccctccaccaagtgtcccccacgggcctggagcccagccacagcctgctgagtacagaagccaagctggtctcagcagctgggggccccctcccccctgtcagcaccctgacagcactgcacagcttggagcagacatccccaggcctcaaccagcagccccagaacctcatcatggcctcacttcctggggtcatgaccatcgggcctggtgagcctgcctccctgggtcctacgttcaccaacacaggtgcctccaccctggtcatcggtaagctggtggggatgggtgggcacctgggtgggaggctcatggggcaaccgcagaatccaggagctggaagagccactgggactcattcattcattcatacaacatgtatttatccagtgcctactctggaccagtcactgtgctacatcagtgatacctgggtgaaccaaacagaccaaaatctcagcaactcaagcagggaggcaggcactaagcataatacatcaattctgtggtacctcagaaggtgaagggtctatgggcaaattacagcagggtaagggggactgatgttttctaagtttttgttttatgaagaaaaattaagcccagaaagcccttatttgcaggtacaattatgcagaagcccagtacataagatagataaggagctgctaggagaggggagcagagaactgac

SEQ ID NO: 12211 - DNA, 1352 bp, Artificial Sequence
  derived and/or modified sequence
cttggctagtggggttttgggggggcagtgggtgcaaggagtttggtttgtgtctgccggccggcaggcaaacgcaacccacgcggtgggggaggcggctagcgtggtggacccgggccgcgtggccctgtggcagccgagccatggtttctaaactgagccagctgcagacggagctcctggcggccctgctcgagtcagggctgagcaaagaggcactgatccaggcactgggtgagccggggccctacctcctggctggagaaggccccctggacaagggggagtcctgcggcggcggtcgaggggagctggctgagctgcccaatgggctgggggagactcggggctccgaggacgagacggacgacgatggggaagacttcacgccacccatcctcaaagagctggagaacctcagccctgaggaggcggcccaccagaaagccgtggtggagacccttctgcaggaggacccgtggcgtgtggcgaagatggtcaagtcctacctgcagcagcacaacatcccacagcgggaggtggtcgataccactggcctcaaccagtcccacctgtcccaacacctcaacaagggcactcccatgaagacgcagaagcgggccgccctgtacacctggtacgtccgcaagcagcgagaggtggcgcagcagttcacccatgcagggcagggagggctgattgaagagcccacaggtgatgagctaccaaccaagaaggggcggaggaaccgtttcaagtggggcccagcatcccagcagatcctgttccaggcctatgagaggcagaagaaccctagcaaggaggagcgagagacgctagtggaggagtgcaatagggcggaatgcatccagagaggggtgtccccatcacaggcacaggggctgggctccaacctcgtcacggaggtgcgtgtctacaactggtttgccaaccggcgcaaagaagaagccttccggcacaagctggccatggacacgtacagcgggccccccccagggccaggcccgggacctgcgctgcccgctcacagctcccctggcctgcctccacctgccctctcccccagtaaggtccacggtgtgcgctatggacagcctgcgaccagtgagactgcagaagtaccctcaagcagcggcggtcccttagtgacagtgtctacacccctccaccaagtgtcccccacgggcctggagcccagccacagcctgctgagtacagaagccaagctggtctcagcagctgggggccccctcccccctgcagcttgtagccagccggggcgagtggcacgtttatttaacttttagtaaagtcaaggagaaatgcggtgg

SEQ ID NO: 12212 - DNA, 1936 bp, Artificial Sequence
  derived and/or modified sequence
cttggctagtggggttttgggggggcagtgggtgcaaggagtttggtttgtgtctgccggccggcaggcaaacgcaacccacgcggtgggggaggcggctagcgtggtggacccgggccgcgtggccctgtggcagccgagccatggtttctaaactgagccagctgcagacggagctcctggcggccctgctcgagtcagggctgagcaaagaggcactgatccaggcactgggtgagccggggccctacctcctggctggagaaggccccctggacaagggggagtcctgcggcggcggtcgaggggagctggctgagctgcccaatgggctgggggagactcggggctccgaggacgagacggacgacgatggggaagacttcacgccacccatcctcaaagagctggagaacctcagccctgaggaggcggcccaccagaaagccgtggtggagacccttctgcaggaggacccgtggcgtgtggcgaagatggtcaagtcctacctgcagcagcacaacatcccacagcgggaggtggtcgataccactggcctcaaccagtcccacctgtcccaacacctcaacaagggcactcccatgaagacgcagaagcgggccgccctgtacacctggtacgtccgcaagcagcgagaggtggcgcagcagttcacccatgcagggcagggagggctgattgaagagcccacaggtgatgagctaccaaccaagaaggggcggaggaaccgtttcaagtggggcccagcatcccagcagatcctgttccaggcctatgagaggcagaagaaccctagcaaggaggagcgagagacgctagtggaggagtgcaatagggcggaatgcatccagagaggggtgtccccatcacaggcacaggggctgggctccaacctcgtcacggaggtgcgtgtctacaactggtttgccaaccggcgcaaagaagaagccttccggcacaagctggccatggacacgtacagcgggccccccccagggccaggcccgggacctgcgctgcccgctcacagctcccctggcctgcctccacctgccctctcccccagtaaggtccacggtgtgcgctatggacagcctgcgaccagtgagactgcagaagtaccctcaagcagcggcggtcccttagtgacagtgtctacacccctccaccaagtgtcccccacgggcctggagcccagccacagcctgctgagtacagaagccaagctggtctcagcagctgggggccccctcccccctgtcagcaccctgacagcactgcacagcttggagcagacatccccaggcctcaaccagcagccccagaacctcatcatggcctcacttcctggggtcatgaccatcgggcctggtgagcctgcctccctgggtcctacgttcaccaacacaggtgcctccaccctggtcatcggcctggcctccacgcaggcacagagtgtgccggtcatcaacagcatgggcagcagcctgaccaccctgcagcccgtccagttctcccagcaaggcccgagcagctgagcagggccggggaactggccaagctgaggtgcccaggagaagaaagaggtgaccccagggcacaggagctacctgtgtggacaggactaacactcagaagcctgggggcctggctggctgagggcagttcgcagccaccctgaggagtctgaggtcctgagcactgccaggagggacaaaggagcctgtgaacccaggacaagcatggtcccacatccctgggcctgctgctgagaacctggccttcagtgtaccgcgtctaccctgggattcaggaaaaggcctggggtgacccggcaccccctgcagcttgtagccagccggggcgagtggcacgtttatttaacttttagtaaagtcaaggagaaatgcggtgg

SEQ ID NO: 12213 - DNA, 1493 bp, Artificial Sequence
  derived and/or modified sequence
aaacgcaacccacgcggtgggggaggcggctagcgtggtggacccgggccgcgtggccctgtggcagccgagccatggtttctaaactgagccagctgcagacggagctcctggcggccctgctcgagtcagggctgagcaaagaggcactgatccaggcactgggtgagccggggccctacctcctggctggagaaggccccctggacaagggggagtcctgcggcggcggtcgaggggagctggctgagctgcccaatgggctgggggagactcggggctccgaggacgagacggacgacgatggggaagacttcacgccacccatcctcaaagagctggagaacctcagccctgaggaggcggcccaccagaaagccgtggtggagacccttctgcaggaggacccgtggcgtgtggcgaagatggtcaagtcctacctgcagcagcacaacatcccacagcgggaggtggtcgataccactggcctcaaccagtcccacctgtcccaacacctcaacaagggcactcccatgaagacgcagaagcgggccgccctgtacacctggtacgtccgcaagcagcgagaggtggcgcagcagttcacccatgcagggcagggagggctgattgaagagcccacaggtgatgagctaccaaccaagaaggggcggaggaaccgtttcaagtggggcccagcatcccagcagatcctgttccaggcctatgagaggcagaagaaccctagcaaggaggagcgagagacgctagtggaggagtgcaatagggcggaatgcatccagagaggggtgtccccatcacaggcacaggggctgggctccaacctcgtcacggaggtgcgtgtctacaactggtttgccaaccggcgcaaagaagaagccttccggcacaagctggccatggacacgtacagcgggccccccccagggccaggcccgggacctgcgctgcccgctcacagctcccctggcctgcctccacctgccctctcccccagtaaggtccacggtgtgcgctatggacagcctgcgaccagtgagactgcagaagtaccctcaagcagcggcggtcccttagtgacagtgtctacacccctccaccaagtgtcccccacgggcctggagcccagccacagcctgctgagtacagaagccaagctggtctcagcagctgggggccccctcccccctgtcagcaccctgacagcactgcacagcttggagcagacatccccaggcctcaaccagcagccccagaacctcatcatggcctcacttcctggggtcatgaccatcgggcctggtgagcctgcctccctgggtcctacgttcaccaacacaggtgcctccaccctgcccttgtttggggcaggagtagctgagctcacaaggcagcaaggcccgagcagctgagcagggccggggaactggccaagctgaggtgcccaggagaagaaagaggtgaccccaggg

SEQ ID NO: 12214 - DNA, 3030 bp, Artificial Sequence
  derived and/or modified sequence
cttggctagtggggttttgggggggcagtgggtgcaaggagtttggtttgtgtctgccggccggcaggcaaacgcaacccacgcggtgggggaggcggctagcgtggtggacccgggccgcgtggccctgtggcagccgagccatggtttctaaactgagccagctgcagacggagctcctggcggccctgctcgagtcagggctgagcaaagaggcactgatccaggcactgggtgagccggggccctacctcctggctggagaaggccccctggacaagggggagtcctgcggcggcggtcgaggggagctggctgagctgcccaatgggctgggggagactcggggctccgaggacgagacggacgacgatggggaagacttcacgccacccatcctcaaagagctggagaacctcagccctgaggaggcggcccaccagaaagccgtggtggagacccttctgcaggaggacccgtggcgtgtggcgaagatggtcaagtcctacctgcagcagcacaacatcccacagcgggaggtggtcgataccactggcctcaaccagtcccacctgtcccaacacctcaacaagggcactcccatgaagacgcagaagcgggccgccctgtacacctggtacgtccgcaagcagcgagaggtggcgcagcagttcacccatgcagggcagggagggctgattgaagagcccacaggtgatgagctaccaaccaagaaggggcggaggaaccgtttcaagtggggcccagcatcccagcagatcctgttccaggcctatgagaggcagaagaaccctagcaaggaggagcgagagacgctagtggaggagtgcaatagggcggaatgcatccagagaggggtgtccccatcacagccacagcctgctgagtacagaagccaagctggtctcagcagctgggggccccctcccccctgtcagcaccctgacagcactgcacagcttggagcagacatccccaggcctcaaccagcagccccagaacctcatcatggcctcacttcctggggtcatgaccatcgggcctggtgagcctgcctccctgggtcctacgttcaccaacacaggtgcctccaccctggtcatcggcctggcctccacgcaggcacagagtgtgccggtcatcaacagcatgggcagcagcctgaccaccctgcagcccgtccagttctcccagccgctgcacccctcctaccagcagccgctcatgccacctgtgcagagccatgtgacccagagccccttcatggccaccatggctcagctgcagagcccccacgccctctacagccacaagcccgaggtggcccagtacacccacacgggcctgctcccgcagactatgctcatcaccgacaccaccaacctgagcgccctggccagcctcacgcccaccaagcaggtcttcacctcagacactgaggcctccagtgagtccgggcttcacacgccggcatctcaggccaccaccctccacgtccccagccaggaccctgccagcatccagcacctgcagccggcccaccggctcagcgccagccccacagtgtcctccagcagcctggtgctgtaccagagctcagactccagcaatggccagagccacctgctgccatccaaccacagcgtcatcgagaccttcatctccacccagatggcctcttcctcccagtaaccacggcacctgggccctggggcctgtactgcctgcttggggggtgatgagggcagcagccagccctgcctggaggacctgagcctgccgagcaaccgtggcccttcctggacagctgtgcctcgctccccactctgctctgatgcatcagaaagggagggctctgaggcgccccaacccgtggaggctgctcggggtgcacaggagggggtcgtggagagctaggagcaaagcctgttcatggcagatgtaggagggactgtcgctgcttcgtgggatacagtcttcttacttggaactgaagggggcggcctatgacttgggcacccccagcctgggcctatggagagccctgggaccgctacaccactctggcagccacacttctcaggacacaggcctgtgtagctgtgacctgctgagctctgagaggccctggatcagcgtggccttgttctgtcaccaatgtacccaccgggccactccttcctgccccaactccttccagctagtgacccacatgccatttgtactgaccccatcacctactcacacaggcatttcctgggtggctactctgtgccagagcctggggctctaacgcctgagcccagggaggccgaagctaacagggaaggcaggcagggctctcctggcttcccatccccagcgattccctctcccaggccccatgacctccagctttcctgtatttgttcccaagagcatcatgcctctgaggccagcctggcctcctgcctctactgggaaggctacttcggggctgggaagtcgtccttactcctgtgggagcctcgcaacccgtgccaagtccaggtcctggtggggcagctcctctgtctcgagcgccctgcagaccctgcccttgtttggggcaggagtagctgagctcacaaggcagcaaggcccgagcagctgagcagggccggggaactggccaagctgaggtgcccaggagaagaaagaggtgaccccagggcacaggagctacctgtgtggacaggactaacactcagaagcctgggggcctggctggctgagggcagttcgcagccaccctgaggagtctgaggtcctgagcactgccaggagggacaaaggagcctgtgaacccaggacaagcatggtcccacatccctgggcctgctgctgagaacctggccttcagtgtaccgcgtctaccctgggattcaggaaaaggcctggggtgacccggcaccccctgcagcttgtagccagccggggcgagtggcacgtttatttaacttttagtaaagtcaaggagaaatgcggtgg

SEQ ID NO: 12215 - DNA, 1896 bp, Artificial Sequence
  derived and/or modified sequence
atggtgtccaagctgagccagctgcagacagagctgctggccgccctgctggagagcggcctgagcaaggaggccctgatccaggccctgggggagcccggcccctacctgctggccggggagggccccctggacaagggggagagctgtggcggcggccgcggggagctggccgagctgcccaacggcctgggggagacccggggctctgaagatgaaacagatgatgatggagaggacttcaccccacccatcctgaaggagctggagaacctgagccctgaggaggccgcccaccagaaggctgtggtggagaccctgctgcaggaggacccctggagggtggccaagatggtgaagagctacctgcagcagcacaacatcccccagcgggaggtggtggacaccaccggcctgaaccagagccacctgagccagcacctgaacaagggcacccccatgaagacccagaagagagctgccctgtacacctggtacgtgaggaagcagcgggaggtggcccagcagttcacccacgccggccagggcggcctcatcgaggagcccactggagatgagctgcccaccaagaagggcagaagaaaccgcttcaagtggggccctgccagccagcagatcctcttccaggcctatgaaaggcagaagaaccccagcaaggaggagcgggagaccctggtggaggagtgcaacagagctgagtgcatccagaggggcgtgagccccagccaggcccagggcctgggcagcaacctggtgacagaggtgcgggtgtacaactggtttgccaacagaaggaaggaggaggccttccgccacaagctggccatggacacctacagcggccccccacctggccctggccctggccctgccctgcctgcccacagcagccctggcctgcccccaccagccctgagccccagcaaggtgcacggcgtgcgctatggccagcctgccaccagcgagacagctgaggtgcccagcagcagcggcggccccctggtgacagtgtccacccccctgcaccaggtgagccccaccggcctggagcccagccacagcctgctgagcacagaggccaagctggtgtctgctgctgggggccccctgccccctgtgtccaccctgacagccctgcacagcctggagcagaccagccctggcctgaaccagcagccccagaacctgatcatggccagcctgcccggggtgatgaccatcggccctggagagcccgccagcctgggccccaccttcaccaacacaggagccagcaccctggtgattggcctggccagcacccaggcccagagcgtgcctgtgatcaacagcatgggcagcagcctgaccaccctgcagcctgtgcagttcagccagcccctgcaccccagctaccagcagcccctgatgcctcctgtgcagagccacgtgacccagagccccttcatggccaccatggcccagctgcagagcccccacgccctgtacagccacaagccagaggtggcccagtacacccacacaggcctgctgccccagaccatgctgatcacagacaccaccaacctgagcgccctggccagcctgacccccaccaagcaggtgttcaccagtgacacagaggccagcagcgagagcggcctgcacaccccagccagccaggccaccaccctgcacgtgcccagccaggaccctgccagcatccagcacctgcagcctgcccaccggctgagcgccagccccaccgtgagcagcagcagcctggtgctgtaccagagcagtgacagcagcaatggccagagccacctgctgcccagcaaccacagcgtcatcgagaccttcatcagcacccagatggccagcagcagccagtag

SEQ ID NO: 12216 - DNA, 1719 bp, Artificial Sequence
  derived and/or modified sequence
atggtgtccaagctgagccagctgcagacagagctgctggccgccctgctggagagcggcctgagcaaggaggccctgatccaggccctgggggagcccggcccctacctgctggccggggagggccccctggacaagggggagagctgtggcggcggccgcggggagctggccgagctgcccaacggcctgggggagacccggggctctgaagatgaaacagatgatgatggagaggacttcaccccacccatcctgaaggagctggagaacctgagccctgaggaggccgcccaccagaaggctgtggtggagaccctgctgcaggaggacccctggagggtggccaagatggtgaagagctacctgcagcagcacaacatcccccagcgggaggtggtggacaccaccggcctgaaccagagccacctgagccagcacctgaacaagggcacccccatgaagacccagaagagagctgccctgtacacctggtacgtgaggaagcagcgggaggtggcccagcagttcacccacgccggccagggcggcctcatcgaggagcccactggagatgagctgcccaccaagaagggcagaagaaaccgcttcaagtggggccctgccagccagcagatcctcttccaggcctatgaaaggcagaagaaccccagcaaggaggagcgggagaccctggtggaggagtgcaacagagctgagtgcatccagaggggcgtgagccccagccaggcccagggcctgggcagcaacctggtgacagaggtgcgggtgtacaactggtttgccaacagaaggaaggaggaggccttccgccacaagctggccatggacacctacagcggccccccacctggccctggccctggccctgccctgcctgcccacagcagccctggcctgcccccaccagccctgagccccagcaaggtgcacggcgtgcgctatggccagcctgccaccagcgagacagctgaggtgcccagcagcagcggcggccccctggtgacagtgtccacccccctgcaccaggtgagccccaccggcctggagcccagccacagcctgctgagcacagaggccaagctggtgtctgctgctgggggccccctgccccctgtgtccaccctgacagccctgcacagcctggagcagaccagccctggcctgaaccagcagccccagaacctgatcatggccagcctgcccggggtgatgaccatcggccctggagagcccgccagcctgggccccaccttcaccaacacaggagccagcaccctggtgattggcctggccagcacccaggcccagagcgtgcctgtgatcaacagcatgggcagcagcctgaccaccctgcagcctgtgcagttcagccagcccctgcaccccagctaccagcagcccctgatgcctcctgtgcagagccacgtgacccagagccccttcatggccaccatggcccagctgcagagcccccacggggagaggcctgtgccccacacagctggagatgatgaccggggctggctgtccatggatgctggggagcggggggcctggcaggccctgcagagcgcctgtgtgtctggcacctctgtgttcccctacagcagcaatggccagagccacctgctgcccagcaaccacagcgtgattgagaccttcatcagcacccagatggccagcagcagccagtag

SEQ ID NO: 12217 - DNA, 1566 bp, Artificial Sequence
  derived and/or modified sequence
atggtgtccaagctgagccagctgcagacagagctgctggccgccctgctggagagcggcctgagcaaggaggccctgatccaggccctgggggagcccggcccctacctgctggccggggagggccccctggacaagggggagagctgtggcggcggccgcggggagctggccgagctgcccaacggcctgggggagacccggggctctgaagatgaaacagatgatgatggagaggacttcaccccacccatcctgaaggagctggagaacctgagccctgaggaggccgcccaccagaaggctgtggtggagaccctgctgcaggaggacccctggagggtggccaagatggtgaagagctacctgcagcagcacaacatcccccagcgggaggtggtggacaccaccggcctgaaccagagccacctgagccagcacctgaacaagggcacccccatgaagacccagaagagagctgccctgtacacctggtacgtgaggaagcagcgggaggtggcccagcagttcacccacgccggccagggcggcctcatcgaggagcccactggagatgagctgcccaccaagaagggcagaagaaaccgcttcaagtggggccctgccagccagcagatcctcttccaggcctatgaaaggcagaagaaccccagcaaggaggagcgggagaccctggtggaggagtgcaacagagctgagtgcatccagaggggcgtgagccccagccaggcccagggcctgggcagcaacctggtgacagaggtgcgggtgtacaactggtttgccaacagaaggaaggaggaggccttccgccacaagctggccatggacacctacagcggccccccacctggccctggccctggccctgccctgcctgcccacagcagccctggcctgcccccaccagccctgagccccagcaaggtgcacggcgtgcgctatggccagcctgccaccagcgagacagctgaggtgcccagcagcagcggcggccccctggtgacagtgtccacccccctgcaccaggtgagccccaccggcctggagcccagccacagcctgctgagcacagaggccaagctggtgtctgctgctgggggccccctgccccctgtgtccaccctgacagccctgcacagcctggagcagaccagccctggcctgaaccagcagccccagaacctgatcatggccagcctgcccggggtgatgaccatcggccctggagagcccgccagcctgggccccaccttcaccaacacaggagccagcaccctggtgattggcaagctggtgggcatgggcggccacctgggcggccgcctgatgggccagccccagaaccctggagctggccgggccaccggcacccacagcttcatccaccagcacgtgttcatccagtgcctgctgtggaccagccactgtgccaccagcgtcatccctggggacagcagcaatggccagagccacctgctgcccagcaaccacagcgtcatcgagaccttcatcagcacccagatggccagcagcagccagtag

SEQ ID NO: 12218 - DNA, 1572 bp, Artificial Sequence
  derived and/or modified sequence
atggtgtccaagctgagccagctgcagacagagctgctggccgccctgctggagagcggcctgagcaaggaggccctgatccaggccctgggggagcccggcccctacctgctggccggggagggccccctggacaagggggagagctgtggcggcggccgcggggagctggccgagctgcccaacggcctgggggagacccggggctctgaagatgaaacagatgatgatggagaggacttcaccccacccatcctgaaggagctggagaacctgagccctgaggaggccgcccaccagaaggctgtggtggagaccctgctgcaggaggacccctggagggtggccaagatggtgaagagctacctgcagcagcacaacatcccccagcgggaggtggtggacaccaccggcctgaaccagagccacctgagccagcacctgaacaagggcacccccatgaagacccagaagagagctgccctgtacacctggtacgtgaggaagcagcgggaggtggcccagcagttcacccacgccggccagggcggcctcatcgaggagcccactggagatgagctgcccaccaagaagggcagaagaaaccgcttcaagtggggccctgccagccagcagatcctcttccaggcctatgaaaggcagaagaaccccagcaaggaggagcgggagaccctggtggaggagtgcaacagagctgagtgcatccagaggggcgtgagccccagccaggcccagggcctgggcagcaacctggtgacagaggtgtctgctgctgggggccccctgccccctgtgtccaccctgacagccctgcacagcctggagcagaccagccctggcctgaaccagcagccccagaacctgatcatggccagcctgcccggggtgatgaccatcggccctggagagcccgccagcctgggccccaccttcaccaacacaggagccagcaccctggtgattggcctggccagcacccaggcccagagcgtgcctgtgatcaacagcatgggcagcagcctgaccaccctgcagcctgtgcagttcagccagcccctgcaccccagctaccagcagcccctgatgcctcctgtgcagagccacgtgacccagagccccttcatggccaccatggcccagctgcagagcccccacgccctgtacagccacaagccagaggtggcccagtacacccacacaggcctgctgccccagaccatgctgatcacagacaccaccaacctgagcgccctggccagcctgacccccaccaagcaggtgttcaccagtgacacagaggccagcagcgagagcggcctgcacaccccagccagccaggccaccaccctgcacgtgcccagccaggaccctgccagcatccagcacctgcagcctgcccaccggctgagcgccagccccaccgtgagcagcagcagcctggtgctgtaccagagcagtgacagcagcaatggccagagccacctgctgcccagcaaccacagcgtcatcgagaccttcatcagcacccagatggccagcagcagccagtag

SEQ ID NO: 12219 - DNA, 1812 bp, Artificial Sequence
  derived and/or modified sequence
atggtgtccaagctgagccagctgcagacagagctgctggccgccctgctggagagcggcctgagcaaggaggccctgatccaggccctgggggagcccggcccctacctgctggccggggagggccccctggacaagggggagagctgtggcggcggccgcggggagctggccgagctgcccaacggcctgggggagacccggggctctgaagatgaaacagatgatgatggagaggacttcaccccacccatcctgaaggagctggagaacctgagccctgaggaggccgcccaccagaaggctgtggtggagaccctgctgcaggaggacccctggagggtggccaagatggtgaagagctacctgcagcagcacaacatcccccagcgggaggtggtggacaccaccggcctgaaccagagccacctgagccagcacctgaacaagggcacccccatgaagacccagaagagagctgccctgtacacctggtacgtgaggaagcagcgggaggtggcccagcagttcacccacgccggccagggcggcctcatcgaggagcccactggagatgagctgcccaccaagaagggcagaagaaaccgcttcaagtggggccctgccagccagcagatcctcttccaggcctatgaaaggcagaagaaccccagcaaggaggagcgggagaccctggtggaggagtgcaacagagctgagtgcatccagaggggcgtgagccccagccaggcccagggcctgggcagcaacctggtgacagaggtgcgggtgtacaactggtttgccaacagaaggaaggaggaggccttccgccacaagctggccatggacacctacagcggccccccacctggccctggccctggccctgccctgcctgcccacagcagccctggcctgcccccaccagccctgagccccagcaaggtgcacggcgtgcgctatggccagcctgccaccagcgagacagctgaggtgcccagcagcagcggcggccccctggtgacagtgtccacccccctgcaccaggtgagccccaccggcctggagcccagccacagcctgctgagcacagaggccaagctggtgtctgctgctgggggccccctgccccctgtgtccaccctgacagccctgcacagcctggagcagaccagccctggcctgaaccagcagccccagaacctgatcatggccagcctgcccggggtgatgaccatcggccctggagagcccgccagcctgggccccaccttcaccaacacaggagccagcaccctggtgattggcctggccagcacccaggcccagagcgtgcctgtgatcaacagcatgggcagcagcctgaccaccctgcagcctgtgcagttcagccagcccctgcaccccagctaccagcagcccctgatgcctcctgtgcagagccacgtgacccagagccccttcatggccaccatggcccagctgcagagcccccacgccctgtacagccacaagccagaggtggcccagtacacccacacaggcctgctgccccagaccatgctgatcacagacaccaccaacctgagcgccctggccagcctgacccccaccaagcaggtgttcaccagtgacacagaggccagcagcgagagcggcctgcacaccccagccagccaggccaccaccctgcacgtgcccagccaggaccctgccagcatccagcacctgcagcctgcccaccggctgagcgccagccccaccgtgagcagcagcagcctggtgctgtaccagagcctgggcctgtag

SEQ ID NO: 12220 - DNA, 837 bp, Artificial Sequence
  derived and/or modified sequence
atggtgtccaagctgagccagctgcagacagagctgctggccgccctgctggagagcggcctgagcaaggaggccctgatccaggccctgggggagcccggcccctacctgctggccggggagggccccctggacaagggggagagctgtggcggcggccgcggggagctggccgagctgcccaacggcctgggggagacccggggctctgaagatgaaacagatgatgatggagaggacttcaccccacccatcctgaaggagctggagaacctgagccctgaggaggccgcccaccagaaggctgtggtggagaccctgctgcaggaggacccctggagggtggccaagatggtgaagagctacctgcagcagcacaacatcccccagcgggaggtggtggacaccaccggcctgaaccagagccacctgagccagcacctgaacaagggcacccccatgaagacccagaagagagctgccctgtacacctggtacgtgaggaagcagcgggaggtggcccagaggagaaatgccagccgggagggctgcccccaccaccgccaccggggctgggcccccaccagcagccgccgctgtgtgtccaccaccggcctgcccaccggggccaagaagaagcccagcggcacctcctggccctggaccaggacagctggccccccccagggccaggcccgggacctgcgctgccccctgacagcccccctggcctgcctgcacctgcccagcccccctgtgcgcagcacagtgtgtgccatggacagcctgcggcctgtgcggctgcagaagtacccccaggccgctgctgtgccctag

SEQ ID NO: 12221 - DNA, 360 bp, Artificial Sequence
  derived and/or modified sequence
atggtgtccaagctgagccagctgcagacagagctgctggccgccctgctggagagcggcctgagcaaggaggccctgatccaggccctgggggagcccggcccctacctgctggccggggagggccccctggacaagggggagagctgtggcggcggccgcggggagctggccgagctgcccaacggcctgggggagacccggggctctgaagatgaaacagatgatgatggagaggacttcaccccacccatcctgaaggagctggagaacctgagccctgaggaggccgcccaccagaaggctgtggtggagaccctgctgcaggtgcacccctgcagagctggccgggctgactag

SEQ ID NO: 12222 - DNA, 744 bp, Artificial Sequence
  derived and/or modified sequence
atggtgtccaagctgagccagctgcagacagagctgctggccgccctgctggagagcggcctgagcaaggaggccctgatccaggccctgggggagcccggcccctacctgctggccggggagggccccctggacaagggggagagctgtggcggcggccgcggggagctggccgagctgcccaacggcctgggggagacccggggctctgaagatgaaacagatgatgatggagaggacttcaccccacccatcctgaaggagctggagaacctgagccctgaggaggccgcccaccagaaggctgtggtggagaccctgctgcaggaggacccctggagggtggccaagatggtgaagagctacctgcagcagcacaacatcccccagcgggaggtggtggacaccaccggcctgaaccagagccacctgagccagcacctgaacaagggcacccccatgaagacccagaagagagctgccctgtacacctggtacgtgaggaagcagcgggaggtggcccagcagttcacccacgccggccagggcggcctcatcgaggagcccactggagatgagctgcccaccaagaagggcagaagaaaccgcttcaagtggggccctgccagccagcagatcctcttccaggcctatgaaaggcagaagaaccccagcaaggaggagcgggagaccctggtggaggagtgcaacagatgtgccctgtggacagcctgtgaccagtag

SEQ ID NO: 12223 - DNA, 1359 bp, Artificial Sequence
  derived and/or modified sequence
atggtgtccaagctgagccagctgcagacagagctgctggccgccctgctggagagcggcctgagcaaggaggccctgatccaggccctgggggagcccggcccctacctgctggccggggagggccccctggacaagggggagagctgtggcggcggccgcggggagctggccgagctgcccaacggcctgggggagacccggggctctgaagatgaaacagatgatgatggagaggacttcaccccacccatcctgaaggagctggagaacctgagccctgaggaggccgcccaccagaaggctgtggtggagaccctgctgcaggaggacccctggagggtggccaagatggtgaagagctacctgcagcagcacaacatcccccagcgggaggtggtggacaccaccggcctgaaccagagccacctgagccagcacctgaacaagggcacccccatgaagacccagaagagagctgccctgtacacctggtacgtgaggaagcagcgggaggtggcccagcagttcacccacgccggccagggcggcctcatcgaggagcccactggagatgagctgcccaccaagaagggcagaagaaaccgcttcaagtggggccctgccagccagcagaccagccctggcctgaaccagcagccccagaacctgatcatggccagcctgcccggggtgatgaccatcggccctggagagcccgccagcctgggccccaccttcaccaacacaggagccagcaccctggtgattggcctggccagcacccaggcccagagcgtgcctgtgatcaacagcatgggcagcagcctgaccaccctgcagcctgtgcagttcagccagcccctgcaccccagctaccagcagcccctgatgcctcctgtgcagagccacgtgacccagagccccttcatggccaccatggcccagctgcagagcccccacgccctgtacagccacaagccagaggtggcccagtacacccacacaggcctgctgccccagaccatgctgatcacagacaccaccaacctgagcgccctggccagcctgacccccaccaagcaggtgttcaccagtgacacagaggccagcagcgagagcggcctgcacaccccagccagccaggccaccaccctgcacgtgcccagccaggaccctgccagcatccagcacctgcagcctgcccaccggctgagcgccagccccaccgtgagcagcagcagcctggtgctgtaccagagcagtgacagcagcaatggccagagccacctgctgcccagcaaccacagcgtgattgagaccttcatcagcacccagatggccagcagcagccagtag

SEQ ID NO: 12224 - DNA, 1212 bp, Artificial Sequence
  derived and/or modified sequence
atggtgaagagctacctgcagcagcacaacatcccccagcgggaggtggtggacaccaccggcctgaaccagagccacctgagccagcacctgaacaagggcacccccatgaagacccagaagagagctgccctgtacacctggtacgtgaggaagcagcgggaggtggcccagcagttcacccatgctggccagggcggcctgattgaggagcccactggagatgagctgcccaccaagaagggcagaagaaaccgcttcaagtggggccctgccagccagcagatcctcttccaggcctatgagcggcagaagaaccccagcaaggaggagcgggagaccctggtggaggagtgcaacagagctgagtgcatccagaggggcgtgagccccagccaggcccagggcctgggcagcaacctggtgacagaggtgcgggtgtacaactggtttgccaacagaaggaaggaggaggccttccgccacaagctggccatggacacctacagcggccccccacctggccctggccctggccctgccctgcctgcccacagcagccctggcctgcccccaccagccctgagccccagcaaggtgcatggagtgcgctatggccagcctgccaccagcgagacagctgaggtgcccagcagcagcggcggccccctggtgacagtgtccacccccctgcaccaggtgagccccaccggcctggagcccagccacagcctgctgagcacagaggccaagctggtgtctgctgctgggggccccctgccccctgtgtccaccctgacagccctgcacagcctggagcagaccagccctggcctgaaccagcagccccagaacctgatcatggccagcctgcccggggtgatgaccatcggccctggagagcccgccagcctgggccccaccttcaccaacacaggagccagcaccctggtgattggcaagctggtgggcatgggcggccacctgggcggccgcctgatgggccagccccagaaccctggggccggccgggccaccggcacccacagcttcatccacaccacctgcatctaccctgtgcccaccctggaccagagcctgtgctacatcagtgacacctgggtgaaccagacagaccagaacctgagcaacagcagccgggaggccggcaccaagcacaacaccagcatcctgtggtacctgcggaggtag

SEQ ID NO: 12225 - DNA, 1185 bp, Artificial Sequence
  derived and/or modified sequence
atggtgtccaagctgagccagctgcagacagagctgctggccgccctgctggagagcggcctgagcaaggaggccctgatccaggccctgggggagcccggcccctacctgctggccggggagggccccctggacaagggggagagctgtggcggcggccgcggggagctggccgagctgcccaacggcctgggggagacccggggctctgaagatgaaacagatgatgatggagaggacttcaccccacccatcctgaaggagctggagaacctgagccctgaggaggccgcccaccagaaggctgtggtggagaccctgctgcaggaggacccctggagggtggccaagatggtgaagagctacctgcagcagcacaacatcccccagcgggaggtggtggacaccaccggcctgaaccagagccacctgagccagcacctgaacaagggcacccccatgaagacccagaagagagctgccctgtacacctggtacgtgaggaagcagcgggaggtggcccagcagttcacccacgccggccagggcggcctcatcgaggagcccactggagatgagctgcccaccaagaagggcagaagaaaccgcttcaagtggggccctgccagccagcagatcctcttccaggcctatgaaaggcagaagaaccccagcaaggaggagcgggagaccctggtggaggagtgcaacagagctgagtgcatccagaggggcgtgagccccagccaggcccagggcctgggcagcaacctggtgacagaggtgcgggtgtacaactggtttgccaacagaaggaaggaggaggccttccgccacaagctggccatggacacctacagcggccccccacctggccctggccctggccctgccctgcctgcccacagcagccctggcctgcccccaccagccctgagccccagcaaggtgcacggcgtgcgctatggccagcctgccaccagcgagacagctgaggtgcccagcagcagcggcggccccctggtgacagtgtccacccccctgcaccaggtgagccccaccggcctggagcccagccacagcctgctgagcacagaggccaagctggtgtctgctgctgggggccccctgcccccagctgcctgcagccagcccggccgggtggcccggctcttcaacttctag

SEQ ID NO: 12226 - DNA, 1416 bp, Artificial Sequence
  derived and/or modified sequence
atggtgtccaagctgagccagctgcagacagagctgctggccgccctgctggagagcggcctgagcaaggaggccctgatccaggccctgggggagcccggcccctacctgctggccggggagggccccctggacaagggggagagctgtggcggcggccgcggggagctggccgagctgcccaacggcctgggggagacccggggctctgaagatgaaacagatgatgatggagaggacttcaccccacccatcctgaaggagctggagaacctgagccctgaggaggccgcccaccagaaggctgtggtggagaccctgctgcaggaggacccctggagggtggccaagatggtgaagagctacctgcagcagcacaacatcccccagcgggaggtggtggacaccaccggcctgaaccagagccacctgagccagcacctgaacaagggcacccccatgaagacccagaagagagctgccctgtacacctggtacgtgaggaagcagcgggaggtggcccagcagttcacccacgccggccagggcggcctcatcgaggagcccactggagatgagctgcccaccaagaagggcagaagaaaccgcttcaagtggggccctgccagccagcagatcctcttccaggcctatgaaaggcagaagaaccccagcaaggaggagcgggagaccctggtggaggagtgcaacagagctgagtgcatccagaggggcgtgagccccagccaggcccagggcctgggcagcaacctggtgacagaggtgcgggtgtacaactggtttgccaacagaaggaaggaggaggccttccgccacaagctggccatggacacctacagcggccccccacctggccctggccctggccctgccctgcctgcccacagcagccctggcctgcccccaccagccctgagccccagcaaggtgcacggcgtgcgctatggccagcctgccaccagcgagacagctgaggtgcccagcagcagcggcggccccctggtgacagtgtccacccccctgcaccaggtgagccccaccggcctggagcccagccacagcctgctgagcacagaggccaagctggtgtctgctgctgggggccccctgccccctgtgtccaccctgacagccctgcacagcctggagcagaccagccctggcctgaaccagcagccccagaacctgatcatggccagcctgcccggggtgatgaccatcggccctggagagcccgccagcctgggccccaccttcaccaacacaggagccagcaccctggtgattggcctggccagcacccaggcccagagcgtgcctgtgatcaacagcatgggcagcagcctgaccaccctgcagcctgtgcagttcagccagcagggccccagcagctag

SEQ ID NO: 12227 - DNA, 1359 bp, Artificial Sequence
  derived and/or modified sequence
atggtgtccaagctgagccagctgcagacagagctgctggccgccctgctggagagcggcctgagcaaggaggccctgatccaggccctgggggagcccggcccctacctgctggccggggagggccccctggacaagggggagagctgtggcggcggccgcggggagctggccgagctgcccaacggcctgggggagacccggggctctgaagatgaaacagatgatgatggagaggacttcaccccacccatcctgaaggagctggagaacctgagccctgaggaggccgcccaccagaaggctgtggtggagaccctgctgcaggaggacccctggagggtggccaagatggtgaagagctacctgcagcagcacaacatcccccagcgggaggtggtggacaccaccggcctgaaccagagccacctgagccagcacctgaacaagggcacccccatgaagacccagaagagagctgccctgtacacctggtacgtgaggaagcagcgggaggtggcccagcagttcacccacgccggccagggcggcctcatcgaggagcccactggagatgagctgcccaccaagaagggcagaagaaaccgcttcaagtggggccctgccagccagcagatcctcttccaggcctatgaaaggcagaagaaccccagcaaggaggagcgggagaccctggtggaggagtgcaacagagctgagtgcatccagaggggcgtgagccccagccaggcccagggcctgggcagcaacctggtgacagaggtgcgggtgtacaactggtttgccaacagaaggaaggaggaggccttccgccacaagctggccatggacacctacagcggccccccacctggccctggccctggccctgccctgcctgcccacagcagccctggcctgcccccaccagccctgagccccagcaaggtgcacggcgtgcgctatggccagcctgccaccagcgagacagctgaggtgcccagcagcagcggcggccccctggtgacagtgtccacccccctgcaccaggtgagccccaccggcctggagcccagccacagcctgctgagcacagaggccaagctggtgtctgctgctgggggccccctgccccctgtgtccaccctgacagccctgcacagcctggagcagaccagccctggcctgaaccagcagccccagaacctgatcatggccagcctgcccggggtgatgaccatcggccctggagagcccgccagcctgggccccaccttcaccaacacaggagccagcaccctgcccctgtttggagctggggtggccgagctgacccggcagcagggccccagcagctag

SEQ ID NO: 12228 - DNA, 1071 bp, Artificial Sequence
  derived and/or modified sequence
tgatggctggtgggcttctggggcggcagcggctgcaaggagtttggcctgtgcctgcctgctggccggcagacccagcccacccgctggggccggcggctggcctggtggacccgggccgcctggccctgtggcagccgggccatggtgtccaagctgagccagctgcagacagagctgctggccgccctgctggagagcggcctgagcaaggaggccctgatccaggccctgggggagcccggcccctacctgctggccggggagggccccctggacaagggggagagctgtggcggcggccgcggggagctggccgagctgcccaacggcctgggggagacccggggctctgaagatgaaacagatgatgatggagaggacttcaccccacccatcctgaaggagctggagaacctgagccctgaggaggccgcccaccagaaggctgtggtggagaccctgctgcaggaggacccctggagggtggccaagatggtgaagagctacctgcagcagcacaacatcccccagcgggaggtggtggacaccaccggcctgaaccagagccacctgagccagcacctgaacaagggcacccccatgaagacccagaagagagctgccctgtacacctggtacgtgaggaagcagcgggaggtggcccagcagttcacccacgccggccagggcggcctcatcgaggagcccactggagatgagctgcccaccaagaagggcagaagaaaccgcttcaagtggggccctgccagccagcagatcctcttccaggcctatgaaaggcagaagaaccccagcaaggaggagcgggagaccctggtggaggagtgcaacagagctgagtgcatccagaggggcgtgagccccagccagccccagcctgctgagtaccgcagccaggccggcctgagctcctggggccccccaccaccctgccagcacccagacagcacagcccagctgggcgctgacatcccccggccccagcctgctgcccctgagccccaccacggcctgacctcctggggccatgaccaccgggcctggtag

SEQ ID NO: 12229 - DNA, 1896 bp, Artificial Sequence
  derived and/or modified sequence
atggtgagcaagctgagccagctgcagaccgagctgctggccgccctcctagagtcaggactgtctaaggaagcgctgattcaggctttaggtgaacccggcccctacctactcgcaggtgaggggcccttggacaaaggcgagagttgtgggggcggtcggggagaactcgctgagctccctaatggactgggagagaccagaggatcagaagacgagacagacgacgacggagaagactttacacccccaatcctgaaagaactcgagaatctgagcccagaagaagcagctcatcaaaaggctgtcgtggaaaccttactgcaggaggacccttggagggtcgcgaaaatggtgaaatcataccttcaacagcataacatcccgcagagggaagtggtcgatacaacagggctcaaccagagccacctgtctcaacacctcaataagggcactcccatgaagacacagaaacgagctgctctctatacttggtacgtcaggaagcagagagaggtggctcagcagttcacacacgcagggcagggcggcctgatagaggagcctactggagatgaactcccaaccaagaagggacggcgaaaccgcttcaaatggggacccgcctcccagcagatactgttccaggcttacgagagacagaaaaacccttcaaaggaggagagagagacccttgtagaagaatgtaatcgtgccgaatgcattcagcgaggcgtcagccctagccaagctcaaggactgggctctaacctggttactgaggtaagggtgtataactggttcgccaatcggagaaaggaggaagccttcaggcataaactggcgatggatacatacagtgggccacctccaggccccggacccggccccgcgctacccgcccactccagtcctggactgccacctcccgcactgtccccctccaaggtccacggcgtccggtacggacagcccgccacctccgagacagctgaggtcccgagcagcagtggtggcccactggtgacagtctctacacccttacaccaagtctcccccaccggcctggaaccatcccattctttgttaagcaccgaagccaaactcgtgagcgctgcagggggcccgctccccccagtctctactctgactgccctacactctctggagcagaccagccccggcttgaaccagcagccccagaacctgattatggcttcactaccaggtgtcatgaccattgggcccggcgagcctgcttccctcggaccaacatttacaaatactggagcgtccaccctggtgataggactggcgtctacccaagcccagtctgtgcccgttatcaattctatgggatccagtttgaccacattgcagcccgtacagttcagccagccactacatccgtcttatcagcagccactgatgccccccgtgcagtctcatgtgacccaatcccccttcatggcgacgatggcccagcttcagtccccccatgccttatactcccacaaacccgaggttgcacaatatactcacacaggactgttgccccagacaatgctgataactgacacaacaaatttgagcgctctggcctccctcaccccaaccaagcaggtgtttaccagcgacaccgaagcatctagtgagtctgggctccacacaccagcaagccaggctaccacactgcatgtcccctcgcaagatcctgccagcatccagcacctgcagcctgcccatcgactgtctgccagcccaacggtgtcatcttctagtctggtactttaccaaagctcggactcaagcaatggacaatctcatctgttgccctccaatcatagcgtgatcgaaacatttatcagtacacaaatggcgagctcttcacagtag

SEQ ID NO: 12230 - DNA, 1719 bp, Artificial Sequence
  derived and/or modified sequence
atggtgagcaagctgagccagctgcagaccgagctgctggccgccctgctcgagtcaggcctgtctaaggaagcgttaatccaggccctgggagagcctggcccttacctcctcgcaggcgaggggcccttggataagggcgagtcatgcggcggaggacgaggcgagcttgccgaactgcccaacggactgggtgaaactcgaggctccgaagacgagactgacgacgatggtgaggactttactccgccaattcttaaagagctggagaatctttcaccagaagaggccgctcaccaaaaagccgttgtggagaccctactccaagaggacccctggagggtggcaaaaatggtcaaaagctacctgcaacaacataacattccacagcgggaagtggtggacactaccggcctcaaccagtcccatctgtctcagcaccttaacaaagggacaccaatgaagacgcagaaacgcgcagccctgtacacctggtacgtgcggaagcagcgagaagtcgcacagcagttcacccatgcgggccaaggtgggcttatcgaggagcctactggcgatgaactgcctactaaaaaaggtcggcgtaatagattcaaatgggggcctgccagccagcagattctgtttcaggcttacgaacgacagaagaacccgtccaaagaagagcgagaaacactggttgaagagtgtaacagggccgagtgtattcagcggggtgtaagcccttcgcaggcacaggggctgggctctaacctggttacggaagtgcgggtgtataattggtttgctaatcgcagaaaggaagaggcatttaggcacaaattggccatggatacctattccgggcccccacccggccccggccctggtccggctctccccgctcatagctcacccggactgcctcctcccgccctgagtccaagcaaggtgcacggtgtgcgttacgggcagcccgcaacaagcgagacagccgaagtaccctcgtctagcgggggcccactggttaccgtgagtacccctctccaccaggtttctccaaccggcctcgaacccagccactctcttctgagcactgaagctaagctcgtgagtgcagctggcggacccctgccccccgtgtccacactgacagccctacactctctggaacaaacatcaccagggctgaatcagcagcctcagaacttgatcatggcgagcttgccgggggtgatgaccatcggcccgggcgaacctgcctcccttgggccaacattcaccaataccggagcgagcaccctagttataggtctcgcttctacacaggcccagagcgtgcccgtcattaattcaatgggatctagcctgaccacgcttcagccagtgcagttttcccagcctctgcacccttcctaccaacaaccattaatgccaccagttcagagccatgtaacacagtctccattcatggctaccatggcacagctgcagagtcctcatggcgagcgcccagtgccccataccgcgggcgacgacgatcgtggttggctctctatggatgcgggtgagcgcggggcatggcaggccctccagagcgcctgcgtctcaggtacctccgtgttcccttactccagcaacgggcagagtcacctactgcctagcaaccactctgtgatcgagacttttattagcactcaaatggcctccagctcccaatag

SEQ ID NO: 12231 - DNA, 1566 bp, Artificial Sequence
  derived and/or modified sequence
atggtgagcaagctgagccagctgcagaccgagctgctggccgccctgcttgagagcgggttatcaaaggaggctctcattcaagcgttgggcgagccaggaccgtacctgctggctggcgaagggccccttgataagggagagagctgtgggggagggaggggcgagctagcagagttgccaaacggccttggggagactaggggatccgaagacgaaactgacgatgacggagaggacttcaccccgccaattcttaaagaacttgaaaacttaagcccggaggaggccgcccaccagaaagccgtcgtcgaaacgctgttacaggaggacccttggcgcgtggccaagatggtgaaatcctatttgcaacagcataacatcccccaaagagaagtggtggacactacgggtcttaaccagtctcacctcagccagcatctgaataagggcacccctatgaaaacacagaagagagcagctctgtacacatggtatgtgagaaaacagcgggaggttgctcagcagtttacacacgccggacaaggaggactgatagaggagccgacaggggatgagctgcctactaagaaggggagaaggaatcgttttaagtggggccccgcctcgcagcagatcctgttccaggcatatgaaagacaaaaaaacccaagcaaggaggaacgcgaaacactggtggaggagtgtaaccgcgctgagtgcattcagcggggggtgagtccaagtcaggcacagggtctcgggagcaatttagttaccgaggtacgcgtttataattggtttgctaacaggcgcaaggaagaggcatttcggcacaagctggctatggatacatacagtggtcccccccccgggcccggtcccggccctgctttgccggcccactcttcccccgggctacctcccccagccctcagccctagcaaagtgcacggagtacgatacggacagccggcaaccagtgaaaccgctgaagtaccatccagttctggggggcctctggtgaccgtaagcacgcccctgcatcaggttagtcctactggcctcgagccttcccacagtctgctctccactgaggccaagttggtgagcgctgccggcgggccgctgcctcctgtgtctacattaactgctctgcattcgttggagcagacaagccctggactgaaccagcagccacagaatctaatcatggcttccctgcccggcgtgatgacgattgggcccggcgaacccgcttcactggggcccacgttcactaacactggtgcctccacactggttattggaaaactcgtcgggatgggaggccatctcggaggcagattgatgggccagccccaaaatccaggcgcgggacgggccaccggcacacactctttcattcaccagcacgtgttcatccaatgcctgctgtggacttcacactgtgccacttcagtcattcctggagactccagcaacggacagtctcacctcctgcctagcaatcactccgtcattgaaacattcattagcacccagatggccagttccagccagtag

SEQ ID NO: 12232 - DNA, 1572 bp, Artificial Sequence
  derived and/or modified sequence
atggtgagcaagctgagccagctgcagaccgagctgctggccgccctcttggaaagtggtctctcaaaggaggcgcttattcaggccctgggcgagcctgggccgtatctgcttgccggcgaggggcccttagataaaggagaatcatgtggtggaggacggggggaattggctgagctgcctaacggcctgggcgaaacgcgcggatccgaggatgaaaccgacgatgacggtgaagatttcacacctcccatcctgaaagagctggaaaacctctcacccgaggaggcggcccaccagaaagcagtcgtagaaaccctcctgcaagaggacccgtggagagtcgcaaagatggtgaagtcatatctgcagcaacacaatattccacagagggaagtcgtggatacgaccgggctgaaccaatcacacctcagccagcatttgaataaggggacccccatgaagacacagaaaagggccgctctgtacacgtggtatgtccgcaaacagcgggaagtcgcccagcagttcactcacgccgggcagggcggcctcatcgaagaaccgacaggcgatgaattgcccactaagaaggggcggcgtaacaggttcaagtggggacctgcctctcaacagattctgtttcaggcttatgaacgccagaaaaaccctagcaaggaagagcgagagaccctggtggaggaatgtaaccgggctgaatgcatccagaggggtgtgtccccatctcaagcccaggggctggggtcaaatttagtgaccgaagtcagtgcagccggggggcctctacctcctgtttccacgcttacagcattgcattccctcgagcagacctcccccggacttaaccaacaaccccagaacttaattatggcgagtcttcccggcgtgatgaccattggccctggcgagccggcctctctgggtccaacattcaccaacacgggcgcttccacccttgttatcgggctggcatctacgcaggcccagagtgtccccgttatcaactctatgggaagttcgcttacaaccttacaacctgtccagttctctcaacccctgcatccttcctaccaacaaccattgatgccacctgtccagagtcatgttacccagagccccttcatggccacaatggctcagctccagtctccccacgcactatattctcacaaacccgaagtggcccaatatacacacacggggctgctgccccagaccatgctgattacagacactactaacctcagcgccctcgcatctttaacgccaacgaagcaagtgttcacatcggatacggaggccagtagtgagtctggcctgcacaccccggcaagtcaggcaacaacactgcacgtcccaagtcaggatcccgcaagtatccagcatctacagccggcacaccgattgtccgctagccctaccgttagcagcagttcactggtgctctaccaaagctccgattcgtccaacggccagtcccatctgcttccctctaatcacagtgtgattgagacctttatttccactcagatggcaagctcctcccagtag

SEQ ID NO: 12233 - DNA, 1812 bp, Artificial Sequence
  derived and/or modified sequence
atggtgagcaagctgagccagctgcagaccgagctgctggccgccttgctagaaagtggcctctccaaggaagccctcattcaggccctgggggaacctgggccctatctgttggcaggagaaggccccctggacaaaggagagagttgtggagggggcaggggggaattggccgagctccctaacggattaggcgagacccgcggctcagaagacgagactgatgatgacggagaggacttcactcccccgatcttgaaagagttggagaatctgagccccgaggaggctgcccaccaaaaggccgtagtggagacactgctgcaagaggatccatggagggtcgcaaagatggtcaagtcttatcttcagcagcataacataccccagagagaggtggtggataccactggcctgaatcagagtcacctgtcacaacacctgaacaaagggactcctatgaagacacagaagagagccgcactgtacacatggtacgtaaggaaacagcgagaagtagcgcaacagtttactcacgctggacaggggggtctcattgaagaacccaccggagatgaactgccaacaaaaaaggggagaaggaatagattcaagtgggggccagcatcccagcagatcctcttccaggcatacgaaagacagaaaaatccctctaaggaggaacgagagaccctcgtggaagaatgtaaccgagccgaatgcattcagcgtggggtgagtccaagccaggcccagggactgggctctaatctggtcacagaggtgcgtgtctacaattggttcgcgaacaggaggaaggaggaagcgtttagacacaaactggctatggatacatattccggtcctcccccgggacccgggcctggtcccgccttgcccgctcactccagtccagggctgccccctccagcacttagccctagcaaggttcacggcgtgcgctatggccaacccgcaacctccgagaccgccgaagtgccatcatcgtccgggggccccctggtgacagtatccaccccgctccaccaggtctctcctactggcctggagccctctcacagcctcctgagtacggaggccaagttggtctccgcggccggcggaccactgcccccagtcagtacgctgacagcattacattcactcgaacagacttcaccaggccttaaccaacaaccccaaaatctgatcatggcctctctgccaggcgtaatgactattggtcctggagagccagctagcctgggaccaacatttacaaacaccggagccagtacacttgtgatcggtctcgcctctacccaggcgcagtcggtgcccgtgatcaacagcatgggtagttcccttaccaccctgcagccagttcagtttagtcaaccccttcatcccagctaccagcagcccctgatgccccctgtgcagagccacgtaacgcagtcgccttttatggccaccatggctcagttgcagagtcctcatgccttgtattcacacaagcccgaggtggctcagtatacacacaccggccttttgcctcagacaatgctgatcactgatactacgaacctcagcgccctggccagcctgacccccaccaaacaggtctttacgagtgataccgaggcatcatcagagagcgggttgcacacacccgcctcccaggccactactcttcacgtgccatctcaggatcccgcatccattcagcatctgcaacccgcacaccggctgtcggcctctccaacagtgtccagcagcagtctggtcctatatcagagtcttggactatag

SEQ ID NO: 12234 - DNA, 837 bp, Artificial Sequence
  derived and/or modified sequence
atggtgagcaagctgagccagctgcagaccgagctgctggccgccctgctggagtcgggtctgtctaaggaggctctgattcaggcactgggtgagccgggaccatacttacttgccggcgaaggacctcttgataagggagaatcctgtggcgggggtagaggggaattagctgagctacctaatggtctaggcgagacccgtggatcggaagacgagacagatgacgatggcgaggatttcacgccaccgatcctgaaggaactagaaaacctgagccctgaagaagccgcccaccagaaagcagtggtggagacgttattgcaggaggatccatggcgagttgctaagatggtgaagtcttatctgcagcagcacaacatcccacagagggaggtcgtagacactacaggtctgaatcagagtcacctgagtcagcaccttaataagggcacccccatgaagacccagaagcgcgctgccctctacacgtggtacgtgaggaagcaacgcgaagtggcccagcgccggaatgcaagccgtgagggatgccctcatcaccgccatcgcggatgggcccccacatcgtcacggagatgtgtgtcgacaacaggactccctaccggggcaaaaaaaaagccgtctggcacctcgtggccctggacaaggactgcaggccccccccagggccaggcccgcgacctgcgatgtccgctcactgcgccacttgcctgtctgcatctgccctctcctcctgtgagatcaaccgtttgtgctatggactctttgcgcccagttcgacttcagaagtaccctcaggccgcagccgtcccctag

SEQ ID NO: 12235 - DNA, 360 bp, Artificial Sequence
  derived and/or modified sequence
atggtgagcaagctgagccagctgcagaccgagctgctggccgccttgctagagtctgggttgagcaaagaggctctaattcaggcattgggcgaaccgggtccttatctgcttgctggcgaagggccactggacaagggtgaatcttgcggcggcggtagaggcgaactggccgaactgccaaacgggctgggagaaacacgtggtagcgaggacgagaccgatgatgacggagaggactttacccctccgatcctgaaagagttggagaatctgagcccagaggaggccgcacatcagaaggcagtggtggaaacattgctgcaggtgcacccatgtagagccggaagggccgattag

SEQ ID NO: 12236 - DNA, 744 bp, Artificial Sequence
  derived and/or modified sequence
atggtgagcaagctgagccagctgcagaccgagctgctggccgccctgttggagtcaggtttatctaaggaggccctgattcaagctctgggggagcccggcccttatctactggcgggcgaaggtcctctggacaaaggggagtcctgtggtggtgggagaggtgaacttgccgagcttccaaacgggctcggtgagactcgggggtccgaagacgagactgatgacgatggcgaggactttactccgccaatcttgaaggaattagagaacctgtcacctgaggaggccgcacaccaaaaggctgtggttgaaactctgcttcaagaagatccctggagagtggcaaaaatggtgaagagttatctgcagcagcataacattccccagcgagaagtggtcgacaccactgggctgaaccagagccacttgtctcagcatctcaataagggcactccaatgaagactcagaagcgggcagcactgtacacctggtatgtgaggaaacagagggaagtagcacagcagttcactcatgcaggccaaggtggtctgattgaggagcccacaggagacgagcttcccacaaagaaggggaggagaaaccgctttaaatgggggcccgccagccagcagattctatttcaagcttatgagcgccaaaaaaacccttctaaggaggaaagggagactctggtcgaggagtgtaaccggtgcgctctgtggacggcatgtgatcagtag

SEQ ID NO: 12237 - DNA, 1359 bp, Artificial Sequence
  derived and/or modified sequence
atggtgagcaagctgagccagctgcagaccgagctgctggccgccctcttagagagtggcttaagtaaagaggcgctgatacaagcacttggcgaaccaggcccttacttattagcgggagaaggcccactggacaaaggcgagtcctgtgggggaggaaggggagaactggcggagctgccaaatggcctgggggaaacccgagggtcggaggacgagacagacgatgacggcgaggactttactcccccaatccttaaggagttggagaatctttccccggaggaggccgctcatcagaaggctgtcgttgaaaccctcctacaagaggatccatggagagtagcaaaaatggtaaaatcatatttacaacaacataacattcctcagcgggaggtggtggacaccacagggctcaatcagagccatctctcacagcatctgaataagggcactccgatgaaaacacagaagagggccgcactctatacctggtatgtgcgtaagcagcgagaagttgctcaacagtttacacacgctgggcagggtgggttaattgaagaacccacaggagatgagctgcccacaaagaaaggccgcagaaaccggttcaaatggggcccagcgtctcagcagacatccccaggactgaaccagcagccccaaaacctgataatggcgtctctgcctggcgtcatgactatcggccctggagagccagcttcgttaggccccaccttcacaaatactggagctagtacccttgtgatcgggctggctagcacccaggcccagtccgtgccagttatcaactctatgggaagttctctaacaactcttcagccagtccagttttcccagcctctgcacccatcctaccagcagccactgatgccacccgttcaatcgcacgtgacccagtccccctttatggccaccatggcccagcttcaaagccctcacgccttgtactcccacaaacccgaggtagctcagtacacccacacaggtcttctaccgcagaccatgttgatcactgataccacaaatttatccgcactggcttccctgacacctaccaagcaagtgtttaccagcgatacagaggcgtcatccgagtccggattacataccccggcttcgcaggcaaccactttgcacgtgccatcgcaggaccctgcaagtatccagcacctccagcccgcgcaccggcttagtgctagcccgactgtctcaagttcatctttagtgctgtaccagtctagcgacagtagtaatggccagtctcacctgctgccgtccaatcactccgtgattgagaccttcatttccactcagatggcctcatcctcacagtag

SEQ ID NO: 12238 - DNA, 1212 bp, Artificial Sequence
  derived and/or modified sequence
atggtgaagagctacctgcagcagcacaacatcccccagcgggaggtcgttgataccacaggactcaatcagagtcatttatcccagcacctcaacaagggaactccgatgaagactcaaaagcgggcagccctgtatacttggtacgtccgcaagcagcgggaggttgcccaacagttcacccatgcaggtcagggcggtctgatcgaggagcctactggtgatgagctacctactaagaagggcagacggaacagatttaaatggggccccgccagccagcagatcttgttccaggcgtatgaaagacagaagaacccaagcaaagaggaaagagaaacactagtggaggagtgtaacagagccgaatgcattcagcgaggggtgagtcccagccaggcccaggggttaggatccaatttagtcactgaggtcagggtctataactggtttgcaaatcggaggaaggaggaggccttccgccacaaactggccatggatacatactcgggacctccccccggccccgggcccggccctgctctgccggcccatagctcacctgggctccccccccccgctctctccccctccaaggttcatggagtgagatacggccaaccagctaccagtgagaccgccgaggtgccaagtagcagcggaggtccgctggtaacagtgagcaccccactccaccaggtgagtcctaccggcttagaaccaagccacagtctcctgagcacagaagccaagctggtgagcgccgccggaggccccttaccacccgtgagtaccctgacagcactgcactcccttgaacagacgtcacccgggttgaatcagcaaccccaaaacctgatcatggccagcctgccgggggttatgaccatcggtccaggggaaccagccagcctcggtccgacgtttacgaataccggggcctccaccctggtgatcggaaaactggtcgggatgggtggacacctcggtggtcgcctcatgggccaaccacagaaccctggggcaggtcgagcgacaggcacccactccttcatacacaccacttgtatttaccctgtgcccaccctggaccagtccctgtgctatataagcgacacatgggtcaaccagactgatcaaaacctatctaactcctcacgagaagccggaacaaagcacaacaccagcatcctgtggtaccttcgccgatag

SEQ ID NO: 12239 - DNA, 1185 bp, Artificial Sequence
  derived and/or modified sequence
atggtgagcaagctgagccagctgcagaccgagctgctggccgccctcttagaatcaggcctgtccaaagaggcgctgattcaagccctcggggaaccgggcccttacctcctcgcgggtgaaggcccactggataagggcgagtcttgtggaggcggcagaggcgaattggctgaactacctaatgggctgggggagacaaggggaagcgaagacgagactgatgacgatggggaagactttactcctcccatcctcaaagagcttgagaaccttagccccgaagaggccgcgcaccagaaagctgttgttgaaaccttgctgcaggaagacccatggagggtcgccaaaatggtgaagtcctatctgcagcagcataacatccctcaacgcgaggtcgtggacacaactggtctgaatcagagccacctgtctcagcacctcaacaaaggtacccctatgaaaacccaaaagagagccgccctctatacctggtatgtccgaaagcagcgggaagtggctcagcagttcacacacgctggccaaggcgggcttattgaggaaccgacgggtgacgagctgccaactaagaagggccggaggaatcgcttcaaatggggaccagcttctcagcaaattctctttcaggcctatgaaaggcagaagaatccaagcaaggaggagcgtgagaccctggtggaggaatgcaaccgggctgaatgcatccagcgcggagtgagcccgtcacaggcccaaggtctaggttccaatttggtgacagaagtcagggtctacaactggttcgccaatcgtaggaaggaggaagcttttcggcacaagctggccatggacacatattctgggcctcccccaggcccaggcccagggccagcgctccccgcccatagcagccctggactgccaccacccgcactctcaccctctaaggtccatggcgtcaggtacggacagcccgccacctccgagacagctgaggttccaagctcatctggcgggccactcgtgacggtgtcaacaccactccatcaagtgtctcctaccggattagagcccagccactcactgttgagtacagaggcgaagttagtgtcagctgctgggggcccccttcccccagctgcttgtagccagccaggcagggttgctcgcctatttaatttctag

SEQ ID NO: 12240 - DNA, 1416 bp, Artificial Sequence
  derived and/or modified sequence
atggtgagcaagctgagccagctgcagaccgagctgctggccgccctgctggaatccgggctgagtaaagaagccttgatacaagccctgggcgagcccggcccctacctgcttgccggagaaggacccttggataaaggggagtcctgcggcggaggccgtggcgaactggcggaactcccgaacggtcttggtgagactaggggcagtgaagatgagactgacgacgacggagaagacttcactccccccattctcaaggagctggaaaacctgtctcccgaagaagccgcccatcagaaggctgtggtggaaaccttgctgcaggaagacccctggagggtcgcaaagatggttaaatcatacctgcaacagcataacataccacaaagggaagtggtagataccactggtctcaatcaatcccaccttagccagcatctgaataagggcacccccatgaaaacacagaaacgggccgccctgtacacttggtacgtccgtaaacaaagagaggtggctcagcagttcactcacgccggccaggggggactgatcgaggagccgactggtgacgagctgccaactaaaaaaggccggagaaataggtttaagtggggccctgcgagtcagcagatcctcttccaagcatatgagcggcagaaaaatccatccaaggaggaaagagagacgctggtggaagagtgcaaccgggccgaatgcattcagaggggagtgagccccagccaggctcaggggctgggttccaatctggtgacggaagtcagggtatataactggtttgcaaataggcggaaggaagaggccttccggcataagctagctatggacacctatagtggcccgccgccaggaccgggccccggccccgccctgccagcacactcaagccccgggttgcccccccccgccctctcaccatcaaaggtgcacggggtaagatatgggcagcccgctacctcagagactgccgaggtcccatcgagttctggggggcccctggtgacggtgagcactcccctgcatcaggtctcacccacaggactggaaccctctcattcgttgctttccaccgaggcaaaactggtcagcgcagctgggggtcccctgcccccggtttcaaccctgaccgccctgcactcattggagcagacatctccgggactgaaccagcagccacaaaatttaatcatggcttccctccctggggtgatgacaattgggccaggggagcccgctagcctgggacccacgtttacaaataccggcgcttctacgctggtgattggactcgcaagcacccaagctcagagtgtgcctgtgattaactctatggggtccagcctgacgaccctgcaaccggtacagttcagtcaacagggacccagcagctag

SEQ ID NO: 12241 - DNA, 1359 bp, Artificial Sequence
  derived and/or modified sequence
atggtgagcaagctgagccagctgcagaccgagctgctggccgccctgttggagagcggtctctccaaggaggcgctgattcaggccttgggcgaacccggaccgtacctgctagcgggtgaggggccactggataagggagagtcatgtgggggtgggcggggtgagctggcagaactaccaaatggcctcggggagacacgtgggagcgaggacgaaacggacgacgatggagaagattttacgccacccatcttgaaggagcttgagaatttgagcccggaggaagctgcccatcagaaggcggtcgtagagaccctgttacaggaagatccttggagagttgctaaaatggtaaagagctacttacagcagcacaatataccacagcgcgaggtagttgacacaacaggcctcaaccagagccacctgagccaacacttaaataagggaactcctatgaagacacagaagcgcgcggctctgtacacatggtacgtgaggaagcagagagaggtggctcaacaattcacacatgccggccaggggggtctcatcgaggagcccaccggggacgagttgcctaccaaaaaagggcgccgcaacagattcaaatgggggcccgcttctcagcagatactgttccaggcttacgagaggcagaagaatccctccaaagaggagcgtgaaacgctggtggaggagtgtaacagagcagaatgcatccagaggggggtctcacctagccaggcccaggggctgggctcgaatctggtgaccgaagtgcgcgtgtacaattggttcgccaatcgccgcaaggaggaggccttccgacacaagttagccatggatacttatagtgggccaccccctggcccaggaccggggccggcattgcctgcacactccagccccggcctgccacctcctgcactgtctccttccaaggtgcatggcgtgcggtacgggcagcccgcaacaagcgaaaccgccgaggtgccctcctcaagtgggggccctctcgtgaccgtcagcacaccactgcatcaggtcagtcctacagggttagaaccctcacacagtcttttatcaactgaagccaagcttgtaagcgcagcaggcggaccgcttcctcccgtatctacgctcacggctctgcactccctagagcaaacttcacctggactcaatcagcagccgcagaacttgatcatggcatcactgccaggggttatgaccattgggcccggcgagcctgccagcctgggccctaccttcactaacacgggcgcctccactctacccctcttcggagcaggagtcgccgagttaacgagacagcagggaccgtcatcttag

SEQ ID NO: 12242 - DNA, 1071 bp, Artificial Sequence
  derived and/or modified sequence
tgatggctggtgggcttctggggcggcagcggctgcaaggagttcgggttatgtctgcctgctggtcggcagacacaacccacacggtgggggcgtagattggcttggtggacaagggccgcctggccttgtggatcccgggcaatggtgtccaagttatcacagctccagaccgagctgcttgccgctctactggagtccggtctttctaaggaagccctcatacaggccctaggcgaacccggaccgtacctgctcgccggcgaggggcctctggacaagggggagtcgtgcgggggaggaaggggcgaactggctgagctccccaatggacttggagagactcggggctccgaagacgagacagatgacgatggcgaggactttactccccccatcttaaaggaattggagaacctttctccagaggaggccgcccatcagaaggcagtcgtagaaactttgctgcaggaagacccatggcgcgtggcgaaaatggtaaaatcatatctgcagcagcacaacatcccgcaacgcgaagtggtcgacaccactggattaaatcagtcacatttgagccagcacctgaacaagggtacacccatgaaaactcagaaaagagcggcgttgtacacatggtacgtgagaaagcagagagaggtggcacaacaattcacgcatgctggccagggcgggctgattgaggaacccacaggagacgaactacccaccaaaaagggtcggagaaatcgcttcaagtgggggccagcctcccagcagatcttgtttcaggcttacgaaaggcagaagaacccgagcaaggaagagcgagagactctagtagaggagtgtaaccgggcggaatgcatacagcggggtgttagtcccagccagccacaacccgcagaatacagatctcaagccggcttaagctcatggggacccccccctccctgtcagcatcccgattccactgctcagttgggggctgatatccctaggcctcagcctgcggctccagaaccacatcacggactgacctcctggggccacgatcatagagcttggtag

SEQ ID NO: 12243 - DNA, 1896 bp, Artificial Sequence
  derived and/or modified sequence
atggtgagcaagctgagtcagctccaaacagagctgctggctgctcttttggaaagcgggctttctaaagaagccttgattcaggcactcggtgagcctggcccttatctgctggccggtgaagggcctctagataaaggcgagagctgcggcggaggtaggggcgaacttgcagagctcccgaacggtctgggcgaaacaagaggctcagaggatgagaccgatgacgatggagaggactttacacctcctatcctcaaagaactggagaacctgagcccagaagaggcagctcaccagaaagcagtggtggagactcttctacaggaggatccgtggagggtcgctaagatggtgaagagctacctgcagcagcataatataccacagagggaagttgttgataccaccgggctgaaccagagccatcttagtcagcacttgaataaaggcacacccatgaagacacagaaacgggctgccttgtacacatggtatgtgcgcaaacagcgggaggtggcccaacaatttactcatgctggacagggcggtttgattgaggagccaacaggcgatgagctgcctactaagaagggtcggaggaaccggtttaagtggggtcccgcaagccagcagatcctgttccaggcgtacgaacggcagaaaaatccctctaaggaggagcgggaaacactcgtagaggagtgtaaccgggctgagtgcatccaaaggggcgtgtctccttctcaggcgcagggacttggaagcaacctggtgacagaggtacgagtttataattggtttgccaataggcgaaaagaggaagcattcaggcataagttggccatggatacctactctggcccacctcctgggcctgggccaggcccagccctgcctgcccacagctcccccggattgccaccacccgcactgagtcctagcaaagttcatggagtcaggtatggccagcctgcaacatccgagaccgcggaggttccttctagtagcgggggacctttagtaacagtaagcacccccttacaccaagtctctccaactgggctagagcccagtcactccctactgagcactgaggccaagcttgtcagcgccgcaggcggtcctctgccgccagtgtcaaccctaaccgctctccattccttagagcagaccagcccaggactcaatcagcagccgcagaacctgatcatggctagccttcccggtgtgatgacaatagggcctggggaacccgcatccctgggcccaacgttcacgaatacgggcgcttccactcttgtgattggacttgcgtccacgcaggctcagagcgtcccagtcattaactctatgggctcatcgctcactaccctgcaaccggtccaattctcccagcccctgcacccctcctaccaacagcctctgatgcctcctgtacagtcccacgtgacacaaagtcccttcatggccacaatggcccagctccagagcccccacgcactgtatagccataagccagaggtggctcagtacacccacacaggtctgctcccgcagaccatgctaatcactgatactaccaatctgagcgcactggcctccctgacccccaccaagcaagtgttcacctcagacacggaagcgagcagtgagtccggcctgcatacacccgctagtcaggcgactacgcttcacgtcccctctcaagaccctgctagcatccagcatttgcaaccagcacaccgcctgtccgcaagccctaccgtaagtagcagctccctcgtactctatcaatcttccgatagctccaatggtcaatcccacctcttgccatccaatcattccgttatcgaaacctttatatctactcagatggcttcatcaagtcaatag

SEQ ID NO: 12244 - DNA, 1719 bp, Artificial Sequence
  derived and/or modified sequence
atggtttctaagctgtcgcagctgcagaccgagctgcttgccgctcttctcgagagtgggttatccaaggaggcactgatccaggcactgggcgaaccaggaccatatctcctcgctggagaagggcctcttgataagggagagtcatgcggaggagggcgaggggaactagctgaactgcccaatggcctgggcgagacccgaggctcagaggacgaaacggatgatgatggagaggactttactccccctatcctaaaggagcttgagaacctatcccccgaggaggctgctcaccagaaagcagtggtggaaaccctccttcaggaggacccctggagagttgccaaaatggtcaagagctacctacagcagcataacataccgcagcgagaggtggtggatacaaccggactgaatcagagtcatctatctcagcacttgaacaagggcaccccaatgaaaacgcaaaagagagcagccctttacacatggtacgtacggaagcagagggaagttgctcagcaatttacgcatgcgggacaggggggacttattgaggagcccaccggagacgagctgcctactaagaagggccgaagaaaccgtttcaaatgggggccagcatctcagcagattctgttccaagcctacgaaagacagaagaatccgtctaaggaggaacgagaaactctggtggaggagtgtaacagggccgaatgcatccagcggggtgtctctccttcacaggcccagggtctcggctccaatcttgtgaccgaagtgcgcgtctataactggttcgctaatcgcagaaaagaggaagcctttcgccataaactggccatggacacgtattccgggcctccccctggacccggtcctggtcccgctcttcccgctcatagcagcccaggccttcccccacctgcactgtcacccagtaaggtgcacggggtgcgttatgggcagccggcaacatccgaaaccgccgaagtgcccagcagtagtggcggacctctggtgaccgtcagcactcccttacaccaggtgagccctaccgggctagaaccaagccactcactgctttcaactgaggccaaattggtttctgcggctggcggtcccctgcctcccgtctctacccttaccgccctgcattcactggagcaaacaagcccagggctgaaccagcagcctcagaatttaatcatggcgagccttcccggtgtgatgactatcgggccaggcgagcctgcaagcctgggccctacctttactaatactggtgcttcgactctcgtaatcggcctcgcctccacccaagcccagtccgtgccagtgatcaacagcatggggtcttcactcactacccttcagcccgtccagttctcacaaccacttcatccctcgtatcagcagcccctcatgcccccagtgcaatcccacgtgacacagagcccttttatggcaaccatggcacagcttcaatctccacacggagaacgtcctgtccctcacaccgcgggtgacgacgatagaggctggctgtcgatggatgctggagaacgtggagcttggcaggctctgcagagcgcttgtgtcagtgggacttcagtatttccttactctagtaacggtcagagccacctgctcccaagtaaccattcggtgatcgaaacttttattagtacgcagatggcatcaagcagtcagtag

SEQ ID NO: 12245 - DNA, 1566 bp, Artificial Sequence
  derived and/or modified sequence
atggtgtctaagctgtctcagctccagaccgagctgctcgccgctctccttgagtcaggcttgagcaaggaggcattgattcaggctttgggcgagccgggaccctacctcctggcaggtgaaggcccactcgacaaaggagagagttgtggcggtgggcgaggggagctcgcggagctgcctaacggcctaggagagacaaggggtagtgaggatgagacagacgacgatggcgaggactttactccacccattctgaaagagctcgagaatctgtcacccgaggaggcggcacaccaaaaggctgtggtagagacgctgctacaagaagacccatggcgggtggccaaaatggtgaagtcatatctccagcagcataacattccacagcgggaggttgtggatacgaccggattgaatcaatcacatctcagtcagcatctgaataagggaactcctatgaaaacccagaagcgtgccgctctctatacttggtacgtgcgtaaacagcgggaggtggcccaacaatttacccacgcgggacagggagggctgatcgaggagcctaccggcgatgaactgccaactaagaagggcaggcgtaaccggttcaagtggggccctgcatcccagcagatattgttccaggcatatgagaggcagaagaacccctctaaggaggaaagggagactctggtagaagagtgtaatcgggcagaatgtattcagagaggagtttctccttctcaggcacaaggcttaggctcaaacttggtcacagaggtcagagtgtacaattggtttgcaaataggaggaaagaggaggcatttcggcataagctcgcgatggatacgtattcagggccaccaccaggacccggaccaggaccagcgctgcccgctcacagttctcccggattgcctcctccggcactgtcacccagcaaagtgcatggcgtgcggtacggccagcccgcaaccagcgagaccgctgaagtgccttccagtagcggcggaccactggtaacggtgtccacacccctgcaccaggtgtcacctacaggccttgaacccagccatagtctcctgtcaacagaggccaaactggtaagtgccgcagggggacctctgccacctgtttctaccctcacggcgctccacagccttgagcagacatcgcctggactcaaccaacaaccacaaaacttgatcatggcttccctgcccggagttatgactattgggccaggtgaaccagccagtcttggcccaacgtttactaatacaggggcttccacactcgttattgggaagctcgtcggtatggggggacatctgggcggaagactcatgggccaacctcagaacccgggagcaggaagggctacaggcacccattctttcatccaccaacatgtgttcattcaatgcctgctctggacaagtcattgtgccacaagtgtgatccccggagactcaagtaatggccagagtcacctgttaccttcgaatcatagcgtcatcgagactttcatctccacgcagatggcctctagctcccagtag

SEQ ID NO: 12246 - DNA, 1572 bp, Artificial Sequence
  derived and/or modified sequence
atggttagcaagctgtcacaactgcagactgaactgctagccgcacttctggagagcggtctctcgaaagaggcactgatccaagccctcggcgaacccggaccttatcttctggctggggaaggccctttagacaaaggcgaatcgtgtgggggagggagaggggagctcgcagaactccctaatggcctgggggagacgcgtggatccgaagacgaaaccgacgatgatggggaggatttcacgcctcccatcctgaaggaactcgagaacctgtccccggaagaagccgctcaccagaaagctgtggtcgagacgctgttgcaggaggacccctggcgagtcgcaaagatggttaaaagctacttacagcagcacaatatcccacaacgagaagtggtagacaccaccgggttgaaccagtctcacttatcccagcatcttaacaagggaactccaatgaaaactcagaaacgggcagctctgtatacgtggtacgttaggaaacagcgtgaggtggcccagcagttcacccacgccggtcagggagggctcattgaagaaccaacaggggatgaactgcctacaaagaaaggtcgcagaaacaggtttaagtggggccctgcctcacagcagatcttgttccaggcctatgaaagacagaaaaacccttcgaaagaggagcgcgaaaccctggtcgaggaatgcaatagagcggaatgtattcaaagaggcgtatcaccatctcaggcccagggactcgggtccaacctcgtcacagaggtctctgcagccggtgggccactcccacccgtctcgacgctgactgctctgcactctctggaacagacttctcccggactaaatcagcagccacagaatctgataatggcatcgcttccaggggtgatgaccatcggccctggtgagcctgctagccttggcccaactttcacaaatacaggggcatctacgctggtcattggcctggcttctactcaagctcagagcgttcccgtgattaacagtatggggagcagtcttactaccctgcagcctgtgcagttctcccaacccctgcatcccagttaccagcagccattgatgccacccgtgcagtcccacgttactcagtcccctttcatggcgacaatggctcagctgcaaagccctcacgctctgtactcccataagccagaggtcgcccaatatacccataccggcctgctcccccagactatgctcatcaccgacactactaatctgtccgctttggccagccttacacctaccaagcaagtttttaccagcgacaccgaggcttccagcgaatccggactgcacaccccagcatctcaagctacaaccctccacgtgccgtcccaagaccccgcttcaatccagcacctgcagccagcacatcgattgtcagcaagtcctacggtttcgtcttcttcactagtgttataccagagctctgactcaagcaatgggcagtctcatctgctaccctccaaccatagtgtgatagagacctttatctctacccaaatggcctctagctcccaatag

SEQ ID NO: 12247 - DNA, 1812 bp, Artificial Sequence
  derived and/or modified sequence
atggtaagcaaattgtcacaactgcagacggagttgctggcagctcttctggagagcggactgtcaaaagaggcacttatccaggcactgggggagccaggcccttatctcctggcaggcgagggaccattagataaaggggaaagctgtggcggagggcgaggcgagctggctgagctgccaaacgggcttggtgaaaccagggggtccgaggacgaaactgacgacgacggcgaagattttacacccccaattttgaaggagctggagaacctgtccccagaggaggctgcacaccagaaggctgtggtggagactctactgcaggaggatccgtggcgggtcgcaaagatggttaaatcctacctgcagcagcataacatccctcagcgggaggtggtcgacaccacagggctgaatcaatcgcacctctcacagcacttaaataagggtacccccatgaaaactcagaagagagctgcgttgtacacatggtacgtaagaaagcaacgggaagtggcccagcagtttacacatgcagggcaaggtgggctgatcgaagagccaaccggagatgagctgccgacgaagaaaggcaggcgcaaccgctttaaatgggggcctgcttctcagcagatcttgtttcaggcctatgagaggcagaaaaatccttcaaaggaggaacgcgagaccctcgtggaagaatgtaatcgggctgagtgtattcagagaggagtgtccccgtctcaggcccaaggcctgggatcaaacctggtcaccgaagtccgagtgtacaattggtttgcaaatcgcaggaaggaagaagcctttaggcacaaactcgccatggacacttatagcggccctcctccagggccaggccctgggcctgcactgcccgcacatagctctcctggtttacccccacctgctttaagcccatctaaggttcacggcgtcagatatggtcagccggcaacctccgaaacagcggaagtgccctcttcatcgggcggacccctggtcactgtttctactcccctgcaccaagtgtcccctaccggcctggagcccagtcacagcttactgtctacagaggcaaaattggtgtctgccgctggcggaccacttccgccagtcagtacactgacagcactgcactctcttgagcaaacctcaccaggcctcaatcagcagccacaaaacttgattatggcctctcttccgggagtgatgaccatcggtcctggcgagcctgcttcattagggcctactttcacgaatacgggcgcatctaccttagtcatagggctcgctagtacccaggcacagtcagtaccagtcattaatagcatgggatcctccttaacgacactgcagccagtgcagttttctcagccattgcacccctcctaccaacaacctcttatgccaccggtgcagtctcatgtcacacagtctcctttcatggcgacgatggcccaacttcagagtccgcacgccctgtattctcacaagccggaagttgcacagtacacacatacagggctgcttccacagactatgttgataaccgataccactaatttgagcgccctggcttctctgactccaacaaagcaggtctttacaagcgacactgaggctagctccgagtctggactgcacacacctgccagccaggcaaccactctccacgtcccttcccaggaccctgcctccattcagcacctccagccagcccacaggttgtctgcatccccgactgtttcatccagttcactggtgttataccaatccctcggattatag

SEQ ID NO: 12248 - DNA, 837 bp, Artificial Sequence
  derived and/or modified sequence
atggtctccaagctcagccagctgcagacagagttgctggcagccctcctcgagtctgggctgagcaaagaagccctcatacaggctttgggagaaccgggtccctatctgttggctggagaaggcccactagacaagggtgagagctgcggtggcggacggggtgagttggccgagctacccaacgggttgggcgagacaaggggctctgaagatgagactgatgacgatggtgaagacttcacacccccaattcttaaggagctggagaatctcagcccagaggaagccgctcaccagaaggcagttgtggaaaccctactgcaagaggacccctggcgggtggcaaaaatggtcaagtcttaccttcaacaacataacatcccccagcgggaagtcgtggatacaacaggcttgaatcaatctcatctgtcacaacacctgaacaaggggacacctatgaagacccaaaagagagctgctctttacacttggtatgtcagaaagcaacgcgaggttgcacagcgacgcaacgccagccgggaaggatgtcctcaccacaggcaccgcggatgggccccaacaagcagcagaaggtgcgtctctactactggactgcctactggggctaaaaagaaacctagcggtaccagctggccctggacacgtacagccggtccccctcaagggcaggctagagatctgcgttgccctctgactgcaccgttggcttgtctgcatctccccagtcctccggtgagatctaccgtttgtgccatggactctctccgccctgtaaggcttcagaagtacccccaggcagccgctgtcccttag

SEQ ID NO: 12249 - DNA, 360 bp, Artificial Sequence
  derived and/or modified sequence
atggttagtaagctgtcacaacttcagacagagcttctggccgctctgctcgaaagtggactgagcaaggaagccctgatccaggctctcggagaaccagggccttacctccttgccggtgagggcccattggataaaggtgagagttgcggcggtggaagaggagaacttgccgagctgcctaatggcctcggagaaacgagaggtagcgaagacgagactgacgacgacggggaggactttacaccgcctattctgaaggaactggagaacctgtcacccgaagaggccgctcaccagaaggccgttgtggagactttactgcaggtacatccttgccgcgctggccgagccgactag

SEQ ID NO: 12250 - DNA, 744 bp, Artificial Sequence
  derived and/or modified sequence
atggtaagtaagctgagtcaacttcagaccgaattgcttgctgccttgctggagtctggcctaagtaaagaggcgctgatccaggcactcggggaaccaggcccttatttgcttgccggagagggacctttagacaagggagagagctgtggtggagggaggggcgagctggccgagcttcccaacggcctcggcgagactcgagggagtgaagacgagaccgacgacgacggcgaggatttcaccccacccattctgaaggagctcgagaacctgtctcccgaggaagctgcccaccagaaggcggtggttgagaccctccttcaagaggacccctggcgggtggcgaagatggttaagtcttatctgcaacagcataatataccccagcgtgaagtcgtggacaccactggcctgaatcagtcccacttaagccagcatctgaacaagggtactccaatgaaaacccaaaaacgggctgccctgtatacttggtatgtgcgaaaacagagggaggtggctcagcagtttacccacgctggccagggtggactcatcgaagaaccgacaggcgatgaactgcccactaagaaagggcgtcgcaatcggttcaagtggggacctgcctctcagcagatactgttccaagcctacgagcgacagaaaaatccctcgaaggaagagcgtgagaccttagtcgaagaatgcaataggtgcgcactctggacagcttgcgaccagtag

SEQ ID NO: 12251 - DNA, 1359 bp, Artificial Sequence
  derived and/or modified sequence
atggtgtcgaagctctctcaacttcagactgagctgctcgccgctttgctcgagagcggcctctcaaaagaggcactgatccaggccctgggtgaacccggaccctatcttctagcaggcgagggaccactggataagggggagtcatgtggagggggacgcggtgaacttgccgagctacctaacggtctgggtgaaacccgcggtagtgaagatgagaccgatgacgacggcgaggatttcactcctcccattttaaaggaacttgaaaacctctcccctgaggaggcagcccaccagaaagccgtcgtggagacgcttctgcaggaggatccctggcgcgtggctaagatggtgaaatcatacctgcagcagcacaatattccccagcgggaagttgtggacaccaccggactgaaccaatcacatctcagtcaacatcttaataagggcacccccatgaagacccagaaacgtgccgctctctatacatggtacgttagaaagcagcgagaggtcgctcagcagttcacccatgcaggacagggtggactgatcgaggagcctaccggcgacgaactccctaccaagaaggggaggagaaatcggttcaagtgggggccagcatcccagcagaccagcccgggtctcaaccagcagccccagaacctgatcatggccagcctacctggcgtgatgactatcgggccaggggagcccgcaagcctaggaccaacctttaccaacactggcgctagcactctggtgattggtctggcctccacccaggcgcagtcggtccccgtcatcaatagtatggggagctctctgaccacattacagccggtgcagttctcgcagccgcttcacccctcctaccagcaacctttgatgcctccagtccagtcccatgtcacccagtctcccttcatggccacaatggctcagctgcaatctccacacgccctgtactctcataagccagaggtggcccagtacacacacactggcctgctgccccagacaatgctgattaccgataccacgaatctgagcgctctggcctctctgactccaacgaagcaagtcttcacatctgatacagaagctagttccgagtctgggctgcacacacctgctagtcaggctacaactctgcatgtgcctagccaggatccagcgagtatccagcatctgcaaccggcacaccggctgtctgctagcccgacagtaagcagttcgtctctggtgctgtaccagtcctcagattcctcaaacgggcagtcacatctgctgccttcaaatcactcagtaatcgaaactttcatatcaactcagatggctagctcatcccagtag

SEQ ID NO: 12252 - DNA, 1212 bp, Artificial Sequence
  derived and/or modified sequence
atggtcaaaagctatctacaacaacacaacatacctcagcgagaagtcgttgatacaactggactgaaccagagtcatctgtcacaacacctgaacaaaggcacccccatgaaaacccagaagagggccgctttgtatacatggtacgttagaaagcaacgagaggtggcacaacagttcacccatgccggtcaaggaggactgattgaggagcctaccggagatgagctgccaacaaaaaagggaaggcgtaatcgctttaagtggggacccgctagtcagcagattctgtttcaggcatacgaaaggcagaagaatccctctaaggaggaaagagaaaccctggtcgaggagtgtaaccgcgcagaatgcattcaaagaggcgtctcgcccagtcaggcccaggggctgggaagtaatctggtaacagaagtccgtgtgtacaattggttcgccaaccggaggaaagaggaagcttttcggcataaactcgccatggacacatacagcgggccaccaccgggaccagggccaggcccagccctacccgctcacagcagcccagggctcccccctccggcacttagtcccagtaaagttcacggggtaagatacggacagccggcaactagcgaaaccgccgaggtcccttctagcagtgggggacccctggtgaccgtcagcactcctctgcaccaggtaagccctactggcttagagccctctcactcactgctttcaaccgaggccaaactcgtctctgcagcgggaggtcctttacctccggtgagcactctcacagctctgcactcgttggaacagacctcccccggactaaatcagcaaccacagaacctcatcatggcctcactacctggagttatgacgatcggcccaggtgagccagcttccttgggccctacttttaccaatactggtgccagtaccctagttatcggtaaactggtggggatgggtggacacctcggaggaaggctgatggggcagcctcaaaacccgggagccggaagagctactgggacccacagtttcattcatacgacgtgtatttacccggtaccaaccctcgatcaatccctttgctacatctccgatacgtgggtgaatcagacggaccagaatctctccaacagctcaagagaggccggaactaagcataacacttctattttatggtacttgagacggtag

SEQ ID NO: 12253 - DNA, 1185 bp, Artificial Sequence
  derived and/or modified sequence
atggtcagcaagctgagccagctccagaccgagttgctcgctgctctactggagtccggcctttccaaggaggcgctgatacaagcactgggagaaccagggccatacctgctagctggagagggacccttagacaagggggaaagttgtggtggcggtcggggtgaactcgcagaattgcccaacgggctgggagaaacgagggggagcgaggacgagacagacgacgatggtgaagatttcacaccacctattctcaaggaactggagaatctgagtcctgaggaggccgcacaccagaaggcggttgttgagacactgctgcaggaggatccctggagggtcgcaaagatggtgaagtcctacctgcagcagcacaacattccccaacgcgaagtggtggacacaacagggctcaaccagagtcatctgagccagcatttgaacaagggtactcccatgaaaacgcagaaaagagcagccctgtatacatggtatgtacgtaaacagcgcgaagtggcccagcaatttactcacgcaggccagggcggtctaattgaggaacccacaggagacgagctccctaccaaaaagggcaggagaaatagattcaagtgggggcctgcgtcccagcagatactgtttcaggcctacgagagacagaagaaccccagcaaagaagagagggagactctggtggaagagtgcaacagggcagagtgtatccagcggggagtgagcccttcgcaggcccaaggcttgggttcaaatctggttaccgaagtgagagtgtataattggttcgccaatcgtcggaaggaggaagccttccgacacaaactggccatggacacatacagcggtccaccaccaggtccgggaccaggccctgcgttgcccgcacactcctcgcccggactgccacctcctgcactcagcccttccaaggttcacggggtgaggtacggacagcccgctacgagcgagacagcagaagttcctagctctagtggaggacctcttgtgacggtgtcaacacccttgcatcaggtgtcccccacagggctggagcccagtcactcgctgctgtccactgaagcgaagcttgtgagtgccgctgggggaccacttcccccagcagcctgtagccagccagggagagtcgcgagactttttaacttctag

SEQ ID NO: 12254 - DNA, 1416 bp, Artificial Sequence
  derived and/or modified sequence
atggtatctaaactgtctcagttgcaaacagagctacttgccgctcttttagagtccggcctcagtaaggaggccttaattcaggcccttggagagccaggtccttacctgttagccggtgaggggccactggacaagggtgaatcttgcggagggggtaggggtgaactggcagagctccccaatggcctgggagagactagaggtagcgaggacgaaaccgacgatgatggtgaggactttacccctcccatcctcaaggagcttgaaaacctgtcaccagaagaggcagctcaccaaaaagcagtagttgaaacccttctgcaagaggacccgtggagggtggccaagatggtaaagtcctacctccagcagcacaatatccctcagcgcgaagttgtggacactacaggtctcaatcagtcacacctgtctcagcacctaaataaaggtactcccatgaaaacccaaaagagggccgctctttatacctggtatgtcagaaaacaacgagaagtcgcgcagcagttcacgcatgctggccaggggggactgattgaggagccgacaggggatgaactgccgaccaaaaaaggcaggaggaaccggtttaaatgggggccagcttctcagcagatattgttccaggcttacgagagacaaaaaaacccaagtaaagaggaaagagagaccctggtggaagagtgtaaccgagccgagtgcatccagaggggggtctccccatcccaggcccagggtctcggcagcaacctcgttactgaggtacgagtgtacaattggttcgcgaacagaaggaaagaagaggcatttcgtcataagttggctatggacacatactctggtccgccaccgggaccgggaccagggcctgccctcccagcccattcatcacccggactcccccctcccgctctctccccctctaaggtccacggcgtgagatatggacagccggcaacttccgagacagccgaggttcccagttcctccggcggtccattagtcacagtatctacacccttacaccaggtgagcccaacaggtctggagccatctcatagcctgctgtctaccgaggccaaacttgtgtcagccgcaggtggcccacttcccccagtctcaaccttaacagctcttcacagcctggaacagacctcaccgggtctgaaccaacaacctcagaacctgattatggcttctttgcccggagtgatgaccatcggtccaggggaacctgcctcacttggcccaaccttcacaaacacgggtgcttccacactggtaattggactggcatccacccaggcccagtctgtgcctgtgatcaattcaatgggctctagcctcacgacacttcagcccgtgcagtttagccagcagggacctagctcctag

SEQ ID NO: 12255 - DNA, 1359 bp, Artificial Sequence
  derived and/or modified sequence
atggtgagcaagctgtctcagctgcagaccgagttgttggcagctctgttggaaagcggcctatcaaaagaggccctgatacaggctcttggcgagcctggtccctatctgctcgcaggtgaggggcctcttgataagggagagtcctgtggaggcggacgcggtgaactcgccgagctgcctaatggcctgggggagacccgaggaagtgaagacgagaccgacgacgatggcgaagactttacgccacccatcctgaaggaattggaaaaccttagccctgaggaagcggctcaccaaaaagccgtggtagagacgctgctgcaggaggatccttggagagtagcgaagatggtaaagagctatctgcaacagcacaacataccccaacgtgaggtggtggataccactggactgaaccaatcgcatctgtcgcaacacctaaacaaaggaacacctatgaaaactcagaaacgtgcggctctgtatacatggtacgtgagaaagcaacgagaggtcgcgcagcagtttacgcacgcaggccagggtggactgatcgaggagccaaccggagatgagcttccaacaaaaaaagggagacgtaacagatttaaatgggggccagccagccagcagattctcttccaagcgtacgagaggcagaagaacccttctaaagaggaaagggaaacacttgtggaagagtgtaatagagcagagtgtatacaaaggggagtgtctcctagtcaggcacaggggctggggtcaaacttagtcacagaagtccgggtatataattggttcgccaatagaaggaaggaggaagcgttcagacacaaacttgccatggatacatactctggccctcctccgggacctggccctggtccagcactgcccgcacacagctcccctggattacccccacctgcactgagtccctccaaggtgcacggcgtgcgttatgggcagcctgctacctcggagaccgccgaggtgccgtcaagttctggcggtccactcgtgaccgtctccaccccattgcatcaggtctctccaacagggcttgagccttcccattcactgctgagcactgaggcgaaattggtatctgcggcaggagggcctttgcccccagtgtccacacttaccgcccttcactctctagaacaaacgtctccgggtctgaaccagcagccccaaaacctgattatggcgtctttgccgggagttatgactatcgggccaggcgagcccgcaagcttagggcctacttttacaaatacaggcgcttccacacttccactattcggagctggggtggcagagctcacgcggcagcagggacccagtagctag

SEQ ID NO: 12256 - DNA, 1071 bp, Artificial Sequence
  derived and/or modified sequence
taatggctggtcgggttttggggcggtagtgggtgcaaggagtttggcctgtgcttgccagctggccgacaaacccaacccaccaggtggggcaggaggctggcttggtggacaagggctgcatggccatgtgggagccgggcaatggtctcaaaactttctcaactgcagacagagctgctggctgccctgttggagagtgggctaagtaaggaggccctgatccaggccctcggcgagcctggcccatacctgctggcaggcgaaggacctctggataagggagagtcctgcgggggtggccgtggcgagctggcagaactgcccaatggcttaggggagacacggggttcagaggacgagactgacgacgatggcgaagattttacgccccctatccttaaggagctggaaaacctatcgccagaggaggccgcacatcagaaggccgtggttgagactttgttgcaggaggacccttggcgggtagctaagatggtcaaatcttacctccagcagcataacatcccccaacgagaggtggttgacaccactggcctgaatcagtcacacctctcacagcacctgaataaagggaccccaatgaagacgcagaagcgggctgctctgtacacctggtatgttaggaagcagagagaagtggcacaacagtttacccacgctggccaggggggattgatcgaagagccaactggggacgaactgccaacaaagaaggggagaaggaataggtttaaatggggacctgcaagtcagcagattctgttccaggcttacgagaggcagaaaaatccttctaaagaggagagagaaaccttagttgaggaatgtaaccgggcagaatgcattcagaggggagtttccccaagccagccacaacccgcagagtaccgcagccaggctgggttaagtagctggggtcctcctcctccctgccagcaccctgactcaaccgcccagctgggcgcagatatccctcgccctcagccagcagctcccgaaccccaccacggtctcacttcctggggccatgatcaccgcgcttggtag

SEQ ID NO: 12257 - DNA, 1896 bp, Artificial Sequence
  derived and/or modified sequence
atggtgagcaagctgagccagctgcagaccgagctgctggccgccctgctggagagcggcctgagcaaggaggccctgatccaggccctgggcgagcccggcccctacctgctggccggcgagggccccctggacaagggcgagagctgcggcggcggcagaggcgagctggccgagctgcccaacggcctgggcgagaccagaggcagcgaggacgagaccgacgacgacggcgaggacttcaccccccccatcctgaaggagctggagaacctgagccccgaggaggccgcccaccagaaggccgtggtggagaccctgctgcaggaggacccctggagagtggccaagatggtgaagagctacctgcagcagcacaacatcccccagagagaggtggtggacaccaccggcctgaaccagagccacctgagccagcacctgaacaagggcacccccatgaagacccagaagagagccgccctgtacacctggtacgtgagaaagcagagagaggtggcccagcagttcacccacgccggccagggcggcctgatcgaggagcccaccggcgacgagctgcccaccaagaagggcagaagaaacagattcaagtggggccccgccagccagcagatcctgttccaggcctacgagagacagaagaaccccagcaaggaggagagagagaccctggtggaggagtgcaacagagccgagtgcatccagagaggcgtgagccccagccaggcccagggcctgggcagcaacctggtgaccgaggtgagagtgtacaactggttcgccaacagaagaaaggaggaggccttcagacacaagctggccatggacacctacagcggccccccccccggccccggccccggccccgccctgcccgcccacagcagccccggcctgcccccccccgccctgagccccagcaaggtgcacggcgtgagatacggccagcccgccaccagcgagaccgccgaggtgcccagcagcagcggcggccccctggtgaccgtgagcacccccctgcaccaggtgagccccaccggcctggagcccagccacagcctgctgagcaccgaggccaagctggtgagcgccgccggcggccccctgccccccgtgagcaccctgaccgccctgcacagcctggagcagaccagccccggcctgaaccagcagccccagaacctgatcatggccagcctgcccggcgtgatgaccatcggccccggcgagcccgccagcctgggccccaccttcaccaacaccggcgccagcaccctggtgatcggcctggccagcacccaggcccagagcgtgcccgtgatcaacagcatgggcagcagcctgaccaccctgcagcccgtgcagttcagccagcccctgcaccccagctaccagcagcccctgatgccccccgtgcagagccacgtgacccagagccccttcatggccaccatggcccagctgcagagcccccacgccctgtacagccacaagcccgaggtggcccagtacacccacaccggcctgctgccccagaccatgctgatcaccgacaccaccaacctgagcgccctggccagcctgacccccaccaagcaggtgttcaccagcgacaccgaggccagcagcgagagcggcctgcacacccccgccagccaggccaccaccctgcacgtgcccagccaggaccccgccagcatccagcacctgcagcccgcccacagactgagcgccagccccaccgtgagcagcagcagcctggtgctgtaccagagcagcgacagcagcaacggccagagccacctgctgcccagcaaccacagcgtgatcgagaccttcatcagcacccagatggccagcagcagccagtag

SEQ ID NO: 12258 - DNA, 1719 bp, Artificial Sequence
  derived and/or modified sequence
atggtgagcaagctgagccagctgcagaccgagctgctggccgccctgctggagagcggcctgagcaaggaggccctgatccaggccctgggcgagcccggcccctacctgctggccggcgagggccccctggacaagggcgagagctgcggcggcggcagaggcgagctggccgagctgcccaacggcctgggcgagaccagaggcagcgaggacgagaccgacgacgacggcgaggacttcaccccccccatcctgaaggagctggagaacctgagccccgaggaggccgcccaccagaaggccgtggtggagaccctgctgcaggaggacccctggagagtggccaagatggtgaagagctacctgcagcagcacaacatcccccagagagaggtggtggacaccaccggcctgaaccagagccacctgagccagcacctgaacaagggcacccccatgaagacccagaagagagccgccctgtacacctggtacgtgagaaagcagagagaggtggcccagcagttcacccacgccggccagggcggcctgatcgaggagcccaccggcgacgagctgcccaccaagaagggcagaagaaacagattcaagtggggccccgccagccagcagatcctgttccaggcctacgagagacagaagaaccccagcaaggaggagagagagaccctggtggaggagtgcaacagagccgagtgcatccagagaggcgtgagccccagccaggcccagggcctgggcagcaacctggtgaccgaggtgagagtgtacaactggttcgccaacagaagaaaggaggaggccttcagacacaagctggccatggacacctacagcggccccccccccggccccggccccggccccgccctgcccgcccacagcagccccggcctgcccccccccgccctgagccccagcaaggtgcacggcgtgagatacggccagcccgccaccagcgagaccgccgaggtgcccagcagcagcggcggccccctggtgaccgtgagcacccccctgcaccaggtgagccccaccggcctggagcccagccacagcctgctgagcaccgaggccaagctggtgagcgccgccggcggccccctgccccccgtgagcaccctgaccgccctgcacagcctggagcagaccagccccggcctgaaccagcagccccagaacctgatcatggccagcctgcccggcgtgatgaccatcggccccggcgagcccgccagcctgggccccaccttcaccaacaccggcgccagcaccctggtgatcggcctggccagcacccaggcccagagcgtgcccgtgatcaacagcatgggcagcagcctgaccaccctgcagcccgtgcagttcagccagcccctgcaccccagctaccagcagcccctgatgccccccgtgcagagccacgtgacccagagccccttcatggccaccatggcccagctgcagagcccccacggcgagagacccgtgccccacaccgccggcgacgacgacagaggctggctgagcatggacgccggcgagagaggcgcctggcaggccctgcagagcgcctgcgtgagcggcaccagcgtgttcccctacagcagcaacggccagagccacctgctgcccagcaaccacagcgtgatcgagaccttcatcagcacccagatggccagcagcagccagtag

SEQ ID NO: 12259 - DNA, 1566 bp, Artificial Sequence
  derived and/or modified sequence
atggtgagcaagctgagccagctgcagaccgagctgctggccgccctgctggagagcggcctgagcaaggaggccctgatccaggccctgggcgagcccggcccctacctgctggccggcgagggccccctggacaagggcgagagctgcggcggcggcagaggcgagctggccgagctgcccaacggcctgggcgagaccagaggcagcgaggacgagaccgacgacgacggcgaggacttcaccccccccatcctgaaggagctggagaacctgagccccgaggaggccgcccaccagaaggccgtggtggagaccctgctgcaggaggacccctggagagtggccaagatggtgaagagctacctgcagcagcacaacatcccccagagagaggtggtggacaccaccggcctgaaccagagccacctgagccagcacctgaacaagggcacccccatgaagacccagaagagagccgccctgtacacctggtacgtgagaaagcagagagaggtggcccagcagttcacccacgccggccagggcggcctgatcgaggagcccaccggcgacgagctgcccaccaagaagggcagaagaaacagattcaagtggggccccgccagccagcagatcctgttccaggcctacgagagacagaagaaccccagcaaggaggagagagagaccctggtggaggagtgcaacagagccgagtgcatccagagaggcgtgagccccagccaggcccagggcctgggcagcaacctggtgaccgaggtgagagtgtacaactggttcgccaacagaagaaaggaggaggccttcagacacaagctggccatggacacctacagcggccccccccccggccccggccccggccccgccctgcccgcccacagcagccccggcctgcccccccccgccctgagccccagcaaggtgcacggcgtgagatacggccagcccgccaccagcgagaccgccgaggtgcccagcagcagcggcggccccctggtgaccgtgagcacccccctgcaccaggtgagccccaccggcctggagcccagccacagcctgctgagcaccgaggccaagctggtgagcgccgccggcggccccctgccccccgtgagcaccctgaccgccctgcacagcctggagcagaccagccccggcctgaaccagcagccccagaacctgatcatggccagcctgcccggcgtgatgaccatcggccccggcgagcccgccagcctgggccccaccttcaccaacaccggcgccagcaccctggtgatcggcaagctggtgggcatgggcggccacctgggcggcagactgatgggccagccccagaaccccggcgccggcagagccaccggcacccacagcttcatccaccagcacgtgttcatccagtgcctgctgtggaccagccactgcgccaccagcgtgatccccggcgacagcagcaacggccagagccacctgctgcccagcaaccacagcgtgatcgagaccttcatcagcacccagatggccagcagcagccagtag

SEQ ID NO: 12260 - DNA, 1572 bp, Artificial Sequence
  derived and/or modified sequence
atggtgagcaagctgagccagctgcagaccgagctgctggccgccctgctggagagcggcctgagcaaggaggccctgatccaggccctgggcgagcccggcccctacctgctggccggcgagggccccctggacaagggcgagagctgcggcggcggcagaggcgagctggccgagctgcccaacggcctgggcgagaccagaggcagcgaggacgagaccgacgacgacggcgaggacttcaccccccccatcctgaaggagctggagaacctgagccccgaggaggccgcccaccagaaggccgtggtggagaccctgctgcaggaggacccctggagagtggccaagatggtgaagagctacctgcagcagcacaacatcccccagagagaggtggtggacaccaccggcctgaaccagagccacctgagccagcacctgaacaagggcacccccatgaagacccagaagagagccgccctgtacacctggtacgtgagaaagcagagagaggtggcccagcagttcacccacgccggccagggcggcctgatcgaggagcccaccggcgacgagctgcccaccaagaagggcagaagaaacagattcaagtggggccccgccagccagcagatcctgttccaggcctacgagagacagaagaaccccagcaaggaggagagagagaccctggtggaggagtgcaacagagccgagtgcatccagagaggcgtgagccccagccaggcccagggcctgggcagcaacctggtgaccgaggtgagcgccgccggcggccccctgccccccgtgagcaccctgaccgccctgcacagcctggagcagaccagccccggcctgaaccagcagccccagaacctgatcatggccagcctgcccggcgtgatgaccatcggccccggcgagcccgccagcctgggccccaccttcaccaacaccggcgccagcaccctggtgatcggcctggccagcacccaggcccagagcgtgcccgtgatcaacagcatgggcagcagcctgaccaccctgcagcccgtgcagttcagccagcccctgcaccccagctaccagcagcccctgatgccccccgtgcagagccacgtgacccagagccccttcatggccaccatggcccagctgcagagcccccacgccctgtacagccacaagcccgaggtggcccagtacacccacaccggcctgctgccccagaccatgctgatcaccgacaccaccaacctgagcgccctggccagcctgacccccaccaagcaggtgttcaccagcgacaccgaggccagcagcgagagcggcctgcacacccccgccagccaggccaccaccctgcacgtgcccagccaggaccccgccagcatccagcacctgcagcccgcccacagactgagcgccagccccaccgtgagcagcagcagcctggtgctgtaccagagcagcgacagcagcaacggccagagccacctgctgcccagcaaccacagcgtgatcgagaccttcatcagcacccagatggccagcagcagccagtag

SEQ ID NO: 12261 - DNA, 1812 bp, Artificial Sequence
  derived and/or modified sequence
atggtgagcaagctgagccagctgcagaccgagctgctggccgccctgctggagagcggcctgagcaaggaggccctgatccaggccctgggcgagcccggcccctacctgctggccggcgagggccccctggacaagggcgagagctgcggcggcggcagaggcgagctggccgagctgcccaacggcctgggcgagaccagaggcagcgaggacgagaccgacgacgacggcgaggacttcaccccccccatcctgaaggagctggagaacctgagccccgaggaggccgcccaccagaaggccgtggtggagaccctgctgcaggaggacccctggagagtggccaagatggtgaagagctacctgcagcagcacaacatcccccagagagaggtggtggacaccaccggcctgaaccagagccacctgagccagcacctgaacaagggcacccccatgaagacccagaagagagccgccctgtacacctggtacgtgagaaagcagagagaggtggcccagcagttcacccacgccggccagggcggcctgatcgaggagcccaccggcgacgagctgcccaccaagaagggcagaagaaacagattcaagtggggccccgccagccagcagatcctgttccaggcctacgagagacagaagaaccccagcaaggaggagagagagaccctggtggaggagtgcaacagagccgagtgcatccagagaggcgtgagccccagccaggcccagggcctgggcagcaacctggtgaccgaggtgagagtgtacaactggttcgccaacagaagaaaggaggaggccttcagacacaagctggccatggacacctacagcggccccccccccggccccggccccggccccgccctgcccgcccacagcagccccggcctgcccccccccgccctgagccccagcaaggtgcacggcgtgagatacggccagcccgccaccagcgagaccgccgaggtgcccagcagcagcggcggccccctggtgaccgtgagcacccccctgcaccaggtgagccccaccggcctggagcccagccacagcctgctgagcaccgaggccaagctggtgagcgccgccggcggccccctgccccccgtgagcaccctgaccgccctgcacagcctggagcagaccagccccggcctgaaccagcagccccagaacctgatcatggccagcctgcccggcgtgatgaccatcggccccggcgagcccgccagcctgggccccaccttcaccaacaccggcgccagcaccctggtgatcggcctggccagcacccaggcccagagcgtgcccgtgatcaacagcatgggcagcagcctgaccaccctgcagcccgtgcagttcagccagcccctgcaccccagctaccagcagcccctgatgccccccgtgcagagccacgtgacccagagccccttcatggccaccatggcccagctgcagagcccccacgccctgtacagccacaagcccgaggtggcccagtacacccacaccggcctgctgccccagaccatgctgatcaccgacaccaccaacctgagcgccctggccagcctgacccccaccaagcaggtgttcaccagcgacaccgaggccagcagcgagagcggcctgcacacccccgccagccaggccaccaccctgcacgtgcccagccaggaccccgccagcatccagcacctgcagcccgcccacagactgagcgccagccccaccgtgagcagcagcagcctggtgctgtaccagagcctgggcctgtag

SEQ ID NO: 12262 - DNA, 837 bp, Artificial Sequence
  derived and/or modified sequence
atggtgagcaagctgagccagctgcagaccgagctgctggccgccctgctggagagcggcctgagcaaggaggccctgatccaggccctgggcgagcccggcccctacctgctggccggcgagggccccctggacaagggcgagagctgcggcggcggcagaggcgagctggccgagctgcccaacggcctgggcgagaccagaggcagcgaggacgagaccgacgacgacggcgaggacttcaccccccccatcctgaaggagctggagaacctgagccccgaggaggccgcccaccagaaggccgtggtggagaccctgctgcaggaggacccctggagagtggccaagatggtgaagagctacctgcagcagcacaacatcccccagagagaggtggtggacaccaccggcctgaaccagagccacctgagccagcacctgaacaagggcacccccatgaagacccagaagagagccgccctgtacacctggtacgtgagaaagcagagagaggtggcccagagaagaaacgccagcagagagggctgcccccaccacagacacagaggctgggcccccaccagcagcagaagatgcgtgagcaccaccggcctgcccaccggcgccaagaagaagcccagcggcaccagctggccctggaccagaaccgccggccccccccagggccaggccagagacctgagatgccccctgaccgcccccctggcctgcctgcacctgcccagcccccccgtgagaagcaccgtgtgcgccatggacagcctgagacccgtgagactgcagaagtacccccaggccgccgccgtgccctag

SEQ ID NO: 12263 - DNA, 360 bp, Artificial Sequence
  derived and/or modified sequence
atggtgagcaagctgagccagctgcagaccgagctgctggccgccctgctggagagcggcctgagcaaggaggccctgatccaggccctgggcgagcccggcccctacctgctggccggcgagggccccctggacaagggcgagagctgcggcggcggcagaggcgagctggccgagctgcccaacggcctgggcgagaccagaggcagcgaggacgagaccgacgacgacggcgaggacttcaccccccccatcctgaaggagctggagaacctgagccccgaggaggccgcccaccagaaggccgtggtggagaccctgctgcaggtgcacccctgcagagccggcagagccgactag

SEQ ID NO: 12264 - DNA, 744 bp, Artificial Sequence
  derived and/or modified sequence
atggtgagcaagctgagccagctgcagaccgagctgctggccgccctgctggagagcggcctgagcaaggaggccctgatccaggccctgggcgagcccggcccctacctgctggccggcgagggccccctggacaagggcgagagctgcggcggcggcagaggcgagctggccgagctgcccaacggcctgggcgagaccagaggcagcgaggacgagaccgacgacgacggcgaggacttcaccccccccatcctgaaggagctggagaacctgagccccgaggaggccgcccaccagaaggccgtggtggagaccctgctgcaggaggacccctggagagtggccaagatggtgaagagctacctgcagcagcacaacatcccccagagagaggtggtggacaccaccggcctgaaccagagccacctgagccagcacctgaacaagggcacccccatgaagacccagaagagagccgccctgtacacctggtacgtgagaaagcagagagaggtggcccagcagttcacccacgccggccagggcggcctgatcgaggagcccaccggcgacgagctgcccaccaagaagggcagaagaaacagattcaagtggggccccgccagccagcagatcctgttccaggcctacgagagacagaagaaccccagcaaggaggagagagagaccctggtggaggagtgcaacagatgcgccctgtggaccgcctgcgaccagtag

SEQ ID NO: 12265 - DNA, 1359 bp, Artificial Sequence
  derived and/or modified sequence
atggtgagcaagctgagccagctgcagaccgagctgctggccgccctgctggagagcggcctgagcaaggaggccctgatccaggccctgggcgagcccggcccctacctgctggccggcgagggccccctggacaagggcgagagctgcggcggcggcagaggcgagctggccgagctgcccaacggcctgggcgagaccagaggcagcgaggacgagaccgacgacgacggcgaggacttcaccccccccatcctgaaggagctggagaacctgagccccgaggaggccgcccaccagaaggccgtggtggagaccctgctgcaggaggacccctggagagtggccaagatggtgaagagctacctgcagcagcacaacatcccccagagagaggtggtggacaccaccggcctgaaccagagccacctgagccagcacctgaacaagggcacccccatgaagacccagaagagagccgccctgtacacctggtacgtgagaaagcagagagaggtggcccagcagttcacccacgccggccagggcggcctgatcgaggagcccaccggcgacgagctgcccaccaagaagggcagaagaaacagattcaagtggggccccgccagccagcagaccagccccggcctgaaccagcagccccagaacctgatcatggccagcctgcccggcgtgatgaccatcggccccggcgagcccgccagcctgggccccaccttcaccaacaccggcgccagcaccctggtgatcggcctggccagcacccaggcccagagcgtgcccgtgatcaacagcatgggcagcagcctgaccaccctgcagcccgtgcagttcagccagcccctgcaccccagctaccagcagcccctgatgccccccgtgcagagccacgtgacccagagccccttcatggccaccatggcccagctgcagagcccccacgccctgtacagccacaagcccgaggtggcccagtacacccacaccggcctgctgccccagaccatgctgatcaccgacaccaccaacctgagcgccctggccagcctgacccccaccaagcaggtgttcaccagcgacaccgaggccagcagcgagagcggcctgcacacccccgccagccaggccaccaccctgcacgtgcccagccaggaccccgccagcatccagcacctgcagcccgcccacagactgagcgccagccccaccgtgagcagcagcagcctggtgctgtaccagagcagcgacagcagcaacggccagagccacctgctgcccagcaaccacagcgtgatcgagaccttcatcagcacccagatggccagcagcagccagtag

SEQ ID NO: 12266 - DNA, 1212 bp, Artificial Sequence
  derived and/or modified sequence
atggtgaagagctacctgcagcagcacaacatcccccagagagaggtggtggacaccaccggcctgaaccagagccacctgagccagcacctgaacaagggcacccccatgaagacccagaagagagccgccctgtacacctggtacgtgagaaagcagagagaggtggcccagcagttcacccacgccggccagggcggcctgatcgaggagcccaccggcgacgagctgcccaccaagaagggcagaagaaacagattcaagtggggccccgccagccagcagatcctgttccaggcctacgagagacagaagaaccccagcaaggaggagagagagaccctggtggaggagtgcaacagagccgagtgcatccagagaggcgtgagccccagccaggcccagggcctgggcagcaacctggtgaccgaggtgagagtgtacaactggttcgccaacagaagaaaggaggaggccttcagacacaagctggccatggacacctacagcggccccccccccggccccggccccggccccgccctgcccgcccacagcagccccggcctgcccccccccgccctgagccccagcaaggtgcacggcgtgagatacggccagcccgccaccagcgagaccgccgaggtgcccagcagcagcggcggccccctggtgaccgtgagcacccccctgcaccaggtgagccccaccggcctggagcccagccacagcctgctgagcaccgaggccaagctggtgagcgccgccggcggccccctgccccccgtgagcaccctgaccgccctgcacagcctggagcagaccagccccggcctgaaccagcagccccagaacctgatcatggccagcctgcccggcgtgatgaccatcggccccggcgagcccgccagcctgggccccaccttcaccaacaccggcgccagcaccctggtgatcggcaagctggtgggcatgggcggccacctgggcggcagactgatgggccagccccagaaccccggcgccggcagagccaccggcacccacagcttcatccacaccacctgcatctaccccgtgcccaccctggaccagagcctgtgctacatcagcgacacctgggtgaaccagaccgaccagaacctgagcaacagcagcagagaggccggcaccaagcacaacaccagcatcctgtggtacctgagaagatag

SEQ ID NO: 12267 - DNA, 1185 bp, Artificial Sequence
  derived and/or modified sequence
atggtgagcaagctgagccagctgcagaccgagctgctggccgccctgctggagagcggcctgagcaaggaggccctgatccaggccctgggcgagcccggcccctacctgctggccggcgagggccccctggacaagggcgagagctgcggcggcggcagaggcgagctggccgagctgcccaacggcctgggcgagaccagaggcagcgaggacgagaccgacgacgacggcgaggacttcaccccccccatcctgaaggagctggagaacctgagccccgaggaggccgcccaccagaaggccgtggtggagaccctgctgcaggaggacccctggagagtggccaagatggtgaagagctacctgcagcagcacaacatcccccagagagaggtggtggacaccaccggcctgaaccagagccacctgagccagcacctgaacaagggcacccccatgaagacccagaagagagccgccctgtacacctggtacgtgagaaagcagagagaggtggcccagcagttcacccacgccggccagggcggcctgatcgaggagcccaccggcgacgagctgcccaccaagaagggcagaagaaacagattcaagtggggccccgccagccagcagatcctgttccaggcctacgagagacagaagaaccccagcaaggaggagagagagaccctggtggaggagtgcaacagagccgagtgcatccagagaggcgtgagccccagccaggcccagggcctgggcagcaacctggtgaccgaggtgagagtgtacaactggttcgccaacagaagaaaggaggaggccttcagacacaagctggccatggacacctacagcggccccccccccggccccggccccggccccgccctgcccgcccacagcagccccggcctgcccccccccgccctgagccccagcaaggtgcacggcgtgagatacggccagcccgccaccagcgagaccgccgaggtgcccagcagcagcggcggccccctggtgaccgtgagcacccccctgcaccaggtgagccccaccggcctggagcccagccacagcctgctgagcaccgaggccaagctggtgagcgccgccggcggccccctgccccccgccgcctgcagccagcccggcagagtggccagactgttcaacttctag

SEQ ID NO: 12268 - DNA, 1416 bp, Artificial Sequence
  derived and/or modified sequence
atggtgagcaagctgagccagctgcagaccgagctgctggccgccctgctggagagcggcctgagcaaggaggccctgatccaggccctgggcgagcccggcccctacctgctggccggcgagggccccctggacaagggcgagagctgcggcggcggcagaggcgagctggccgagctgcccaacggcctgggcgagaccagaggcagcgaggacgagaccgacgacgacggcgaggacttcaccccccccatcctgaaggagctggagaacctgagccccgaggaggccgcccaccagaaggccgtggtggagaccctgctgcaggaggacccctggagagtggccaagatggtgaagagctacctgcagcagcacaacatcccccagagagaggtggtggacaccaccggcctgaaccagagccacctgagccagcacctgaacaagggcacccccatgaagacccagaagagagccgccctgtacacctggtacgtgagaaagcagagagaggtggcccagcagttcacccacgccggccagggcggcctgatcgaggagcccaccggcgacgagctgcccaccaagaagggcagaagaaacagattcaagtggggccccgccagccagcagatcctgttccaggcctacgagagacagaagaaccccagcaaggaggagagagagaccctggtggaggagtgcaacagagccgagtgcatccagagaggcgtgagccccagccaggcccagggcctgggcagcaacctggtgaccgaggtgagagtgtacaactggttcgccaacagaagaaaggaggaggccttcagacacaagctggccatggacacctacagcggccccccccccggccccggccccggccccgccctgcccgcccacagcagccccggcctgcccccccccgccctgagccccagcaaggtgcacggcgtgagatacggccagcccgccaccagcgagaccgccgaggtgcccagcagcagcggcggccccctggtgaccgtgagcacccccctgcaccaggtgagccccaccggcctggagcccagccacagcctgctgagcaccgaggccaagctggtgagcgccgccggcggccccctgccccccgtgagcaccctgaccgccctgcacagcctggagcagaccagccccggcctgaaccagcagccccagaacctgatcatggccagcctgcccggcgtgatgaccatcggccccggcgagcccgccagcctgggccccaccttcaccaacaccggcgccagcaccctggtgatcggcctggccagcacccaggcccagagcgtgcccgtgatcaacagcatgggcagcagcctgaccaccctgcagcccgtgcagttcagccagcagggccccagcagctag

SEQ ID NO: 12269 - DNA, 1359 bp, Artificial Sequence
  derived and/or modified sequence
atggtgagcaagctgagccagctgcagaccgagctgctggccgccctgctggagagcggcctgagcaaggaggccctgatccaggccctgggcgagcccggcccctacctgctggccggcgagggccccctggacaagggcgagagctgcggcggcggcagaggcgagctggccgagctgcccaacggcctgggcgagaccagaggcagcgaggacgagaccgacgacgacggcgaggacttcaccccccccatcctgaaggagctggagaacctgagccccgaggaggccgcccaccagaaggccgtggtggagaccctgctgcaggaggacccctggagagtggccaagatggtgaagagctacctgcagcagcacaacatcccccagagagaggtggtggacaccaccggcctgaaccagagccacctgagccagcacctgaacaagggcacccccatgaagacccagaagagagccgccctgtacacctggtacgtgagaaagcagagagaggtggcccagcagttcacccacgccggccagggcggcctgatcgaggagcccaccggcgacgagctgcccaccaagaagggcagaagaaacagattcaagtggggccccgccagccagcagatcctgttccaggcctacgagagacagaagaaccccagcaaggaggagagagagaccctggtggaggagtgcaacagagccgagtgcatccagagaggcgtgagccccagccaggcccagggcctgggcagcaacctggtgaccgaggtgagagtgtacaactggttcgccaacagaagaaaggaggaggccttcagacacaagctggccatggacacctacagcggccccccccccggccccggccccggccccgccctgcccgcccacagcagccccggcctgcccccccccgccctgagccccagcaaggtgcacggcgtgagatacggccagcccgccaccagcgagaccgccgaggtgcccagcagcagcggcggccccctggtgaccgtgagcacccccctgcaccaggtgagccccaccggcctggagcccagccacagcctgctgagcaccgaggccaagctggtgagcgccgccggcggccccctgccccccgtgagcaccctgaccgccctgcacagcctggagcagaccagccccggcctgaaccagcagccccagaacctgatcatggccagcctgcccggcgtgatgaccatcggccccggcgagcccgccagcctgggccccaccttcaccaacaccggcgccagcaccctgcccctgttcggcgccggcgtggccgagctgaccagacagcagggccccagcagctag

SEQ ID NO: 12270 - DNA, 1071 bp, Artificial Sequence
  derived and/or modified sequence
tgatggctggtgggcttctggggcggcagcggctgcaaggagttcggcctgtgcctgcccgccggcagacagacccagcccaccagatggggcagaagactggcctggtggaccagagccgcctggccctgcggcagcagagccatggtgagcaagctgagccagctgcagaccgagctgctggccgccctgctggagagcggcctgagcaaggaggccctgatccaggccctgggcgagcccggcccctacctgctggccggcgagggccccctggacaagggcgagagctgcggcggcggcagaggcgagctggccgagctgcccaacggcctgggcgagaccagaggcagcgaggacgagaccgacgacgacggcgaggacttcaccccccccatcctgaaggagctggagaacctgagccccgaggaggccgcccaccagaaggccgtggtggagaccctgctgcaggaggacccctggagagtggccaagatggtgaagagctacctgcagcagcacaacatcccccagagagaggtggtggacaccaccggcctgaaccagagccacctgagccagcacctgaacaagggcacccccatgaagacccagaagagagccgccctgtacacctggtacgtgagaaagcagagagaggtggcccagcagttcacccacgccggccagggcggcctgatcgaggagcccaccggcgacgagctgcccaccaagaagggcagaagaaacagattcaagtggggccccgccagccagcagatcctgttccaggcctacgagagacagaagaaccccagcaaggaggagagagagaccctggtggaggagtgcaacagagccgagtgcatccagagaggcgtgagccccagccagccccagcccgccgagtacagaagccaggccggcctgagcagctggggccccccccccccctgccagcaccccgacagcaccgcccagctgggcgccgacatccccagaccccagcccgccgcccccgagccccaccacggcctgaccagctggggccacgaccacagagcctggtag

SEQ ID NO: 12271 - protein, 393 aa, Artificial Sequence [sequence omitted]

SEQ ID NO: 12272 - protein, 343 aa, Artificial Sequence
  derived and/or modified sequence
MEEPQSDPSVEPPLSQETFSDLWKLLPENNVLSPLPSQAMDDLMLSPDDIEQWFTEDPGPDEAPRMPEAAPPVAPAPAAPTPAAPAPAPSWPLSSSVPSQKTYQGSYGFRLGFLHSGTAKSVTCTYSPALNKMFCQLAKTCPVQLWVDSTPPPGTRVRAMAIYKQSQHMTEVVRRCPHHERCSDSDGLAPPQHLIRVEGNLRVEYLDDRNTFRHSVVVPYEPPEVGSDCTTIHYNYMCNSSCMGGMNRRPILTIITLEDSSGNLLGRNSFEVRVCACPGRDRRTEEENLRKKGEPHHELPPGSTKRALPNNTSSSPQPKKKPLDGEYFTLQKTFPARHGGSHL

SEQ ID NO: 12273 - protein, 382 aa, Artificial Sequence
  derived and/or modified sequence
MEEPQSDPSVEPPLSQETFSDLWKLLPENNVLSPLPSQAMDDLMLSPDDIEQWFTEDPGPDEAPRMPEAAPPVAPAPAAPTPAAPAPAPSWPLSSSVPSQKTYQGSYGFRLTCTYSPALNKMFCQLAKTCPVQLWVDSTPPPGTRVRAMAIYKQSQHMTEVVRRCPHHERCSDSDGLAPPQHLIRVEGNLRVEYLDDRNTFRHSVVVPYEPPEVGSDCTTIHYNYMCNSSCMGGMNRRPILTIITLEDSSGNLLGRNSFEVRVCACPGRDRRTEEENLRKKGEPHHELPPGSTKRALPNNTSSSPQPKKKPLDGEYFTLQIRGRERFEMFRELNEALELKDAQAGKEPGGSRAHSSHLKSKKGQSTSRHKKLMFKTEGPDSD

SEQ ID NO: 12274 - protein, 285 aa, Artificial Sequence
  derived and/or modified sequence
MEEPQSDPSVEPPLSQETFSDLWKLLPENNVLSPLPSQAMDDLMLSPDDIEQWFTEDPGPDEAPRMPEAAPPVAPAPAAPTPAAPAPAPSWPLSSSVPSQKTYQGSYGFRLGFLHSGTAKSVTCTYSPALNKMFCQLAKTCPVQLWVDSTPPPGTRVRAMAIYKQSQHMTEVVRRCPHHERCSDSDGLAPPQHLIRVEGNLRVEYLDDRNTFRHSVVVPYEPPEVGSDCTTIHYNYMCNSSCMGGMNRRPILTIITLEDSRPRQVDHLRSGVQDSLANIAKSHLY

SEQ ID NO: 12275 - protein, 90 aa, Artificial Sequence
  derived and/or modified sequence
MFCQLAKTCPVQLWVDSTPPPGTRVRAMAIYKQSQHMTEVVRRCPHHERCSDSDGLAPPQHLIRVEGNLRVEYLDDRNTFRHSVVSGRRG

SEQ ID NO: 12276 - protein, 128 aa, Artificial Sequence
  derived and/or modified sequence
MEEPQSDPSVEPPLSQETFSDLWKLLPENNVLSPLPSQAMDDLMLSPDDIEQWFTEDPGPDEAPRMPEAAPPVAPAPAAPTPAAPAPAPSWPLSSSVPSQKTYQGSYGFRLGFLHSGTAKSVTCTYSP

SEQ ID NO: 12277 - protein, 165 aa, Artificial Sequence
  derived and/or modified sequence
MEEPQSDPSVEPPLSQETFSDLWKLLPENNVLSPLPSQAMDDLMLSPDDIEQWFTEDPGPDEAPRMPEAAPPVAPAPAAPTPAAPAPAPSWPLSSSVPSQKTYQGSYGFRLGFLHSGTAKSVTCTYSPALNKMFCQLAKTCPVQLWVDSTPPPGTRVRAMAIYKQ

SEQ ID NO: 12278 - protein, 199 aa, Artificial Sequence
  derived and/or modified sequence
MFCQLAKTCPVQLWVDSTPPPGTRVRAMAIYKQSQHMTEVVRRCPHHERCSDSDGLAPPQHLIRVEGNLRVEYLDDRNTFRHSVVVPYEPPEVGSDCTTIHYNYMCNSSCMGGMNRRPILTIITLEDSSGNLLGRNSFEVRVCACPGRDRRTEEENLRKKGEPHHELPPGSTKRALPNNTSSSPQPKKKPLDGEYFTLQ

SEQ ID NO: 12279 - DNA, 2586 bp, Artificial Sequence
  derived and/or modified sequence
gattggggttttcccctcccatgtgctcaagactggcgctaaaagttttgagcttctcaaaagtctagagccaccgtccagggagcaggtagctgctgggctccggggacactttgcgttcgggctgggagcgtgctttccacgacggtgacacgcttccctggattggcagccagactgccttccgggtcactgccatggaggagccgcagtcagatcctagcgtcgagccccctctgagtcaggaaacattttcagacctatggaaactacttcctgaaaacaacgttctgtcccccttgccgtcccaagcaatggatgatttgatgctgtccccggacgatattgaacaatggttcactgaagacccaggtccagatgaagctcccagaatgccagaggctgctccccccgtggcccctgcaccagcagctcctacaccggcggcccctgcaccagccccctcctggcccctgtcatcttctgtcccttcccagaaaacctaccagggcagctacggtttccgtctgggcttcttgcattctgggacagccaagtctgtgacttgcacgtactcccctgccctcaacaagatgttttgccaactggccaagacctgccctgtgcagctgtgggttgattccacacccccgcccggcacccgcgtccgcgccatggccatctacaagcagtcacagcacatgacggaggttgtgaggcgctgcccccaccatgagcgctgctcagatagcgatggtctggcccctcctcagcatcttatccgagtggaaggaaatttgcgtgtggagtatttggatgacagaaacacttttcgacatagtgtggtggtgccctatgagccgcctgaggttggctctgactgtaccaccatccactacaactacatgtgtaacagttcctgcatgggcggcatgaaccggaggcccatcctcaccatcatcacactggaagactccagtggtaatctactgggacggaacagctttgaggtgcgtgtttgtgcctgtcctgggagagaccggcgcacagaggaagagaatctccgcaagaaaggggagcctcaccacgagctgcccccagggagcactaagcgagcactgcccaacaacaccagctcctctccccagccaaagaagaaaccactggatggagaatatttcacccttcagatccgtgggcgtgagcgcttcgagatgttccgagagctgaatgaggccttggaactcaaggatgcccaggctgggaaggagccaggggggagcagggctcactccagccacctgaagtccaaaaagggtcagtctacctcccgccataaaaaactcatgttcaagacagaagggcctgactcagactgacattctccacttcttgttccccactgacagcctcccacccccatctctccctcccctgccattttgggttttgggtctttgaacccttgcttgcaataggtgtgcgtcagaagcacccaggacttccatttgctttgtcccggggctccactgaacaagttggcctgcactggtgttttgttgtggggaggaggatggggagtaggacataccagcttagattttaaggtttttactgtgagggatgtttgggagatgtaagaaatgttcttgcagttaagggttagtttacaatcagccacattctaggtaggggcccacttcaccgtactaaccagggaagctgtccctcactgttgaattttctctaacttcaaggcccatatctgtgaaatgctggcatttgcacctacctcacagagtgcattgtgagggttaatgaaataatgtacatctggccttgaaaccaccttttattacatggggtctagaacttgacccccttgagggtgcttgttccctctccctgttggtcggtgggttggtagtttctacagttgggcagctggttaggtagagggagttgtcaagtctctgctggcccagccaaaccctgtctgacaacctcttggtgaaccttagtacctaaaaggaaatctcaccccatcccacaccctggaggatttcatctcttgtatatgatgatctggatccaccaagacttgttttatgctcagggtcaatttcttttttcttttttttttttttttttctttttctttgagactgggtctcgctttgttgcccaggctggagtggagtggcgtgatcttggcttactgcagcctttgcctccccggctcgagcagtcctgcctcagcctccggagtagctgggaccacaggttcatgccaccatggccagccaacttttgcatgttttgtagagatggggtctcacagtgttgcccaggctggtctcaaactcctgggctcaggcgatccacctgtctcagcctcccagagtgctgggattacaattgtgagccaccacgtccagctggaagggtcaacatcttttacattctgcaagcacatctgcattttcaccccacccttcccctccttctccctttttatatcccatttttatatcgatctcttattttacaataaaactttgctgccacctgtgtgtctgaggggtg

SEQ ID NO: 12280 - DNA, 1179 bp, Artificial Sequence
  derived and/or modified sequence
atggaggagccccagagcgaccccagcgtggagccccccctgagccaggagaccttcagcgacctgtggaagctgctgcccgagaacaacgtgctgagccccctgcccagccaggccatggacgacctgatgctgagccccgacgacatcgagcagtggttcaccgaggaccccggccccgacgaggccccccgcatgcccgaggccgccccccccgtggcccccgcccccgccgcccccacccccgccgcccccgcccccgcccccagctggcccctgagcagcagcgtgcccagccagaagacctaccagggcagctacggcttccgcctgggcttcctgcacagcggcaccgccaagagcgtgacctgcacctacagccccgccctgaacaagatgttctgccagctggccaagacctgccccgtgcagctgtgggtggacagcacccccccccccggcacccgcgtgcgcgccatggccatctacaagcagagccagcacatgaccgaggtggtgcgccgctgcccccaccacgagcgctgcagcgacagcgacggcctggcccccccccagcacctgatccgcgtggagggcaacctgcgcgtggagtacctggacgaccgcaacaccttccgccacagcgtggtggtgccctacgagccccccgaggtgggcagcgactgcaccaccatccactacaactacatgtgcaacagcagctgcatgggcggcatgaaccgccgccccatcctgaccatcatcaccctggaggacagcagcggcaacctgctgggccgcaacagcttcgaggtgcgcgtgtgcgcctgccccggccgcgaccgccgcaccgaggaggagaacctgcgcaagaagggcgagccccaccacgagctgccccccggcagcaccaagcgcgccctgcccaacaacaccagcagcagcccccagcccaagaagaagcccctggacggcgagtacttcaccctgcagatccgcggccgcgagcgcttcgagatgttccgcgagctgaacgaggccctggagctgaaggacgcccaggccggcaaggagcccggcggcagccgcgcccacagcagccacctgaagagcaagaagggccagagcaccagccgccacaagaagctgatgttcaagaccgagggccccgacagcgac

SEQ ID NO: 12281 - DNA, 1179 bp, Artificial Sequence
  derived and/or modified sequence
atggaagagccccaaagtgatcccagcgtggagccgcccctgtcgcaggaaacattttctgacctgtggaaactcctacctgagaacaacgtgctcagtcccctgcccagtcaagctatggacgatttaatgctgtcacccgacgacatagagcaatggttcacggaagatccgggacctgatgaagctcctcggatgccagaagcagctccaccagtcgcccctgctcccgccgcccctacccccgccgccccagcacccgccccctcatggcctctcagctcaagcgttccttctcagaaaacctaccagggcagctacggctttaggctcggctttctccatagcggcactgctaaaagcgttacgtgtacctacagtccggcactaaacaagatgttctgccagctcgccaagacctgtcccgtccaactgtgggtggattccacacctcctcctgggacacgagtgcgagctatggcgatctacaagcagtcccaacatatgacagaagtggtgcgtcgctgtcctcaccacgaacgatgctccgatagcgacggcttagcgcccccacaacacctcatcagggtagagggaaatctgagagtcgagtatttagacgataggaatacatttcggcatagcgtagttgttccatacgaacctcccgaggtgggtagcgactgtacgactatccactataactatatgtgcaactctagttgtatgggcggaatgaatagacgacctattctaacgatcataacacttgaggattcctctggtaacctcctgggtagaaactcctttgaggtcagggtgtgtgcatgtccgggacgggataggaggacagaagaggagaatctgcgcaagaagggtgagccacatcacgagctacctcctggatcaaccaagcgcgctctgccgaacaatacttcttccagcccgcagcccaaaaaaaagccccttgatggcgaatactttaccctccagataagaggaagagagaggtttgaaatgtttagagagctgaacgaggccctcgaactcaaggacgctcaggctggcaaagagccgggcggctctagagcccactccagccacctcaaaagcaagaagggacagtcaacatcccgccacaaaaaacttatgtttaaaacggaggggcccgattctgat

SEQ ID NO: 12282 - DNA, 1179 bp, Artificial Sequence
  derived and/or modified sequence
atggaagaaccgcaatcggatccgtcggtagaaccgccgttatcgcaagaaacgttttcggatttatggaaattattaccggaaaataatgttctatcgccgctaccgtcgcaagcgatggatgatttaatgttatcgccggatgatatagaacaatggtttacggaagatccgggtccggatgaagcgccgcgaatgccggaagcggcgccgccggtagcgccggcgccggcggcgccgacgccggcggcgccggcgccggcgccgtcgtggccgttatcgtcgtcggtaccgtcgcaaaaaacgtatcaaggttcgtatggttttcgactaggttttctacattcgggtacggcgaaatcggtaacgtgtacgtattcgccggcgttaaataaaatgttttgtcaattagcgaaaacgtgtccggtacaactatgggtagattcgacgccgccgccgggtacgcgtgtacgtgcgatggcgatatataaacaatcgcaacatatgacggaagttgttcgtcgttgtccgcatcatgaacgatgttcggattcggatggtctagcgccgccgcaacatttaatacgtgttgaaggtaatttacgtgtagaatatctagatgatcgtaatacgtttcgtcattcggtagtagtaccgtatgaaccgccggaagttggttcggattgtacgacgatacattataattatatgtgtaattcgtcgtgtatgggtggtatgaatcgtcgtccgatattaacgataataacgttagaagattcgtcgggtaatctactaggtcgtaattcgtttgaagttcgtgtatgtgcgtgtccgggtcgagatcgacgaacggaagaagaaaatctacgtaaaaaaggtgaaccgcatcatgaattaccgccgggttcgacgaaacgtgcgctaccgaataatacgtcgtcgtcgccgcaaccgaaaaaaaaaccgctagatggtgaatattttacgctacaaatacgaggtcgtgaacgttttgaaatgtttcgagaactaaatgaagcgttagaattaaaagatgcgcaagcgggtaaagaaccgggtggttcgcgtgcgcattcgtcgcatttaaaatcgaaaaaaggtcaatcgacgtcgcgacataaaaaactaatgtttaaaacggaaggtccggattcggat

SEQ ID NO: 12283 - DNA, 1179 bp, Artificial Sequence
  derived and/or modified sequence
atggaggagccacaatccgatccaagtgtggagcctcctctgagccaggagaccttcagtgacctctggaagctgctccccgaaaataacgttctgagccctctgcctagccaggccatggacgatctcatgctaagccctgacgacatcgagcagtggtttactgaggacccgggacctgatgaggccccacggatgccggaggctgcgccgccagtagcgcccgcacctgccgctcccacaccagccgcccccgcccccgctccttcttggcccctcagcagctccgtgccgagccagaagacgtaccagggcagttatggcttcagacttgggttcctgcatagcgggaccgcaaagagcgttacctgcacatattccccagccctaaacaaaatgttctgccagcttgcgaagacctgccccgtgcaactgtgggttgatagcactccgccgcctggaacccgcgttagagccatggccatctacaaacagagccagcacatgaccgaggtcgtgcgcaggtgtccccatcacgaaagatgctccgacagtgacggcctcgcccccccacagcatctgattcgggtcgaaggaaatctgcgcgtcgaatatctcgatgacagaaatacttttagacattctgttgtagtgccttacgagccccccgaagtaggctcagactgcaccacgattcattataactacatgtgcaactcatcgtgtatgggtggaatgaacagaaggccgatcctgaccattatcaccctggaggatagttccgggaacttgttagggcgaaatagctttgaggtcagggtctgtgcatgtcctgggagggaccgtcgtacagaggaggagaatctcagaaaaaaaggtgagcctcaccatgagctgccgccaggcagcactaaacgggcacttccaaacaatacatcctccagcccgcagcccaaaaaaaagcctctggatggcgaatactttaccctgcagataagaggaagggagcgattcgagatgtttcgcgagctcaacgaagctctggagctgaaagacgctcaggccggaaaggagccggggggttcccgggcacacagttctcatctgaaatccaaaaaggggcagtctacctcccggcacaagaaattgatgttcaaaaccgagggtccggattcagat

SEQ ID NO: 12284 - DNA, 1179 bp, Artificial Sequence
  derived and/or modified sequence
atggaagaaccccaaagtgaccctagtgtggagcctcccctctcacaggagaccttctcagatctgtggaaactgttgccagagaacaatgtgctgagccctctaccaagccaggccatggatgatttgatgttgtccccagacgacatcgagcaatggtttaccgaggatcccgggccagacgaggcgcctcgcatgcctgaagccgcaccccccgtggccccggctccagcagcgcccacccctgctgccccagctcctgccccttcatggccactctctagcagcgttccctcccagaagacatatcagggctcttatggctttcgactcggctttctgcacagcggcaccgctaagtctgtgacctgcacatacagccctgccttaaacaagatgttctgccagctggctaaaacgtgccccgtccagctgtgggttgactccacaccgcctcctggaactcgggttcgagcaatggccatctataaacagtcccagcacatgactgaggtggtgcggcgctgtcctcaccatgagcggtgtagtgactcagacggactggcgccaccgcaacatctcattcgagttgagggaaacctcagggttgagtacctggatgatagaaacaccttccgccattccgtggttgttccatacgagccccctgaagttggatcggactgcacgactatccattacaactacatgtgcaactcctcgtgtatgggtgggatgaatcggaggcccatcctaaccattataaccctcgaggactcatcaggtaatctcctgggtagaaactcctttgaggtccgggtctgcgcctgccctggaagagaccgacgcacagaggaggagaacctgcgcaaaaaaggagagcctcaccacgagctgcccccgggctccaccaaacgagcacttcccaataacacgtcctcatccccccagcccaagaagaaaccactagacggggaatactttacgctccagattagaggacgggaacgctttgagatgttccgcgagctcaacgaggccttagaactgaaggatgcacaggcaggcaaagagcctggaggctccagggctcattcatcacacctgaaatcaaagaaggggcagagtaccagccggcataagaagctgatgttcaagaccgagggtcctgactctgac

SEQ ID NO: 12285 - DNA, 1179 bp, Artificial Sequence
  derived and/or modified sequence
atggaggagccgcagtcagacccaagcgtggaaccgccgctgtcgcaggaaaccttctcggatctgtggaaactgctcccagaaaacaatgtgttgtcaccgctgccctcacaagcaatggacgacttgatgctgtcccctgacgacatcgaacagtggtttactgaagatcctggtcctgatgaggcaccaagaatgcctgaggccgctcccccagtcgcgcccgcccctgcagcgccgactccggccgcgccagccccggccccatcttggccacttagctcctccgtgccgtcgcaaaaaacctaccagggatcatacggtttcaggctcggctttctgcattcgggaacggccaaaagcgtgacctgcacttacagcccggcgctgaacaaaatgttttgtcaacttgcgaaaacttgcccggttcagttgtgggtggactccacccctcctccgggcactagagtgagagcaatggccatctataagcagtcgcagcacatgactgaggtcgtgcggcggtgcccacatcacgaaaggtgctcggactcggacgggctcgccccgccgcagcacctgatccgcgtggaaggcaaccttagggtcgagtacctcgatgatagaaataccttccggcattccgtcgtggtcccgtacgagcctcccgaagtcggatcggattgtaccaccatccattacaactatatgtgtaatagcagctgcatgggtggcatgaaccgccgcccgattctgaccatcatcaccttggaggattcatcaggaaatcttctgggcagaaactccttcgaagtcagagtgtgcgcttgccctggacgggacagacgtactgaagaggaaaatctgcgcaagaaaggggagccacatcacgagctgccgccggggtcaacgaaacgcgcacttccgaacaacacttcttcaagcccccagcccaagaagaaaccgcttgacggcgagtacttcactctgcaaattagagggcgcgagaggttcgaaatgttccgggagctgaacgaagcactggagctgaaggatgcgcaggccggaaaagaaccgggcggtagccgcgctcattcatctcacctgaagtcgaagaaggggcaatcgacttcgaggcacaagaagctgatgttcaagacggagggcccggattccgac

SEQ ID NO: 12286 - DNA, 1179 bp, Artificial Sequence
  derived and/or modified sequence
atggaagagccccagtcggatccttcggtcgaaccccctctctcgcaagaaactttcagcgatctctggaaacttcttcctgaaaacaatgtgctgagcccactcccaagccaggctatggatgatcttatgctttcgcccgacgacatcgaacaatggttcacggaagatcctgggcctgatgaggcacccaggatgcctgaggccgcacctccagtcgcaccagcaccagcagcgcctacgcccgctgcaccagcccctgctccttcctggccactgtcaagctccgtgcccagccaaaaaacttatcagggttcctacggattcagactgggttttctgcattcgggaaccgcgaagtctgtcacttgcacctacagccccgccctcaacaagatgttttgtcagctggcaaagacctgcccagtgcaactctgggtggattccaccccaccacctggaaccagggtcagagcaatggcaatttacaagcagagccaacatatgaccgaagtggtgagaagatgcccacatcacgaacggtgttcagactcagatgggctggccccacctcaacacctgattcgcgtcgaaggcaatttgagggtggaataccttgacgacagaaacaccttccgtcattcggtggtcgtcccttacgagcctcctgaggtgggtagcgactgtacgaccattcactacaactacatgtgtaattcctcttgtatgggtggaatgaatagacggccaatccttactatcattacgcttgaagattcgtcaggtaaccttctcggtagaaattcgtttgaagtgagagtgtgtgcctgcccaggtagagataggcgcactgaagaggaaaatcttaggaagaagggtgaaccgcatcatgaattgccacctgggtccactaagagagcactgcctaacaacactagctcctcaccacaacctaagaaaaagcccttggacggtgaatactttaccctccagattcgaggaagggaaagatttgaaatgttccgggaattgaacgaagccctcgaactcaaagacgcccaagcaggtaaagaaccagggggatcaagagcgcatagctcgcatctgaaatcgaagaaggggcagtcgaccagccggcacaagaagctgatgtttaagacggagggtccagattcagat

SEQ ID NO: 12287 - DNA, 1179 bp, Artificial Sequence
  derived and/or modified sequence
atggaagaaccacaatccgatccttccgtggagccacccctgtcacaggagacgttctcagatctctggaaacttctcccggagaataatgtcctcagcccactgcctagccaggccatggacgatttgatgctttcccccgatgatattgagcaatggttcactgaagatcctgggccggatgaagcgcctcgcatgccagaagccgcgccaccagtggcacctgcaccagcagcaccaactcccgcggcaccagcgccagccccctcgtggcccctttcttcgtcggtcccatcgcaaaagacctaccagggttcgtacggcttcaggctgggtttcctgcattccggtaccgctaaatcggtgacctgtacgtactcacccgctcttaacaagatgttttgtcagcttgcaaagacttgtccggtgcaactttgggtggattccacccctccaccgggcactagggtgcgcgccatggcgatttacaaacaaagtcagcacatgactgaggtggtccggcgctgtccccatcacgagagatgctcggactccgacggacttgcgcctccacagcatctgatccgggttgagggcaacttgcgggtcgaataccttgacgacagaaacaccttccggcattccgtggtcgtcccctacgagcctcccgaggtaggatccgattgtactaccattcattacaactacatgtgcaactcgagctgtatgggagggatgaatcggcggccgatactgactattatcaccctcgaggattcgagcgggaacctccttggtcgtaattcctttgaggtgagagtgtgcgcatgtcccggacgtgatcgccgtaccgaagaagaaaacctgagaaaaaagggagaacctcatcatgaattgcctcctgggagcaccaagagagccctgccaaataacacttcctcatccccgcagcctaaaaagaagccacttgatggtgaatacttcacgcttcaaattagagggcgcgaaagatttgaaatgttcagggaacttaacgaggcattggaactgaaggatgcacaagccggtaaggaacccggtggaagtcgggcgcacagctcacatctgaagagcaagaagggacaatctacctcacgccacaagaaacttatgttcaaaacggaaggtcccgactcggat

SEQ ID NO: 12288 - DNA, 1179 bp, Artificial Sequence
  derived and/or modified sequence
atggaggaacctcagtccgatccatccgtcgaaccccccctttcacaagagacgttctccgacctttggaagttattacccgaaaataacgtactgtcccctttaccatcacaagctatggacgacctgatgctcagtcctgacgatattgaacagtggttcacagaagaccccgggccagacgaggcccctcgaatgccagaggcagcccctccggttgcccctgctcctgctgccccaaccccggccgccccggcccctgccccttcctggccgctttctagcagcgtgcctagccagaaaacttaccagggaagctatggctttcgactaggtttcctccactctggaacagctaagagtgtcacttgtacgtatagcccagctttgaacaagatgttctgtcagctagcaaaaacatgccccgttcagctgtgggttgactccacccccccgcctgggacccgcgtgcgggccatggcaatttacaaacagtcccagcacatgacagaagtcgtaagacgatgtccacatcacgaacgctgctctgacagtgacggccttgctccaccccagcacttgatccgggtggagggcaacttgcgtgttgagtacctagatgacagaaacacgttcagacacagcgttgtcgtgccctacgaaccccctgaggtagggtccgattgcacaactattcactacaattatatgtgtaatagttcttgcatgggcggaatgaataggcgtcctatcttaacaatcattaccctggaggattcgtcaggcaatcttcttggccggaattcattcgaggttcgggtctgtgcatgtccgggcagggacaggcggacagaagaagaaaatctgagaaagaagggtgagccccaccacgagctgccacctgggagcaccaagagggcactccccaacaatactagctcctctccacaacctaagaagaaacctctggatggcgaatattttactctgcaaatcagggggagggagagattcgaaatgtttcgcgaattgaatgaggcgctggaacttaaagacgcccaggccggtaaggaaccagggggaagccgggctcacagctctcacctgaaaagtaagaaaggacaatcaaccagcaggcacaaaaaactcatgttcaaaactgaggggccggacagcgat

SEQ ID NO: 12289 - DNA, 1179 bp, Artificial Sequence
  derived and/or modified sequence
atggaggagccgcagtccgaccccagcgtcgagcctcctttgtcgcaggaaacctttagcgatctgtggaaactcctgccggagaacaatgtgttgtccccattgccatcccaggcaatggatgacctgatgctctcgccggacgacattgaacaatggttcactgaagatcctgggcctgatgaggcgccacgcatgccggaagccgccccgccggtcgcgccagcgcctgccgcgccgactccggccgccccagcacctgccccgtcctggccactcagcagctcggtgccgtcgcaaaaaacctaccagggatcatacgggtttcggcttggcttcttgcattccggaaccgcgaagtcagtcacgtgcacttacagcccggcactgaacaaaatgttctgccagctggctaagacttgccccgttcaactgtgggtggattccactccgccgccaggcactagagtgcgcgccatggctatctacaaacaatcccaacacatgactgaggtggttagacgctgcccacatcatgaaagatgcagcgactccgatggactcgccccgccacagcatctgatccgcgtggagggaaacctgagagtggaatatctggacgaccggaataccttccgccactcagtggtggtgccatacgaaccgccagaggtcggatcggactgtaccactattcactacaactacatgtgcaacagctcctgcatgggcggaatgaaccgcaggccaattctcaccattatcactctggaggactccagcggtaacctgctgggacgcaactcgttcgaggtccgcgtttgcgcatgccccggacgcgatcggagaaccgaagaggagaatctgcgcaagaaaggagaaccacatcacgagctgccaccgggatccaccaagagagcccttccaaacaacacttcctcgtcgcctcaaccaaagaagaaaccactggacggcgaatactttaccctccaaatcagggggcgggaaaggtttgaaatgttccgcgaactgaatgaggcactggaactcaaggatgcgcaagctggtaaggagcctggaggatcccgcgcacattcgtcccacctcaagtccaaaaagggacaatcaaccagcagacataagaagctcatgtttaagacggagggcccggattctgac

SEQ ID NO: 12290 - DNA, 1179 bp, Artificial Sequence
  derived and/or modified sequence
atggaagagcctcaaagcgatccttccgtcgaacctccactgtcacaggaaaccttcagcgatctctggaaactgcttccagaaaacaatgtgctttccccactcccttcacaggcaatggatgaccttatgctgtcacctgacgatatcgagcaatggttcactgaggaccctggacctgatgaagcaccaaggatgcctgaggcagccccaccagtggcaccggcaccggcggcacctaccccggccgccccagcacctgcaccttcgtggccgctttcatcctctgtgccatcccaaaaaacctaccaggggtcgtacggatttagactgggcttcctgcattcgggcaccgccaagtcagttacttgtacgtactcccccgcactgaataagatgttctgtcaattggccaagacttgccctgtccaactctgggtggactcgactcctccccctggaacgagagtgcgagccatggcaatctacaagcagtcacaacacatgaccgaagtggttcgccgctgtcctcatcatgaaaggtgctccgatagtgatggtctggcacccccgcaacatctgatccgcgtcgaaggaaacctgagagttgagtacctcgatgatagaaacactttcagacactcggtggtcgtcccttacgaaccaccagaagtcggatcggactgtactacgattcattacaactacatgtgtaacagctcgtgtatgggaggtatgaatagaaggcccattcttaccataatcaccttggaggactcatcgggaaacctgctcgggcgtaactcgtttgaggtgcgcgtgtgcgcatgtcctggacgtgatcgcagaaccgaggaggaaaatcttagaaagaagggtgagccacatcatgaattgccaccagggagcactaagcgagcacttccaaacaatacctccagctctccgcagccaaagaagaagcctctggatggagagtacttcactttgcagattagaggaagagagcgattcgaaatgtttagggagcttaacgaagcactggaactgaaggatgcgcaagcaggcaaagaaccaggaggttctcgcgcccattcgagccacttgaaatccaagaagggccaatcgacttccaggcacaaaaagctcatgtttaagaccgaggggccagactcggat

SEQ ID NO: 12291 - DNA, 1179 bp, Artificial Sequence
  derived and/or modified sequence
atggaagagccgcagtccgacccgagcgtcgaaccaccactctcgcaggaaaccttctcggacttgtggaagctcctcccagaaaacaacgtcctctccccactcccttcccaggcaatggacgacctgatgttgtccccagatgatattgagcagtggttcaccgaagatccaggcccagacgaggcgccgaggatgcctgaggcagccccaccagtggccccagcgccagccgcacctactcctgccgcccccgctcctgccccgtcatggccgctgtcctcctcagtgccgagccaaaagacgtaccaaggctcatacgggttccgcctcggattcctccatagcggaacggccaagtcggtgacttgtacctactcaccggctctgaataagatgttttgccagctcgcgaaaacttgcccggtgcagctgtgggtcgacagcacccctcctccaggcactagagtgcgcgccatggccatttacaagcagtcccagcatatgactgaagtggtgcgcaggtgcccacaccatgaacggtgtagcgattcagatggactggccccacctcaacacctcatccgcgtggaaggtaatttgcgcgtggagtacctggatgaccggaacaccttccggcactcggtggtggtgccgtacgaaccaccagaagttggatccgactgcactaccatccattacaactacatgtgcaattcgtcgtgcatgggagggatgaaccggaggccgatcctcactatcatcaccctggaggactcctcgggtaacctgctcggccggaactcgttcgaggtgcgcgtgtgcgcttgtccgggaagggaccggcgcacggaggaggagaacctgcggaagaaaggagaaccacatcacgagctgcccccggggagcaccaagagagctctgccgaacaatacgtcctcgtcgccacagcctaagaagaagccgctggacggagagtacttcactcttcaaatccgcggaagggagcgcttcgagatgttcagagagctcaacgaggccctggagctgaaggacgcacaggctggtaaagagccgggcggaagccgggcacactcatcacaccttaagtccaagaagggccagtcaacttccagacacaaaaagttgatgttcaagaccgaaggcccggattctgac

SEQ ID NO: 12292 - DNA, 1179 bp, Artificial Sequence
  derived and/or modified sequence
atggaggaaccacaaagtgacccctccgtagagccccccctgagtcaagagacgttctccgacctgtggaaactgctgcccgagaataacgtgcttagtccgcttccaagccaggccatggatgatctgatgttaagccccgacgacatcgaacagtggttcaccgaggatccggggccggatgaagcacctcgaatgccagaagctgccccaccagtcgctcccgctccagctgcacccactcctgctgctccagcccccgctcctagctggccactgtcctcatccgtgccgtcccaaaaaacgtaccaggggtcgtacgggttcaggctgggctttctgcactccggcacagcgaagtccgtcacttgtacttacagtcctgccctgaataagatgttctgtcagctggcaaaaacttgtcccgtccagctgtgggtagatagcaccccaccaccgggcacaagagtgagggccatggcaatctacaaacagagccagcacatgaccgaagtggttcgccggtgcccacaccatgagcggtgcagcgactccgatggcctagcacctcctcaacacttgatccgcgtggaaggcaacttaagggttgaatacctggacgataggaacactttccgacatagcgttgttgtgccctatgagccgccagaggtaggcagcgactgcactacgattcattacaactacatgtgcaactcttcctgtatgggcggtatgaaccggcgcccgattctcaccatcatcaccttggaggactcatccgggaatctgcttgggcgaaattccttcgaagtcagggtgtgtgcctgtcccggacgcgatcgccgaacagaggaggaaaacctcaggaagaagggcgaacctcatcacgagctccctcctgggtccacaaaaagagccctgcccaataataccagcagctctccgcagcctaagaagaaacctctcgacggcgaatatttcactctgcagattaggggccgagagcggttcgaaatgttccgcgagctcaacgaggccctcgagctgaaagacgcccaagcaggcaaagagcccggcgggtctagggctcattccagccatctcaagtcaaagaagggtcagtccacgtctaggcataagaaactgatgtttaagaccgaagggcccgactcggac

SEQ ID NO: 12293 - DNA, 1179 bp, Artificial Sequence
  derived and/or modified sequence
atggaagaaccccagtctgaccctagcgtggagcctcctctctcccaggagacattttcggacctgtggaaattattacctgaaaacaacgtgctgagcccactcccatctcaggctatggatgatctgatgctaagtccggacgacattgaacaatggttcaccgaggaccccggtcctgacgaagccccacgtatgcctgaggccgctccgccagttgccccagccccagccgccccaacgcccgctgctccggctccagccccttcatggccattgagctcctctgtcccgtcgcaaaagacatatcaaggatcttacggctttcggttaggttttctgcactccggaacagcaaagtcagttacctgcacctattctcccgctttaaacaagatgttttgccagcttgctaagacatgccctgtgcaactgtgggttgatagtactcctcccccaggcacgcgggtgcgggccatggccatctacaaacagagccagcatatgactgaggtagttagaaggtgcccacaccatgagaggtgtagcgactctgatggactggcgcctccccagcacctcataagagtggagggtaaccttcgggtggagtacctggacgataggaatacatttagacacagcgtggtggtcccgtatgaaccaccggaggttgggtctgattgcaccacaattcattataattatatgtgcaactccagctgtatgggagggatgaacagacggccaatactgaccatcatcacactggaggacagcagtggaaatctgctcgggagaaacagcttcgaggttagggtctgcgcttgccctggcagggacagacggacagaggaagaaaacctgcgcaaaaaaggggagccccatcatgaattacccccaggctcgaccaaaagggctctgccaaataatacatccagcagtccacaaccaaagaagaaacctttggatggcgagtatttcacacttcagatcaggggccgtgagagattcgagatgttccgtgagctgaacgaggctctcgagctgaaagacgcccaggcaggtaaagaaccagggggttcgagagcacattcttcccacctgaagagcaaaaaaggccagtcgacatcccgacacaagaagctgatgtttaaaaccgagggcccagattctgac

SEQ ID NO: 12294 - DNA, 1179 bp, Artificial Sequence
  derived and/or modified sequence
atggaagaaccacaaagtgaccctagtgttgaacctccgctgagccaggaaacattttctgacctgtggaaattattacctgaaaataatgtgttatcaccgttaccatcacaggcgatggacgacctaatgctctctccggacgacatcgagcaatggtttaccgaagatcctggtccggacgaggctccgcgcatgccggaagccgcgccccctgtagctccggcgcctgcagcgcccacacctgctgctcccgcccctgcgcctagctggcctttatcatcctcagtcccgtcacaaaaaacgtaccaaggtagctatggatttcgcttaggatttctccactcagggacggccaagtctgtaacctgcacgtactccccggccctgaacaagatgttctgtcaactggctaagacatgcccggttcagctgtgggtagattcgactcccccgcctggaacaagggtgagagccatggcgatctacaaacagtcccaacatatgacagaagtagtgcgacgctgtccccaccacgagagatgctccgacagtgatgggctcgctccaccgcaacacttgattcgggtggagggtaaccttagagtagaatacctagatgatcgtaatacctttaggcattccgtcgttgttccttatgaaccaccggaagtgggttctgattgtactacgatacattataattatatgtgtaattcgtcttgcatgggggggatgaatcgtagaccgatccttacaattattacattggaagatagctcaggaaacctgttgggccgcaactcattcgaagttcgggtgtgtgcctgtcctggaagggatcgacggacagaagaagaaaatttgagaaagaaaggggaaccacatcatgaattgccgcctggctctacgaaacgagcactgcctaataacacgagcagttccccccagccaaagaagaaacctctagatggtgagtactttacactgcagattcgaggccgagaaagatttgaaatgtttcgagagctgaacgaagcattggaacttaaagacgcacaagccgggaaggaaccgggcggtagtcgtgcccacagctcacacctgaagtccaaaaaaggccaatccactagccgccataaaaaactgatgttcaaaacagagggcccggactcagat

SEQ ID NO: 12295 - DNA, 1179 bp, Artificial Sequence
  derived and/or modified sequence
atggaggaacctcagtctgacccatccgtggagccccccctcagccaagaaaccttctctgacctttggaaactgctgccagaaaacaacgtcctgtcccctctccccagtcaggccatggacgacctcatgctgagtccagacgacatcgagcaatggttcactgaagatccaggacctgatgaggctcctaggatgcccgaggcagccccccccgttgctcccgctcctgcagctccaacaccagccgctccagcacccgccccttcttggcccctttcaagcagcgtgccttcacaaaaaacctatcagggttcctacggattccgcttgggcttcctccactcaggaaccgcaaagtccgtaacctgtacatactcacccgctctgaataaaatgttctgccagttggcaaaaacctgtccagtacagctgtgggtggattcaacaccacctcctggtacaagggttcgtgcaatggcaatctacaagcagagccagcacatgacagaagtggtaaggaggtgcccccaccacgagcgctgcagtgactcagatggtctcgcccctccccagcacctgatccgtgtcgagggcaacctgagagttgaatacctggacgatcgcaacactttcaggcactctgtggtcgtgccttacgagcctcccgaggtgggaagtgactgcaccacaatccactacaactacatgtgcaactcctcctgcatgggtggtatgaatagaagaccaatcctgacaatcattactctggaggacagctccggaaacctgcttggaaggaacagtttcgaagtccgtgtctgcgcctgccctggtcgcgacagaagaaccgaagaagagaacctgaggaagaaaggagaaccccatcatgagttgccacccggttccacaaaaagagccctccctaacaacacctcttcctcaccccagcctaaaaagaagccacttgatggcgagtacttcactcttcagatcaggggccgcgaaaggttcgaaatgttcagagaacttaatgaagcccttgaactgaaggacgcccaggccggtaaggaacctggcggctccagagcacactcaagtcacttgaagtctaagaaaggacaaagtacttcacgtcataagaagctcatgttcaagaccgaaggacccgatagcgac

SEQ ID NO: 12296 - DNA, 1179 bp, Artificial Sequence
  derived and/or modified sequence
atggaggagccacaatccgacccgtccgtggaacctccgctctcgcaagaaaccttttccgatctgtggaagctccttcccgagaacaacgtcctgagcccacttccatcgcaggcaatggacgatctgatgctttcgcctgatgacatcgagcagtggtttacggaagatcctggaccggacgaagcgcccagaatgcccgaagcagccccacctgtggcccctgcgccggccgcgcctacccctgcagcccctgcaccggcacccagctggccactgtcgtcgtccgtgccgtcgcaaaaaacctaccaggggtcgtacgggtttagactgggttttctccatagcggaactgctaagagcgtcacttgtacttactccccagcgcttaacaagatgttttgtcaactggccaagacttgcccggtccaactctgggtggattccactccgcctccaggaacccgcgtgcgtgcaatggctatttacaaacagtctcaacacatgactgaggtggtgcgtagatgtccacatcatgagcgttgttcagattccgatggcctcgcaccaccccaacatcttattcgggtggaaggcaatctccgggttgaatacctcgacgatcgcaacactttcagacattcggtggtcgtgccttacgagccaccagaggtcggtagcgattgtactaccatccactacaactacatgtgtaactccagctgtatgggaggaatgaaccgcagacctatcctgaccattatcaccctggaggactcatcgggaaatttgctgggtaggaattcgtttgaggtcagggtgtgtgcatgccccggaagagatagacgaaccgaagaggaaaatctcaggaaaaaaggagaaccgcaccatgaacttccacctggatcaacgaagcgcgctttgcctaataacacttccagcagcccccaaccgaagaaaaagcccctggatggagagtactttacgctgcagattagggggcgcgagagatttgaaatgttcagggagcttaacgaggccctcgagctgaaggacgctcaagccggaaaggaacccggtggatcaagagcacatagctcgcatctgaagtcgaagaaaggacaaagcaccagccgacacaaaaagctgatgttcaaaacggaaggcccagactcagat

SEQ ID NO: 12297 - DNA, 1179 bp, Artificial Sequence
  derived and/or modified sequence
atggaggaaccacaatcagacccctcagtggagcccccccttagccaggagaccttctctgacctgtggaaactgctcccagaaaacaacgtgctgtctcccttgccaagtcaggccatggacgatcttatgctttctcctgatgacatcgaacaatggttcacggaggaccccggaccagatgaggcgccccggatgcccgaagctgcaccgcctgtggcacctgcacccgcagcgcctacaccagcagcccctgccccagcaccgagctggccattatccagctcagtccctagccagaagacataccagggttcttatggattccgtctcggcttccttcacagtgggactgcgaagtccgtgacttgcacctatagtccggccctgaataagatgttctgccaactggcgaaaacttgccccgtgcagttgtgggttgactctactccgcccccaggaacacgggtaagggctatggccatatacaaacagagtcagcacatgactgaggttgtccgccgctgcccccaccacgaacgatgttccgattctgacgggctggctcctccacagcacttgattcgtgtggagggcaatctgagggtggaatacctcgatgacaggaacaccttcaggcactctgttgtcgtaccgtatgaaccacccgaagtggggtctgactgtacaacaattcattacaattacatgtgtaattcaagctgcatgggagggatgaataggcggccaattcttaccatcattacgttggaggacagcagcggcaacctgctggggcggaactcgtttgaggtgagggtgtgcgcgtgccccggccgcgataggagaactgaagaagagaatttgcgaaagaagggggagccccatcacgaactgccccccgggtcgactaagagagcattacccaacaatacgagttcatctccacagccaaaaaagaagcccctcgatggcgagtactttacactgcagatccggggtagggagaggtttgagatgtttcgggagctcaatgaagctttggagctgaaagacgcacaggcagggaaagaacccggcggatcacgtgcccatagctcccatctgaaatccaaaaaggggcagtctacaagccgccacaaaaagctcatgttcaagacggaaggccctgattccgac

SEQ ID NO: 12298 - DNA, 1179 bp, Artificial Sequence
  derived and/or modified sequence
atggaagaaccacaaagcgatccttccgtggaaccccctctctcgcaagaaaccttttctgacctctggaagctccttccggaaaacaacgttttgtcaccgctgccttctcaagctatggacgatctgatgctgtcaccagatgacatcgagcagtggttcaccgaggacccaggaccagacgaggccccccggatgcctgaagcagcacccccagtggcccctgcaccagcagcaccgacccccgcagcaccggcccccgccccatcctggcctctgagctcgtccgttccatcccaaaagacctaccagggcagctacggcttccgcctcggcttcttgcattcagggaccgccaagagcgtgacctgcacctactcccccgcactcaataagatgttctgtcaactggctaagacctgtccggtccagctgtgggtggattcaactccccctcctggaacgagagtgcgggcgatggcaatatacaagcaatcgcagcatatgactgaggtcgtgcggagatgccctcatcacgaaaggtgtagcgattcggatggtttggcacctccacagcatcttattcgagtggaaggaaacctcagggtggagtacctggatgatcgcaacacttttagacattcagtggtggtcccctatgaacctcctgaagtgggatcagactgcactactatccattacaactatatgtgtaattcctcctgtatggggggtatgaatagacgccccatccttactattatcactctcgaggactcctccgggaatttgcttggaagaaattcctttgaagtccgggtttgcgcctgtcctggacgtgatcgaagaactgaggaagagaacctccgtaaaaagggcgagcctcaccacgaactccctcctggatcaactaaaagggcgcttccaaacaatacttcaagctctcctcaacctaagaaaaagccactggacggagagtactttacgttgcagattcgcggacgcgaacgatttgaaatgtttcgcgaattgaacgaggcgcttgaactcaaggatgcacaggcaggtaaagaaccaggaggctcgagagctcattcctcacacttgaagtccaagaaaggtcaatcgacctcgaggcacaagaaactcatgtttaagacggaagggcctgattccgac

SEQ ID NO: 12299 - DNA, 1179 bp, Artificial Sequence
  derived and/or modified sequence
atggaagagccacagtctgacccgagtgtagaacctccgctttctcaggagacattcagcgatctgtggaagctcttgccggaaaacaacgttctatcacctctgcctagtcaggcaatggacgatcttatgttatcacccgatgacatcgagcagtggtttactgaagatcccgggccagacgaggcgccacggatgcccgaggccgcccctccggttgctccagcgcctgcagcacccactcccgcagctcccgcaccagctcccagctggccgttaagttccagcgtcccctctcagaagacctaccaaggatcctacggatttcgccttggattcttgcattctggaacagcgaagagcgtgacatgtacctactcgccagccttaaataaaatgttctgtcagttggcaaagacctgccctgtgcagttgtgggtggattccacaccgccccccggcacaagagtcagagcaatggcgatatacaagcagtcacagcacatgaccgaggtggtcaggcggtgtcctcatcatgaaagatgttctgatagcgacggcctcgcccccccccagcacctgattagagtggaaggcaatttgcgcgtcgagtatctcgacgatcggaatacatttcgccattctgtggtggttccttacgaaccgcctgaggttggtagcgactgtaccaccatccactataactacatgtgcaactccagttgcatgggaggcatgaatcgccgcccaatcctgactattatcaccctagaagatagtagcgggaatctgctgggtaggaactcatttgaggtacgcgtctgtgcgtgtcccggccgcgatcgccggacggaagaggagaacctccgtaaaaagggcgagccccaccacgaacttccaccagggtctaccaaaagggctctaccgaataacacgagttcatccccccagccaaaaaagaagcctttggatggggagtactttacactccaaatcaggggtagagaacggtttgagatgttcagggagctgaacgaggccttggagctcaaggatgcacaggctggaaaggagccaggcggctctagagcccattcatctcatctgaagtcgaaaaagggtcaatcaacctcaagacataagaaactgatgtttaaaaccgagggacccgattccgac

SEQ ID NO: 12300 - DNA, 1179 bp, Artificial Sequence
  derived and/or modified sequence
atggaagagccacagtccgatcctagcgtcgaaccccctctgtctcaggagactttctcagacctttggaagctgttgccagagaataatgtgctctcccccctcccttcacaagccatggatgatcttatgctgtcaccagatgacattgagcaatggttcaccgaggaccccggaccagatgaggcaccacggatgccagaggcagctcctcctgtggcacccgctccagcagcgcctactcccgcagcacctgcgcctgcaccctcatggcctctttcttcgtcggtcccatcccagaaaacctaccagggatcatacggattccggctgggatttcttcatagcggcactgctaaatcagtcacctgtacttactcccctgcactgaacaagatgttctgccagcttgccaagacttgtccagtccaactctgggtggattctaccccgccgccgggtactcgtgtgagagccatggcaatctacaaacagagccaacacatgacggaagtggtgcgccgctgtccgcatcatgaacggtgctcggactccgatggtctggctccaccacaacacctcattagggttgagggaaacttgcgcgtggaatacctcgatgatcgcaacacgttccggcactcggtggtggtcccttacgaacctcccgaagtgggttccgactgtactaccatccactacaactacatgtgtaactcatcctgtatgggaggaatgaaccggcggccaatcttgaccatcattacccttgaggactcgtcggggaacctgctggggcgtaactcttttgaagtgcgggtctgtgcatgccccggacgggaccggcgaaccgaagaggagaatcttagaaagaagggagagccacaccatgaactgcctccgggatcgaccaagcgcgccctgcccaacaatactagctcatcgcctcaacctaaaaagaagccactggatggcgaatactttaccctccaaattaggggaagggaacgctttgaaatgttccgggaacttaacgaggcactggaacttaaagatgcccaggccggcaaagaaccgggaggctcccgagcgcattcgtcacatcttaagtcaaaaaagggacagtcgacctcgcgtcataagaagctgatgtttaagaccgagggtcccgacagcgat

SEQ ID NO: 12301 - DNA, 1179 bp, Artificial Sequence
  derived and/or modified sequence
atggaagagcctcagagcgatcctagcgtcgaacctcctttgtctcaagaaacctttagcgatctatggaagctcctgcccgaaaataacgtgctgagccctttgccgtctcaggccatggacgacctgatgctctcccctgacgatatcgaacaatggtttaccgaagatcctgggccggatgaggcgcctcgcatgcctgaggccgcgcctcctgtcgcccctgcgcccgctgccccgacgccggctgcgcccgcgccggcacccagctggcctctaagctcgtctgtgcctagccagaaaacataccaggggagctacggtttccggttgggcttcctgcacagcggaaccgccaagtctgtgacctgcacctacagccctgcactgaacaagatgttttgtcagcttgccaaaacgtgcccagtgcagctttgggtcgacagcacgcctcctccagggacccgtgtgcgtgccatggctatctataagcagtctcaacacatgactgaggtggttcgccgttgccctcaccatgagcgctgctcagatagcgacggtctggccccaccgcagcacctgattcgcgtcgagggcaatctccgagttgagtacctggatgaccgcaatacgtttcggcatagtgtggtcgtcccttacgagccgcctgaggtgggcagcgattgtacgactattcactataattacatgtgcaatagctcttgtatgggcggcatgaaccgcagacctatcttgaccattataaccctggaagactcgtctggtaatctgttgggtcggaattccttcgaagtccgcgtttgcgcgtgcccaggccgggataggagaactgaggaggaaaaccttcgtaaaaaaggagagccgcatcatgaactgccgccgggtagcaccaaacgcgcgctgcctaacaacacctcgagcagcccgcaaccgaagaaaaagcctcttgacggggaatactttactctgcagatacgtggtcgtgagcgcttcgaaatgttccgcgaattgaacgaggccctggaactgaaagacgcacaggcaggcaaggagcccggcggtagcagagctcatagtagccatctgaagagcaagaaaggccagtccaccagccgtcataaaaaactgatgtttaagaccgagggccccgatagcgat

SEQ ID NO: 12302 - DNA, 1179 bp, Artificial Sequence
  derived and/or modified sequence
atggaggaaccccagtctgatccaagcgtggaacctcctctttcccaggagactttctcggacctgtggaagctgctgccggaaaacaatgtgctctccccgctcccctcccaggctatggatgacctcatgctctccccggacgacatagagcagtggttcacggaggacccaggcccggacgaagcgccgcgcatgcccgaggccgcgcctccagtggcaccagcaccggctgccccgactccagctgccccagccccggcgccatcgtggccgctgtcctcctcggtgccgagccaaaagacgtaccagggatcgtatggtttccggctgggattccttcattccgggacggccaagagcgtgacttgcacctactcccctgcgctcaacaagatgttctgccagctcgctaagacttgccctgtgcagctgtgggtggatagcacccctccaccgggtacgagggttagagccatggcgatctacaaacaatcacagcacatgaccgaggtcgtcagacggtgcccccaccatgagagatgctcggattcggatggactggcacccccacaacaccttatccgggtggaaggcaacctgcgggtggaatacctcgatgaccgcaatactttccggcattcagtggtggtgccgtacgagccgccagaggtgggatcggattgtactaccattcactacaactacatgtgcaactcctcgtgcatgggaggcatgaatcggcgcccgatcctcactatcatcaccctcgaggactcgtccggaaacctgctgggcagaaactcgtttgaggtcagagtctgtgcctgtccgggacgggaccggcgcactgaagaggagaatctgagaaagaaaggagagccgcaccacgagctgccaccaggatccactaagcgagcgctgccgaacaacacctcgtcatcacctcagccgaagaagaagccgctggacggcgaatactttaccctccagatccggggtcgcgagcggttcgaaatgttcagggagcttaacgaggccctggagctgaaggacgcccaggcgggcaaagagccgggaggctcgcgggcgcactcatcgcacctgaagtcgaagaagggtcagagcacttcgcgccacaagaagttgatgttcaaaaccgagggaccagattcagac

SEQ ID NO: 12303 - DNA, 1179 bp, Artificial Sequence
  derived and/or modified sequence
atggaggagccccagtccgacccttctgtggagcctcccctgtctcaggagaccttctctgatctgtggaagttactaccagagaacaacgtattgtcacccctaccttcacaggccatggatgatctcatgttatctcccgacgatattgagcagtggttcaccgaagatcctggcccagatgaagctcccaggatgccagaagcggctcctcccgtcgctccagcacccgctgctccaactcctgcggcacctgcccctgccccttcctggccattaagctcttccgttccaagtcagaagacttaccaggggtcttacgggttccgtctcgggttccttcatagcggaaccgcaaagagtgtcacttgtacctactctccggcactgaataagatgttctgtcagctggccaagacttgtccggttcagctttgggtggactcgaccccccctcccggaacacgggtccgagctatggccatttataagcagagccagcatatgaccgaggtcgtccggcgctgcccccatcacgaacgttgtagcgattctgatggactggcgccaccgcagcatctgataagagttgaggggaatttgcgggtggaatatcttgacgacaggaatacgttcagacacagtgttgtggtgccatatgagcctcccgaggttggcagtgactgtaccaccatacattataattacatgtgtaacagttcctgcatgggcggcatgaacaggcgtcctatccttactatcattacactcgaggacagctctggtaacctattgggccggaacagtttcgaggttagggtgtgcgcctgcccaggaagggatcgtcgaacggaagaggagaacttgagaaagaaaggcgagccccaccacgagctgcctccagggagtaccaaaagggcactcccgaataacactagttctagccctcagcctaaaaagaaacccctggatggagagtactttacgctccagatcagagggcgggagaggtttgagatgttcagagagctgaatgaggcactagagctgaaggacgcgcaagcgggcaaggaacctggaggctctagggcccattccagccacctgaaatctaagaaagggcagagcaccagtcgccacaaaaaactgatgttcaagactgaagggccagatagcgat

SEQ ID NO: 12304 - DNA, 1179 bp, Artificial Sequence
  derived and/or modified sequence
atggaggaacctcagtccgacccctctgtagagccaccactgtctcaagagaccttctcggatctgtggaagctgctgcccgagaacaacgtcctgtcacctctgccatcgcaggctatggacgatctgatgctgagccctgatgatattgaacagtggttcaccgaggatccaggtcccgatgaagcccctaggatgccggaggccgcccctccagtagcacctgctcctgctgcccccactcccgctgccccagccccagcacctagttggccactgtcaagctcagttccttcccagaagacctatcaggggtcttacgggtttcgattaggattcctccacagcggtacagctaagtctgtgacgtgtacttactcccccgccctgaacaaaatgttctgtcagctagctaagacttgcccagtgcagctgtgggtcgactcgacgccaccacccgggaccagggttcgggccatggccatctacaagcaaagccagcatatgaccgaggtagtcaggcgatgtccccaccacgaaaggtgttccgacagtgatggcctggcacctccgcagcacctaatacgcgtagagggcaatctcagggtagagtatctcgacgaccggaatacatttaggcactccgttgtcgtgccctatgaaccaccagaggtgggatcagactgcaccaccattcactataactatatgtgtaattcaagttgcatgggcggcatgaataggagacctatcttaactataatcactctggaagacagcagtgggaatttactggggcggaattccttcgaggtgcgcgtgtgtgcatgccctggcagggaccgaagaactgaggaagaaaacttgcgcaaaaagggcgaaccacaccacgagctgcctcccggctcgacgaaacgcgctctacctaataatacatcttccagcccacagcccaagaagaaaccactggatggggaatatttcaccctgcagatccgcgggcgggaacggttcgagatgtttcgcgaactgaatgaggcactggagctgaaggatgctcaggcgggaaaagaacccggcggttctagagcgcattctagtcacctgaaatccaaaaagggtcagtcaacctctaggcacaagaaattgatgttcaaaacagagggtccagattcagac

SEQ ID NO: 12305 - DNA, 1179 bp, Artificial Sequence
  derived and/or modified sequence
atggaagaaccacaatcagatccttctgtcgaacctccacttagtcaagaaacttttagtgatctttggaaacttttaccagaaaataatgttctttctccacttccatcacaagcaatggatgatcttatgttatcaccagacgatattgaacaatggtttactgaagacccaggtccagatgaagcaccaagaatgccagaagctgcacctccagtagctcctgctccagcagcacctactcctgctgcacctgcaccagcaccatcttggccattatcaagttcagttccatcacaaaagacatatcaaggaagttatggtttccgtttaggttttttacactcgggtacagctaagtcagtgacatgtacatatagtcctgcacttaataaaatgttttgtcaactagctaaaacttgtccagtacaattatgggtagattcaaccccaccaccaggtacaagagttcgtgctatggcaatatataaacaatcacaacatatgactgaggtagtaagaagatgtccacatcatgaacgatgttctgattcagatggattagcaccaccacaacatcttataagagtagaaggaaatttaagagtcgaatatcttgatgatagaaatacttttagacattctgttgttgtcccatatgaacctccagaagtgggaagtgattgtactactattcattataattatatgtgcaattcgtcatgtatgggtggaatgaacagaagaccaatacttactataattactttagaagacagttccggaaatttattaggaagaaattcatttgaggttagagtttgtgcatgtccaggtagagatagaagaacagaagaagaaaatcttagaaagaaaggtgaaccacatcatgagcttccaccaggatcaacaaaaagagctttacctaataacacatcatctagtccacaaccaaaaaagaaaccacttgatggtgaatattttaccttacaaattaggggtcgtgaaagatttgaaatgtttagagaattaaatgaagcacttgaattaaaggatgcacaagctggaaaagaaccaggaggtagtagagcacatagtagtcatttaaagtcaaaaaaaggacaaagtacaagtagacataaaaagttaatgtttaaaactgaaggaccagactcagat

SEQ ID NO: 12306 - DNA, 1179 bp, Artificial Sequence
  derived and/or modified sequence
atggaggaaccgcaaagcgatccttcggtcgagccgccactgtcccaagaaacgttctccgacctctggaaactgctgccagaaaacaacgtgctgtctccgctgccgagtcaggcgatggatgacctgatgctcagcccggacgacatagagcaatggtttaccgaggacccaggaccggacgaggcaccacgcatgccggaggccgctccgcctgtagctccagcaccagcggcgccgactcccgctgcccccgcccccgctccgtcatggcctttgtcgtcctcggtcccttcccagaaaacgtaccaaggatcgtacggttttcgcctgggtttcctgcactcaggaactgccaagtcagtgacctgcacctactcgcctgccctcaacaaaatgttctgccagctcgccaagacctgtcctgtccagctttgggtggattccactcctcccccgggaactcgggtgcgggcaatggcaatctacaagcagagccagcacatgaccgaagtcgtgcgcaggtgcccgcatcatgagcgctgctcagacagcgacgggttggccccaccgcagcatctgatccgggtggaaggaaaccttcgcgtcgaatacctcgacgaccggaatactttcagacactccgtggtggttccgtacgaacccccggaagtagggtcggattgcaccactatccactataactacatgtgcaattcgtcatgtatgggaggcatgaatcgtaggccgatcttgacgatcatcaccctggaggatagcagcggaaacctgctcgggaggaactccttcgaggtgcgggtgtgtgcgtgcccagggagggacagacggactgaggaagagaatctgcgcaagaagggcgagccacatcatgaactgccacctggaagtaccaagcgtgcactccctaataacacttcctcctcgcctcagccgaagaaaaagcccctggacggcgaatactttactctgcaaattagaggcagagaacggttcgagatgttccgggagctcaacgaagcactcgagctcaaggatgcccaggctggcaaagaacctggcggatcacgcgcccactcctcgcacctgaagtcaaagaaaggacagtcgacttcacgccacaagaagttgatgttcaagaccgaaggacccgattcggat

SEQ ID NO: 12307 - DNA, 1179 bp, Artificial Sequence
  derived and/or modified sequence
atggaagaacctcagtccgatccatcagtggaacccccgctttcacaggaaaccttctcggatctctggaagctgctccccgaaaacaatgtccttagtcctcttccttcgcaggcgatggatgatctgatgctcagcccagacgacattgagcaatggtttaccgaagatcctggaccagatgaagcacctagaatgccagaggccgcgccccctgtggcccccgcaccggcagcacccactcctgcagcaccagcccctgctccaagctggccactttcatcctcggtcccttctcagaaaacttaccaagggtcctacggttttcgcctcggatttcttcactcggggactgcaaagtccgtgacttgtacctactccccagcacttaacaaaatgttctgccaactggcaaagacttgccctgtccagctttgggtggatagcactccacctcctggaaccagagtgcgtgcaatggccatttacaagcaatcacaacatatgacggaggtcgtgcggaggtgccctcaccatgaacgatgttcggactcggacggactggcccctcctcaacatcttattcgagtcgaaggtaatctgcgagtggaataccttgatgatcggaacaccttcaggcatagcgtcgtggtgccttacgaacctccagaagtcggaagtgattgtaccaccatacattacaactacatgtgtaactcgtcctgtatggggggcatgaatagacgtcccattctgacgatcataaccctcgaagattcgtcggggaacctcctgggtcgcaacagttttgaagtgcgcgtctgcgcatgtccgggtcgcgataggagaaccgaagaagaaaatctccggaagaagggggagcctcaccacgaactcccaccaggctcgaccaaaagggctcttcctaataacacttcttccagcccccaacctaaaaagaagcctctggatggggaatacttcacgctgcagatcagaggaagagagagatttgaaatgttccgggagcttaacgaagcactggaactcaaggatgcccaagcaggcaaggaaccaggcggatcgagggcacactcatcccacctgaagtcaaagaaaggtcagtcgacctcgcgtcataagaaacttatgttcaagactgagggtccagactccgat

SEQ ID NO: 12308 - DNA, 1179 bp, Artificial Sequence
  derived and/or modified sequence
atggaagagccacagagtgatccctccgttgagccccccctgagccaggagacgtttagcgatttgtggaagctgcttccggaaaataacgtgctgtcacccctgccatctcaggccatggacgatctgatgctatcccccgacgacattgagcagtggttcacagaagatccggggcctgatgaggctccgcgaatgccagaggccgcaccaccagtcgcgcccgccccagccgcccctaccccggccgcgcccgctcctgccccttcttggcctttgagctctagtgtgccttctcagaagacgtaccagggctcctacggctttcgcctaggttttctccattccggtactgccaagtctgtgacttgtacatactcgcctgcactcaacaaaatgttttgtcagctggccaaaacctgccccgtccagttatgggtcgatagtacacccccccctggcacacgggtcagggccatggctatttataaacagtcgcagcacatgacagaggtcgtccgccgttgcccccaccatgaacgttgctctgactcggatggccttgctcctccccagcacctgatacgagtggagggcaacctgcgtgtagagtatctggatgatagaaataccttcaggcatagcgtggtggttccgtacgagccacctgaagtgggaagtgattgtaccacaattcattacaactacatgtgcaactcctcttgcatgggtgggatgaataggaggcctatcttgactataatcactctggaggactcatccggcaatctcctcggcaggaactctttcgaggtgcgagtgtgtgcctgtcccggtagggaccgcaggaccgaagaagaaaatctgcgcaagaagggcgagccccaccacgagctaccgccaggctctacaaagagagctctgccgaacaataccagcagctcgcctcagcctaaaaaaaagccactggacggagaatattttacgctacaaattcgaggccgcgaacggtttgagatgttcagagaactcaacgaggctctggaacttaaagacgctcaagccgggaaggagccaggaggatcccgggcccactctagtcatctgaaatctaagaagggccaaagcactagccgtcacaaaaagttgatgttcaagacagagggaccagattcagat

SEQ ID NO: 12309 - DNA, 1179 bp, Artificial Sequence
  derived and/or modified sequence
atggaggaaccacagagcgacccctcagtcgaaccccctctcagccaggagacctttagcgacctgtggaaacttctgcctgagaataatgtgctaagtccgctgcctagccaagccatggatgacctcatgctatcacctgacgatatcgaacagtggtttacagaagatccgggaccagacgaggcccctaggatgccagaagctgcacccccagtggcgcctgcgccggccgcccccactcccgctgcccccgctccggccccctcctggcctcttagttcgtccgtcccttcccagaaaacctaccagggttcctacggcttccgcctgggcttcctacacagcggcacagctaaaagcgttacttgcacatacagcccagctctgaacaagatgttctgccagctagctaaaacgtgtccagtgcagctgtgggtggacagtacgcctcccccagggacacgagtaagggcgatggccatctacaaacagagccaacatatgaccgaggtggttcggaggtgtcctcatcatgaacggtgcagtgactcagatggcctggctcccccacagcatctgatcagagtggaggggaacctgcgggtggagtacctggatgataggaacacattcaggcattctgtggttgtgccttatgaaccgcctgaagtcgggagtgactgtactaccattcactacaactacatgtgcaacagcagctgcatgggcgggatgaacaggcgcccaattttgactatcataacgctggaagatagttctgggaatctgctcgggcgaaactctttcgaggttcgggtttgtgcttgtcctggccgggatcgcagaacggaggaagagaaccttaggaaaaagggagagccgcatcacgagctgcctcctggttctacgaagagagctttgccaaacaatacctccagcagcccgcagccaaagaaaaaaccattagatggggagtatttcaccctccagattcgtggaagagagcgctttgaaatgtttcgggaactgaacgaggccttagaactgaaagatgcccaggccggtaaggagcctggggggagtagggcccacagcagtcatctcaagtcaaaaaagggtcagtcaacaagtcggcataaaaaactgatgtttaagacagagggtcccgactctgac

SEQ ID NO: 12310 - DNA, 1179 bp, Artificial Sequence
  derived and/or modified sequence
atggaagagccgcaatcagatccaagcgtggagcccccattgtcccaagaaaccttctcggatttgtggaagctcctcccagaaaacaatgtgctctctccactgccatcgcaggccatggatgatctcatgctctccccggacgatattgagcagtggttcactgaggacccgggcccagatgaggctccacggatgccagaggcagcgccgccagtcgctccggcgccggcagcacccacgccagcagcgccggcgccagcgccatcctggccgctctcatcctccgtgccgtcgcaaaagacttaccaaggatcctacgggtttcggctgggattcctgcatagcggtaccgcaaagtcggtgacttgcacgtacagccctgccctcaataagatgttctgccagcttgctaaaacctgcccggtgcagctgtgggttgactcaactcctccaccgggaaccagagtgcgcgccatggccatctacaagcaatcccagcacatgaccgaggtcgtgaggagatgtccacaccacgagagatgctccgactccgacggtctggcgcccccgcagcatctgatcagagtcgagggaaacctccgggtggagtacctcgatgaccggaatacctttaggcactcagtcgtggtcccttacgaaccaccagaagtgggttccgactgtacgactatccactacaactacatgtgtaattcgtcatgcatgggaggcatgaatagacggcctatcctgactatcatcaccttggaggacagctcgggaaatctgctgggacgcaacagctttgaagtgagagtgtgtgcctgccccggtagagataggcgtaccgaagaagagaacctgcgcaagaaaggtgagccacatcacgagctgccgcccggatccaccaagagagcactgccgaacaacacctcctcttccccccagccgaagaagaaaccactggatggcgaatacttcactctgcagattcgcggaagagaaaggtttgagatgttccgggaattgaatgaggctctggaactgaaggacgcccaggccggaaaagaacctggaggaagccgcgcccattcctcgcatctgaagtcaaagaagggccagagcacgtctcgccacaaaaagctgatgttcaagacggagggaccagactccgac

SEQ ID NO: 12311 - DNA, 1179 bp, Artificial Sequence
  derived and/or modified sequence
atggaagaacctcagtccgacccttccgtcgaacctcctctttcacaagagactttttcggatctgtggaaacttctccctgagaataacgtgctctcgcctctcccctcgcaggcaatggatgatctgatgcttagcccagacgatatcgaacagtggttcaccgaagatcctggacctgatgaagcaccaaggatgccagaagccgcacctccagtggcgcccgcccctgcggcccccactccagccgcacctgcccctgcaccatcgtggccgctctccagctcagtgccctcacaaaagacgtaccagggatcatatggatttcgtcttggttttctgcactcggggaccgctaagagcgtcacctgcacgtactcgcctgcactgaacaagatgttttgtcaacttgcaaaaacctgtccagtccaactgtgggtggacagtaccccgccccctggtactagagtgagagcaatggctatttacaagcagagccagcacatgaccgaagtcgttcggaggtgcccgcatcacgagcgctgttccgattcggatggtcttgcccctccacagcatctcatccgcgtggaagggaatctccgggtggaatacctggatgataggaatacctttagacattcagtggtggtcccatacgagcctcccgaggtcggctcggattgtaccaccattcactacaactatatgtgtaactccagctgtatgggaggaatgaatcgacgaccaatcctcactattatcactctcgaagattcctcgggcaaccttctgggtcgcaacagctttgaggtgagggtgtgcgcgtgtccaggacgcgatagacggactgaagaggaaaacctccgaaagaagggcgagcctcatcacgaattgccgccaggatccactaagagagctctccctaacaatacctcgtcatccccccaacctaagaagaagcctctggacggagaatactttacccttcagatacgcggaagagaaagattcgagatgtttcgagaacttaacgaagctcttgaactcaaagacgcacaagcaggaaaggaacccggagggtcgagggcacattcctcgcatcttaagtccaaaaaaggtcagtccaccagtagacacaaaaagctcatgtttaagacggagggtccagattcggac

SEQ ID NO: 12312 - DNA, 1179 bp, Artificial Sequence
  derived and/or modified sequence
atggaagagccgcagagtgatccgagcgtcgagccaccgttgagccaggagacgttctcggacctgtggaagctgctgccagagaacaacgtcctcagcccactgccgtcccaagcgatggacgaccttatgctgtccccagatgatatcgaacaatggttcaccgaagatccagggccagacgaagctccccgcatgcccgaggccgccccacctgtggccccagcccccgcggctccgactcctgcggcaccagcgccggcgccttcgtggcctctctcgagctctgttccatctcaaaaaacttatcaagggtcctacgggtttcggctcggcttcctgcactcgggaactgcaaagtccgtgacgtgtacttactcacccgctctcaacaaaatgttctgccagctcgctaagacctgcccggtgcagctctgggtggattctactccgcccccgggcactcgggtccgggcgatggctatttacaagcaatcccagcacatgaccgaggtggtgcgcagatgccctcatcacgagcggtgctcggactccgatggcctcgccccaccccagcacctcattcgcgtcgagggaaacttgcgcgtggaatacctggacgatagaaatacttttcgtcactccgtggtcgtgccctacgagcctccggaggtcgggtcggattgtaccacgatccattacaactacatgtgcaatagcagctgcatgggcgggatgaatcggcgtcctatcctgaccatcatcactctggaggactcgtcgggaaatctgctcggtcggaattcctttgaagtgcgagtgtgcgcgtgtccaggacgagatcggcgcactgaagaggaaaatctccggaagaagggagagccgcaccacgagctcccgccgggatccactaagagggctctgcctaacaacaccagctctagcccccagcctaaaaagaagcccctggacggagagtactttaccctgcagatccggggcagggaacgctttgaaatgttccgggaacttaacgaagcattggaattgaaagacgcacaagccggcaaggagccgggagggagcagagcccattcgagtcatcttaagtcgaagaagggacagagcacctcacggcataagaaacttatgtttaagaccgagggcccggactcggac

SEQ ID NO: 12313 - DNA, 1179 bp, Artificial Sequence
  derived and/or modified sequence
atggaagaaccgcaatcagatcccagcgtggaaccgccgctctctcaggagactttctcagacctctggaaactcctgccagaaaacaacgtgttgtccccactgccttcacaagcaatggatgacctgatgctgagcccagatgatattgagcaatggttcacggaggacccgggaccagatgaagcgccgcgcatgccggaagcagccccaccagtggctccggcccccgcggccccaactccggccgcaccggcaccggctcctagctggccgctctcttcgtcggtcccgtcccaaaagacctaccagggcagctacggcttccggttgggcttcctccactcgggaaccgccaaatccgtgacctgcacttatagcccggcactcaacaagatgttctgccagctggccaaaacttgcccagtccagctctgggttgatagcacccctccgccaggaactcgcgtgcgcgccatggcgatctacaaacagtcacagcatatgaccgaagtggtgcgcaggtgcccgcaccatgaaagatgtagcgactcggacggcctcgcccctcctcaacatctgattagagtcgaaggcaatctccgcgtcgaatacctggacgaccgcaacactttccggcattctgtggtcgtgccatacgaaccgccggaagttggatcggattgcactaccatccattacaactacatgtgcaattcgtcctgtatgggtggcatgaatcgacgcccaatccttactatcattactttggaggactcatccgggaacctgctcggacgcaattcattcgaagttagggtttgcgcctgtccaggacgcgaccgtcggactgaggaagaaaatctgcgcaagaagggcgaaccgcaccatgagcttccgccaggaagcaccaagagggcgctgcccaacaatacttcgtcgtcaccccagccgaaaaagaagccactggatggagagtacttcacgttgcaaatccgcggacgagagagatttgaaatgtttagggaactgaacgaagccttggagctgaaggatgcgcaagctggaaaagagccaggagggtcgagagcccacagttcccatctgaagagcaagaagggacagtcaacttcgagacataagaagctcatgtttaagactgagggaccggactcagac

SEQ ID NO: 12314 - DNA, 1179 bp, Artificial Sequence
  derived and/or modified sequence
atggaggagccacagtctgacccttctgtggaaccccctcttagtcaggagaccttttctgatctgtggaagttgctcccagagaacaatgtcctgagtccattgccaagtcaagctatggatgacctgatgctgagtccagatgacatagagcagtggttcacagaggatcctggccctgacgaggccccccggatgcctgaggctgcccctcctgttgcaccagcaccagcagccccaacacccgccgcccccgccccagcaccatcttggcccctctctagcagtgttccaagtcagaaaacttaccagggaagctacggctttaggctaggcttcctgcatagtgggacagccaaatcagtgacctgtacttattcaccagctctcaacaaaatgttttgccagctagccaagacatgccctgtgcaactgtgggttgactctactccacccccaggcacccgcgtgcgggctatggctatttacaagcagtctcagcacatgacagaagtggtgcggcgatgccctcatcatgaacgctgtagtgatagcgacgggctggctcccccacagcacctaatacgagtggagggtaatctgcgggtcgaataccttgacgatagaaatacctttcgtcactccgtggttgtgccatatgaaccaccagaggtcggatccgactgcacaacaattcactataattacatgtgtaatagttcttgcatggggggcatgaacaggagacccattctcaccataataacactggaagactcctctggcaatctgctcggcaggaacagttttgaggtaagagtgtgtgcctgtccgggcagagatcggaggacagaggaagaaaatctgcgtaagaagggggaaccccaccacgagctgccccccgggagtactaagcgagcactgcccaataataccagttcatcaccacaaccaaagaagaagccactggacggtgagtacttcaccctccaaatccgggggcgcgagcgtttcgaaatgtttcgggagttaaatgaggccttggagctaaaggatgcccaggcaggaaaagagccaggcgggtcacgggcccattcaagccacctgaagagcaagaagggtcagtctacatctcgccacaagaaactgatgttcaaaacagagggcccagacagtgat

SEQ ID NO: 12315 - DNA, 1179 bp, Artificial Sequence
  derived and/or modified sequence
atggaagagccacagtcagatcctagcgtggaacctcctttatcacaggaaaccttctcagatctgtggaaactcttaccagagaacaacgtcctgagtcctctgccatcacaggccatggatgacttaatgctgagcccagatgatatcgaacaatggttcaccgaagatccaggtccagacgaagctcctcgcatgcctgaggctgcacccccagtggcaccagctcctgcggccccgactcccgctgcccccgctcctgcacccagctggccgctttctagctctgttcccagccagaagacatatcaaggatcttacggattcagactgggcttcctgcatagcggcaccgctaagtctgtgacttgcacgtactcacctgccctgaacaaaatgttttgccagctggccaagacatgtccagttcagctctgggtcgactccactccacctccaggaacacgtgtccgggccatggcaatatacaagcaaagtcagcacatgaccgaggtcgtgagacggtgccctcatcacgagaggtgtagcgactctgacgggctggccccacctcaacaccttatacgggtggaaggtaatctgagagtggaatacctggatgacagaaatacttttcgccacagcgtcgttgtgccttatgagcctcccgaagtgggctctgactgcacaactattcattacaactacatgtgcaacagcagctgcatgggaggaatgaacagaagacccattttgactatcattacactggaagactcatcaggcaaccttctcgggcgcaatagctttgaggtccgtgtgtgcgcttgccccggacgagataggcgcaccgaggaagaaaacctcaggaaaaagggagaaccgcaccacgaactgccccctggtagtactaagcgtgctctcccgaataacaccagcagctcaccacagcctaagaagaaacctctggacggtgagtacttcaccctgcagatccgcggacgcgaaagatttgagatgttccgcgagctcaatgaggcccttgagctgaaggatgcccaggccggaaaggaaccaggagggagtagagctcatagtagtcatctcaaaagcaaaaaaggccagagcactagccgccacaaaaaattgatgtttaagaccgagggcccagattccgac

SEQ ID NO: 12316 - DNA, 1179 bp, Artificial Sequence
  derived and/or modified sequence
atggaagagccacaatcggaccccagcgtagaaccacctctctctcaggaaaccttctccgacttatggaagcttctccccgaaaacaatgtattgagccccctgccgtctcaggctatggatgacctgatgttaagcccagatgacattgagcagtggtttacagaggaccctggtcccgatgaagcccccagaatgcctgaggctgcgccgccagttgcacctgcccctgccgcccctacccccgccgctccggccccggccccctcatggcccctgtcttcttccgtcccctcacagaagacttaccagggaagctatggattccgcctcggctttctccacagcggcaccgcgaaatcagtaacttgcacatactcccctgcactaaataagatgttctgtcagctggccaaaacttgcccagtccagttatgggtggattccacaccaccaccaggcactcgggtgagagccatggcaatctacaaacaaagtcagcatatgacagaggtggtgaggcgatgccctcaccacgagcggtgctcagattcagacggtttagcccccccccagcatctcatccgtgtggagggcaatctgagagttgaatatttggacgacaggaacacctttaggcactcggttgtggtcccttatgaacctccggaggtgggcagcgattgtactacaatccactataactacatgtgcaattcctcctgcatgggggggatgaaccggagacccatattgactatcataactttggaagatagtagtggaaatctgctgggtcgtaattcgttcgaggttagggtgtgtgcctgccccgggagggatcgacggacagaagaggagaatcttcgaaagaagggagaaccccatcacgagctacctcccgggtccacgaagagggccctaccaaataacactagtagctcgcctcagccgaaaaagaaacctcttgatggggagtactttactttgcagattcggggccgtgaacgattcgagatgttccgagagctcaacgaggctctggagttaaaggatgcccaagccggaaaggaacccggaggaagtagggcccacagtagccacctgaaatctaagaagggccagagtacttcacgacataagaaactcatgttcaaaaccgagggacctgatagcgac

SEQ ID NO: 12317 - DNA, 1179 bp, Artificial Sequence
  derived and/or modified sequence
atggaagaaccacaatccgacccctcggtcgagccacccttatcacaagaaaccttctcggatctctggaaactcctcccagaaaataacgtcctctccccactgccctcccaggccatggacgatttgatgctgtctccagatgacattgaacagtggttcacggaggacccagggccggacgaggctcccaggatgccagaggcggctcctcctgtcgcccccgcacccgctgctcctacgccggccgcgccagcgcctgcaccttcgtggcctctcagcagttcagtgccatcccagaaaacttatcagggtagctacggtttccgcctcggcttcctccactcagggacagccaagtctgttacatgtacctattcccctgcactgaacaagatgttctgccagttggctaagacctgccctgtacagttgtgggtggattccaccccacctcctggcacacgcgtccgggccatggctatttataaacagagtcaacatatgaccgaagtcgtccgccggtgcccacatcacgagagatgtagtgactcggacggcctagcacccccccagcacctgatccgcgtggagggcaatttgagggtagaatatctagacgaccgcaacacctttcgccactcggttgttgtcccctacgaacccccagaagttggcagcgactgtacaacaattcattataattatatgtgtaacagcagctgcatgggaggcatgaaccgacggcccatcctgactattattaccctcgaagattcctctggcaatctcctcggacgcaacagcttcgaggtgagggtttgcgcctgcccagggcgagaccggcgcaccgaggaagagaatctccggaagaagggggagccccatcatgagttaccccctgggagcactaagagggctctgcccaacaatacatcctcatctcctcagccaaagaagaaaccactggacggtgaatacttcacgctacaaatccgtggccgcgagcgtttcgaaatgttccgggagctgaacgaagcgctggaactgaaagacgcgcaggctggcaaagaacccggcggatcgagggcgcactcatctcatctgaaatccaagaagggccagtctacttctcgccataagaaactgatgtttaagactgaaggtccggatagtgac

SEQ ID NO: 12318 - DNA, 1179 bp, Artificial Sequence
  derived and/or modified sequence
atggaagagccacagagtgatccatcagtcgagcctccgctgtcgcaggagacgttttccgatttgtggaagctgctacccgagaataatgtcctgtctccactgccttcacaggctatggacgacttgatgctgtctcctgatgatatcgagcagtggttcaccgaagacccgggacccgacgaggccccacgcatgccggaggccgcccctccggttgctcctgcacctgccgcacctacaccagctgctcctgcgcctgctcctagctggccactcagctcaagtgttccatcacaaaagacctaccagggcagctatggttttcggctgggattcctgcactcaggtactgcgaaatcagtcacctgcacgtattcacccgccctgaacaaaatgttttgccaactagccaaaacatgtccagtgcaactttgggtcgatagcacaccccctcctgggaccagagtgcgcgcaatggccatctacaagcagagccagcacatgacagaggtagtcagaaggtgcccacatcacgagcgatgtagtgatagcgacggcctagctccccctcagcatctcatccgagtggagggaaacctgcgagtggaatacctcgacgaccggaacaccttccgccattcggtagtggttccctatgaaccaccagaggtcggtagcgattgcaccacaatccattataactacatgtgtaactcctcttgcatgggcggaatgaaccggcgacctatcttgaccattataaccttggaagattcttctgggaacctcctaggccgcaattcatttgaggtgcgcgtctgtgcatgtcctgggcgggatcgtcgaactgaagaagaaaatctcaggaaaaagggcgaaccacaccatgagctgccaccaggatcaactaaaagggccctgcccaacaatacttcctccagtccccagcccaagaaaaagccactggacggagagtatttcacactacaaatacgcgggcgagaaagatttgagatgtttagagagctgaatgaggccctagagctgaaagacgctcaagccgggaaggagccaggtgggtctcgtgcacatagctcacatttgaagagtaagaaagggcaaagcacctccagacataagaagcttatgttcaagactgaggggcctgatagtgac

SEQ ID NO: 12319 - DNA, 1179 bp, Artificial Sequence
  derived and/or modified sequence
atggaagaacctcagagtgatccgagcgttgaaccaccgttaagccaggaaaccttctccgacttatggaaactacttcctgagaacaatgtgctgtccccgctgccctcgcaagcaatggatgatctcatgttgagcccagatgatatcgagcagtggttcaccgaagaccctggccctgatgaggccccacggatgcccgaggcggcgccgcccgtggctcccgcccctgcagcacccacccctgcggcccccgcccccgcgccatcctggcccctgtccagttcggtgccatcccaaaagacgtatcaaggatcctacggcttccgcctgggattcttgcacagcggcactgccaaatcagtcacctgcacctactcccccgctctgaacaaaatgttctgtcagttggcaaagacatgcccagttcaactgtgggtcgattcaaccccgccgcccgggacccgagttcgggccatggccatatacaagcagagtcagcacatgacggaggtggtgcggcgttgcccacatcacgaaaggtgttcggattcggatggactcgcgccgccccagcacctaattcgcgttgagggcaacctgagggtcgagtacttagatgaccgcaacacgtttcgccatagtgttgtcgtcccgtacgagcccccggaggtcggctccgattgcacgacaatccactataattacatgtgcaatagcagttgtatgggcggcatgaaccgacgccctatcctgacgatcattacgttggaagattccagtggaaacctgctggggcgcaacagtttcgaggtgcgtgtgtgcgcgtgcccggggcgtgatcgcaggacggaagaggaaaatctgcgcaagaaaggcgaaccccaccacgaattgccaccagggtccacgaagcgagccttgcccaacaacacgagttcatccccccaaccgaaaaaaaagccgctcgatggcgagtacttcactctgcagattcgcgggagagaacgttttgagatgttcagggagctaaacgaggccctggagttgaaagatgcgcaagcgggcaaagaacccggaggttcccgggcccattcctcgcacctgaagtccaagaagggtcaatctacctcccggcacaagaagctgatgttcaagaccgagggaccggactcggat

SEQ ID NO: 12320 - DNA, 1179 bp, Artificial Sequence
  derived and/or modified sequence
atggaggaaccacagagtgacccctcggtggagcctccgttatcgcaggagactttctctgacctgtggaagttactgccagaaaacaacgtgttaagtccactgcctagccaggctatggacgatcttatgctctcccctgatgacatcgaacagtggttcacggaagaccctggtccggacgaagccccacggatgcccgaggccgcacccccggtcgcccctgctcccgcggctccgacccccgctgcacctgccccggcgccaagctggcccctgagctctagcgtcccctcacagaagacttatcagggctcctacggctttaggcttggcttcctccatagtgggacggctaagtccgttacgtgtacctattcccccgcccttaacaagatgttctgccagctggccaaaacctgcccggtccagctgtgggtcgattcaaccccacctcctggcacacgcgtgcgcgcgatggcaatatacaaacagtcgcaacacatgaccgaggtcgtgagacgctgtccccatcatgagagatgctccgattcggatggcctggctccgccgcagcacttgatcagagttgaagggaatttaagggtggagtaccttgacgatcgaaacacatttaggcatagcgtggtggtcccttacgaaccgccagaagtggggagcgattgtacaacaattcattacaattacatgtgcaattctagctgcatgggagggatgaatcgccgtccaatccttacaatcatcaccttggaggacagttcaggcaacctactggggcgaaattcctttgaggtgcgtgtctgcgcctgccctggccgggaccgtaggacagaagaggaaaacttgcgcaagaagggtgagccacatcacgagttgccgcctggcagtactaaacgcgctctgcccaacaacactagcagctctcctcagccaaaaaaaaagccattggacggggagtacttcaccttacagataaggggtagggagagatttgagatgttccgggagttgaacgaggcactggagctcaaggatgcacaggctggcaaagaacccgggggttcacgagcacattcgtctcacctgaaatcaaagaagggacaaagcacttcacggcacaagaaactgatgtttaaaacagagggccctgactctgac

SEQ ID NO: 12321 - DNA, 1179 bp, Artificial Sequence
  derived and/or modified sequence
atggaagaacctcaatccgacccttcagtcgagccaccactttcgcaagagaccttcagcgatctgtggaagttgctgccggagaataacgtgttgtcgcctcttccttcccaagcgatggacgatctgatgctaagtccagatgatattgagcagtggtttacagaagaccccggtcctgacgaagctcctcggatgcccgaagccgcacctcctgttgcaccggctccagctgctccaacccctgcagcacccgcgccagcaccgagttggccactgtcttcttctgttccttcccaaaaaacctatcaaggaagttatggatttaggctcggcttccttcactccggaactgctaagtctgttacatgtacttactcgcccgcccttaataaaatgttctgtcaattggctaagacctgtccagtgcagctttgggtcgatagtactccaccgcctggtaccagggttcgggcaatggccatctataagcaatcacagcacatgaccgaagtggtgagaaggtgccctcatcatgagaggtgctcagattcagacgggctcgcacctccacaacatctaattcgcgtggagggtaacttgagggtcgagtatctcgacgacaggaacacttttagacatagtgtggttgtgccatatgaaccccctgaggttggtagtgattgtactaccatacattacaactacatgtgcaatagctcgtgcatgggaggtatgaacagacgaccaatactcaccattattacattggaagactcttccgggaatttgctcggtaggaattctttcgaggttcgagtttgcgcttgccctgggagagatcgtagaaccgaggaggagaaccttcgtaaaaagggtgagccccaccacgaacttcctcctggttctactaaacgcgctctgccaaacaacacatcgtcttccccccagcctaagaaaaagcctcttgatggcgaatacttcacactgcaaatcaggggccgagaaaggttcgagatgtttagagagctcaatgaagctttggagcttaaagatgcccaggctggaaaagagccaggaggttctagagctcatagctcccatcttaagtcaaaaaagggtcaaagcacctctcgtcataagaaattaatgttcaagacagagggtccagattccgac

SEQ ID NO: 12322 - DNA, 1179 bp, Artificial Sequence
  derived and/or modified sequence
atggaggaacctcagagtgatccttctgtagaaccaccactttctcaggaaactttctcagatctctggaaattactccctgaaaataatgttttgtctcccctcccctcacaggctatggacgacctcatgttgagtcccgatgatatcgaacagtggtttacagaagatcctggacctgatgaagccccgcggatgcctgaggcagccccacctgtcgcacccgcccctgcggccccaactcctgcagctcccgcccccgccccatcttggcccctatccagtagtgtgccatcccagaagacttatcaggggtcttatgggtttcggctgggatttctgcactccgggacagctaaaagtgtaacatgtacttatagtcccgcgctgaataaaatgttctgccagctcgccaaaacatgccccgtccagctctgggtggatagtacacccccacccgggacacgtgtaagagctatggccatttataaacagtctcagcatatgactgaagtggtaaggagatgccctcaccacgaacggtgctcagattccgatggactggcccccccccagcacctgataagggtggaaggaaatctgagggtggaatatctggacgatagaaacacttttaggcattcagtggtggtcccctatgaacctcccgaagtcgggtccgattgtacaactattcactacaactatatgtgtaattcttcttgtatggggggaatgaatcggagacccatattaacaatcataacactcgaggattcctctggaaacctccttgggcgcaatagttttgaagtgagagtctgcgcatgtcctgggcgggatcgccgaacagaggaagagaacctcaggaagaaaggggaaccccaccatgaactccctcccgggtctacaaaaagggcactccccaacaacacatcttctagtcctcagcccaaaaaaaaacctctggacggagaatatttcacactccagataaggggaagagaaagattcgaaatgtttcgggaacttaatgaagctctggaattaaaagatgctcaggcaggaaaagaacctggagggtctcgggcacactcttctcatttaaaaagtaaaaaggggcagtccacttcccggcacaaaaagctgatgtttaaaacagaagggcccgattctgat

SEQ ID NO: 12323 - DNA, 1179 bp, Artificial Sequence
  derived and/or modified sequence
atggaggagccacagtctgacccaagcgtggagcctcccttatcccaagagacgtttagcgacctgtggaaactgctgccggagaacaatgtgctctcccccctgccatctcaggccatggatgacctgatgctctcccccgatgatattgaacaatggtttacagaagacccaggacccgatgaggcaccccgcatgcccgaagccgcacccccagtcgctcctgccccggccgctcctacaccagcggcgccggcccccgcaccaagctggcctctatcgtcgtcggttccgtctcagaagacgtaccagggatcctatggtttccgcctggggtttttgcactccggcacggcgaagagtgtgacctgtacctacagcccagccctcaataaaatgttctgccagctggcaaagacctgccctgttcaattgtgggtggattccacaccgccaccgggaacccgagtccgggcaatggccatatacaagcagtcgcaacacatgaccgaggtggtgagacgatgtccccatcacgagcgctgctctgactctgacggcttggccccccctcagcacctgatccgagttgaggggaatctccgagtggagtacctggacgatcggaatacctttcgccactcggtggtagtcccttacgagccacctgaggtcggctccgattgtaccaccatccactacaactatatgtgcaactcaagctgcatggggggtatgaataggcgtcctattctgactatcatcacattggaggattcctcgggtaaccttttaggacggaactcctttgaagttcgggtgtgtgcctgccctggacgtgatcggcgcaccgaagaggagaatcttagaaaaaagggcgaaccccaccacgaactcccaccaggcagcaccaagcgggctctccccaataatacctcaagctcaccgcaacctaaaaagaagccattggatggtgagtatttcaccctccagattcgcggtcgggagaggtttgaaatgttcagggagctgaatgaagcgctagaactgaaagacgcccaggccgggaaggaaccaggagggagccgtgcacactcgtcccatttgaaaagtaagaaggggcagtccacttcacgtcataagaaactcatgtttaagacagaggggcctgactctgat

SEQ ID NO: 12324 - DNA, 1179 bp, Artificial Sequence
  derived and/or modified sequence
atggaggagccacagagtgatccgtctgtagaacccccgctctcgcaggagaccttctccgacctctggaagctcttgcccgagaacaacgtgctctcccctctccccagtcaggcaatggatgacctgatgctttcccccgatgatatagaacagtggttcacggaggaccctgggcctgatgaagcgcccagaatgcctgaggccgcaccccccgtcgcacctgcgcccgctgcgcccacaccagccgctcccgcacccgcccccagttggcctctgagctcctctgtgccctcccaaaaaacatatcagggatcttacggatttcggctgggattcctgcacagcggcactgccaaatctgtcacttgcacttactctccagccctgaacaagatgttctgccagttggcaaagacttgccctgtccagctatgggtggattcgacccctccacccggcacacgagtgagagccatggcaatttataagcaaagtcagcacatgacggaagtcgtgcggcgatgtccccaccacgagagatgctcagattccgacggactagcacccccccaacacttgattcgagtggaagggaatctgagggtggagtatcttgacgatagaaatacatttcgtcacagcgttgtggtaccctacgaaccaccagaggtcggcagcgactgcactactatacattacaactatatgtgtaattccagttgtatgggaggcatgaatcgacgtccgatccttaccattataactctggaggattctagcggcaacttactaggacgcaatagcttcgaggtgagggtctgtgcatgccctggcagagacaggcgaaccgaagaggaaaacttgcgcaaaaagggcgagccccaccatgagttgccccccggatccaccaagcgagccttaccaaataacacctccagctcccctcaacctaagaagaagcctcttgacggcgagtactttacactgcaaattcggggccgcgagcgtttcgagatgtttcgcgaactcaatgaggcactggaattgaaggacgcccaggccgggaaagagccaggcgggtctagggctcactcaagccacctgaaatcaaaaaaaggacagagtactagcaggcataaaaagttaatgttcaaaactgaggggccggatagtgac

SEQ ID NO: 12325 - DNA, 1179 bp, Artificial Sequence
  derived and/or modified sequence
atggaggaaccgcagtcggacccatccgtcgagccccctttgtcccaggaaactttttcggatctttggaagttgctgcccgagaacaacgtccttagcccactgccgagccaagctatggatgatctgatgctgtcgccggatgacatcgagcaatggttcacagaggatcccggtcccgacgaagcgccccggatgccggaagctgccccccccgtcgcaccagctcccgctgctcctacccccgccgcccccgcccctgccccgtcttggccgctcagcagctccgtgccctcgcagaagacgtaccagggctcgtatggtttcagactaggttttcttcactccggaaccgccaagtcagttacttgcacttactcacctgcgctgaacaagatgttttgccagctggccaaaacctgtcctgtgcagctgtgggttgacagtacgcccccccctggaacccgcgtccgcgccatggcgatttacaagcagagccaacacatgaccgaggtggtacgtcgctgtccacaccatgaacgatgtagcgactccgatggtttggcgccaccccagcacctcatccgagtcgagggaaacctccgcgtggaatacctggacgaccggaatactttccgccactctgttgtcgtgccctacgagccgccggaagttggcagcgattgtaccaccatccactacaactacatgtgtaatagttcctgcatgggaggcatgaatcgccggcccattcttaccatcatcaccttggaggattcttccggtaatctacttggacgtaattctttcgaggtgcgagtctgcgcatgtcccggacgcgatcgtcgtacggaggaggagaacttgcggaagaagggagagccccaccatgagttgccacctggttccaccaagcgcgctttacccaacaacacgtcttcgtcgccccagccgaagaagaagccattggacggcgagtacttcacccttcaaatccgtggacgtgaacgcttcgaaatgtttcgtgagttgaacgaggctctggaattgaaggatgctcaggcgggtaaagaacccggcggtagtcgcgctcattcatcccacctcaagtccaagaagggccagagtacgtctcgccacaagaagctaatgtttaagaccgaggggcctgacagcgat

SEQ ID NO: 12326 - DNA, 1179 bp, Artificial Sequence
  derived and/or modified sequence
atggaagagccacagtcggatccttccgtggaaccaccgctttcccaggagacttttagcgacctgtggaaacttcttcctgagaacaatgtgcttagccctctcccttcgcaggccatggatgacctgatgctttcacctgatgatattgagcagtggtttactgaggaccctggtcctgatgaagcgccaagaatgccagaggcagcacctcctgtcgcaccagcacctgcagccccaaccccggctgcaccggcgcccgcaccttcgtggcctctctcctcttcagtgccatcgcagaaaacctaccaaggaagctacggttttagactgggattcctgcattccgggaccgcaaagtccgtgacctgcacgtactcccctgcgctgaacaaaatgttttgccaactggcaaagacctgccctgtgcagttgtgggtggatagcaccccaccaccaggcactcgcgtgcgtgcaatggccatctacaagcaatcgcagcatatgactgaagtggtgcgtcggtgtcctcaccatgagagatgttcagactcagatggcctcgctccaccacaacatcttatacgggtcgaaggaaacctgagagtcgagtaccttgacgaccggaacacttttcgccattcggttgtggtgccctacgaaccgccagaagtgggtagcgattgcaccactatccactacaactacatgtgcaactcctcctgcatgggcggaatgaatcgccgtcctatccttaccattatcaccctcgaagattcctcgggaaacctgcttggtcggaactccttcgaagtgcgagtgtgcgcgtgtccaggtcgtgaccgcaggactgaagaagaaaacctgcgcaagaagggagaaccacatcacgaactgcctcctggatcaactaagagagcactgcccaacaatacttcaagctcacctcaacctaaaaagaagcctcttgacggagagtactttacgcttcaaattcgaggaagggaacgctttgaaatgtttcgcgaattgaacgaggccttggagctgaaggatgcccaagcaggcaaggaacctgggggctcacgagcccacagctcacatttgaagagcaagaaaggacaaagcacgtcaaggcataagaagctgatgttcaagaccgaaggtccggattcagat

SEQ ID NO: 12327 - DNA, 1179 bp, Artificial Sequence
  derived and/or modified sequence
atggaagaaccgcaaagcgaccccagcgtggaacctccgctgagtcaggaaactttctccgatctctggaagttgctgcctgagaacaacgtgctcagcccgctgccttcccaagcaatggacgatcttatgctgagcccggatgatatcgagcagtggttcactgaggacccaggccctgatgaggcaccacggatgcctgaggctgctcctccggtggcgccggccccagccgcgccaaccccagctgctccagcccccgccccgtcctggcctctgtccagctcagtgccatcgcaaaagacttaccagggatcctacgggtttaggctcggctttcttcactcagggactgccaagtccgtgacctgcacctatagcccggcgctgaacaaaatgttctgtcagctggcgaaaacttgtccggtccagctgtgggtcgacagcacccctccaccgggcactagggtgagggccatggcaatctacaagcaatcccagcatatgacggaagttgtgaggagatgcccgcatcacgagcggtgctccgacagcgacggcctggcgcctccgcagcacctcattcgggttgagggaaatctccgcgtggagtaccttgacgacaggaacaccttcaggcactctgtggtggtgccttacgaaccgccggaagtaggttccgattgtactaccattcactacaactacatgtgcaactcctcttgcatgggtggaatgaaccggcgccccattctgactattatcaccttggaggatagcagcggcaacctgctgggtcgcaattcatttgaagtcagagtgtgcgcatgccccggacgcgaccggcgcactgaggaggaaaacctccggaagaaaggagaaccacaccatgaactcccaccagggtccaccaagcgggctctcccgaacaatacgtcctcgagcccgcagcccaagaaaaagccgctcgacggggagtacttcaccctgcaaatccggggtagggagcgcttcgaaatgttccgggagctgaatgaagctctggagcttaaggacgcccaggcgggaaaggagccaggcggatccagagcccattcgtcgcacctgaagagcaagaagggccaaagcacctcacggcacaaaaagctcatgttcaaaaccgaaggaccggactccgac

SEQ ID NO: 12328 - DNA, 1179 bp, Artificial Sequence
  derived and/or modified sequence
atggaagaaccgcagagcgacccatctgttgaaccgccacttagtcaggagactttctcagacctctggaaacttctccccgaaaacaatgtcctgtcgccccttccaagtcaggccatggacgatttgatgctgagccccgacgatatcgaacagtggtttactgaggacccagggccggacgaagctccaagaatgcctgaagctgctccccccgtcgcaccagcacccgcggccccaaccccggctgcaccagcacccgctccatcctggcccctttccagctcagtgccgagccagaaaacttaccaggggtcctatggcttcagactcggcttcttgcacagtggtacagccaaatcagtgacatgcacctacagtccagctctcaacaagatgttttgccagctggccaagacttgccccgtgcagctgtgggttgattcaacaccccctcccggaacccgggtgcgggctatggccatctacaagcagagtcagcatatgaccgaggtcgtaagaaggtgtcctcaccacgagaggtgtagcgacagtgacgggctcgccccaccccagcatctgatcagagtagaaggtaatctgagagtggaataccttgacgatcggaacacattccggcatagtgtggtggtaccctatgaaccacctgaagttggctccgattgcaccaccatccactacaattatatgtgtaatagcagctgcatggggggaatgaatcgccgaccaatcctaacaatcattaccctcgaggattcgtccgggaacctgctgggccgtaactcattcgaggtacgcgtctgtgcatgccccggaagggaccggcgaaccgaagaggagaacttgcgtaagaaaggtgaacctcatcatgagctgcccccaggctccaccaaacgagccttacccaacaatacgtcctccagcccccagccaaagaagaaacctctggacggcgaatatttcacactccaaattagaggccgggagcgatttgagatgttccgcgagctgaacgaagccctcgagcttaaagatgcccaggctggtaaagagccgggcggaagccgcgcccactcttcacatcttaaaagcaagaaagggcagtccaccagtcgacacaagaaacttatgtttaaaactgaggggcccgactctgac

SEQ ID NO: 12329 - DNA, 1179 bp, Artificial Sequence
  derived and/or modified sequence
atggaagaacctcaatcggacccgagcgtcgagcccccactgtcccaggagacatttagcgacttgtggaagttgttgccagagaataacgttctgtcccccctgccgagccaggccatggacgacctgatgctctctccagatgatatcgaacagtggtttactgaggatccggggcccgatgaagcgccacggatgccggaggccgctccccccgtcgcgccagctcccgccgcacccacgcctgccgcccctgctcctgccccatcatggcctctgtctagttctgtcccctcacagaaaacatatcagggcagctacgggtttcgtctgggatttctgcactcaggaactgccaaaagcgtcacttgtacctactcaccggcgctgaataaaatgttttgccagctagctaagacatgcccagtgcagctgtgggtggattccaccccacccccagggacaagagtgcgcgccatggccatatataagcagtctcagcacatgaccgaggtagtacggcgatgcccacaccacgagcgatgcagtgactcagacggattggccccaccacagcatctcatccgtgtggaggggaacttgcgggtcgaatatctggacgacagaaacaccttcaggcattctgttgtggtgccgtacgaacctcccgaggttgggagcgattgtactacgatccattacaattacatgtgcaactccagctgtatgggtggaatgaataggcgcccaattctgactattattacactggaggactcctccgggaatctcttgggcaggaactcttttgaagtccgagtgtgtgcctgtcccggccgagacaggcgaaccgaagaggaaaacctgaggaaaaagggagaaccacatcatgagctaccgcctgggtctaccaagagggccctgcctaacaatacaagtagttctccacagcccaaaaagaaaccattggatggtgagtattttacgctgcagattcgaggtcgtgaacggttcgagatgtttagagagctaaatgaggctctggaactgaaggacgcccaggctggaaaggaaccgggcgggtccagggcccatagctcccatctcaagtctaaaaaggggcaatctacttcccgccacaaaaaactcatgtttaagaccgaagggccagacagtgac

SEQ ID NO: 12330 - DNA, 1179 bp, Artificial Sequence
  derived and/or modified sequence
atggaagaacctcagtcggacccatcggtcgaaccgccgctctcgcaggagactttctccgacctgtggaaactgctgccggagaataacgtcctgagcccactgccgtcacaggcaatggacgatctgatgctttctccggacgatatcgagcagtggtttaccgaggaccctgggccagacgaggccccgcgcatgccggaagccgcacctccggtggcacctgcgcccgccgcacccaccccagccgcacccgcgccggccccttcgtggccattgtcctcttcggtcccatcgcaaaaaacttaccagggatcatacggattccgcctgggattcctgcactcagggacggccaagtccgtgacctgcacctactcgccggccctgaataagatgttctgccagttggctaagacttgtccagtgcaactctgggtggatagcacgcctccgcctggaactcgggtccgagctatggctatttacaaacaatcacagcatatgaccgaggtggtcagaaggtgcccacaccacgagaggtgctccgactccgatggccttgcgccccctcaacatctgatccgcgtggaaggaaacttgcgcgtggaatatctcgatgatcgtaacactttcagacattcagttgtggtgccatacgaaccgccagaagtgggtagtgactgcactaccattcactacaattacatgtgcaactccagctgtatgggcggaatgaacagacgcccgatcctgaccatcatcactctcgaggacagcagcggtaacctccttggccgcaatagctttgaggtccgcgtgtgcgcgtgtcccggaagagatcggcggacggaggaagaaaacctccggaaaaagggagagccgcaccacgaactcccgcctgggtcgaccaagcgggcgctcccgaacaacacctcctcctcaccgcaaccaaagaagaagccgctggacggtgaatactttactctgcagatcagaggccgcgaacgcttcgaaatgttccgggagctgaatgaagcgttggagctgaaagacgctcaggccggaaaggaacccggaggctcgagggcccacagctcccatctcaaatcaaagaagggacaatccacctcgcggcataagaagctgatgttcaagactgagggcccggatagcgac

SEQ ID NO: 12331 - DNA, 1179 bp, Artificial Sequence
  derived and/or modified sequence
atggaagagccccagagcgatccttccgtggaaccgccactgtcccaggagactttttcagatctgtggaaactgctccctgagaacaatgtgttgtcgccgctgccgtcgcaggccatggacgacttgatgctttccccggacgatattgaacagtggttcaccgaggatccaggcccagacgaggcgccgcgaatgcccgaagcagcaccgcctgtggccccggcaccagccgccccaaccccagccgcccccgcgcccgctccgtcctggcctctgagcagcagcgtgccaagccaaaagacctaccagggttcatacggatttagactcggctttcttcacagcggaacggcaaaatccgtgacctgcacttactccccggcgctgaacaagatgttttgccagttggccaagacgtgcccggttcaactttgggtcgacagcacccctccaccaggaactagagtgcgcgcgatggcgatctacaagcagtcgcagcacatgaccgaagtggtgcgccggtgcccacatcatgaaagatgttcagactcagacggactcgccccaccgcaacatctgatcagagtggaaggaaatctgagggttgaatacctggatgatcggaacaccttccggcactcggtcgtggttccctacgaaccgccggaagtgggatccgactgcactaccatccattacaactacatgtgcaactccagctgcatgggcgggatgaacagacggcctatcctgaccatcataactcttgaagattcgtcaggcaatttgttgggccggaactcgttcgaggtccgggtgtgcgcttgtccgggacgcgaccggcggactgaggaagagaacctgagaaaaaagggcgagccgcaccatgagctgccgcccggatctaccaagcgagctctgccaaacaacaccagctcgtcaccacagcctaagaaaaaaccgcttgacggtgaatacttcaccctgcagatccgcggacgtgagcggttcgagatgttcagggaactgaacgaagcgctggagttgaaagacgcccaagccggcaaggagccgggaggtagcagggcccattcttcccatctcaagtccaaaaagggccaatcaacttcgcggcacaagaagctgatgttcaagaccgaaggcccggactccgac

SEQ ID NO: 12332 - DNA, 1179 bp, Artificial Sequence
  derived and/or modified sequence
atggaggaaccacagagcgacccctccgtggagcctccgctgtcgcaagaaacgttcagcgatctgtggaagctcctgccggaaaataacgtgctgtccccgctgccttcccaggccatggatgatctcatgctgtcacccgacgacatcgaacagtggttcactgaagacccagggcccgacgaagcaccccgcatgccagaggcggccccaccggtggccccagcaccagcggccccaacgccggccgccccggcgcctgcgccgtcctggccgctgtcgtcgagcgtgccgtcccagaagacctaccaaggatcatacggatttagactgggattcttgcattcaggaaccgctaagtcggtcacgtgtacctactcgcctgcattgaacaagatgttctgccagctcgccaagacttgcccggtgcagctgtgggtggattcgactccgccaccgggaaccagagtgagggctatggccatctacaagcagtcgcagcacatgactgaggtggtgcgccgatgcccacatcacgaacgctgctcggattccgacggacttgccccaccgcaacacctgatccgcgttgaagggaatctgcgggtcgagtacctggatgacagaaatactttccgccactcagtggtggtgccgtacgaacctccggaagtgggatcggactgcacgactatccactacaattacatgtgtaactcgtcgtgtatgggcgggatgaatcggcgcccgatcctgactatcatcactctggaagacagcagcggaaacctcctcggacgcaattcattcgaagtccgcgtttgcgcgtgtcccggaagggaccgccggactgaggaggagaatttgcggaagaaaggagagccacaccacgagctgccgcctggctcaacgaaaagagcactgccgaacaacacctcgagctcaccacagccaaaaaagaagccgctcgatggtgaatacttcactcttcaaatccgtggccgcgagcgcttcgaaatgttccgggaactgaatgaggcgctggagctcaaggacgcgcaggccggcaaagaaccgggcggaagcagagcccactcttcgcatttgaaaagcaagaaaggccagtccacgtccaggcataagaaacttatgtttaagaccgaaggaccagactcagac

SEQ ID NO: 12333 - DNA, 1179 bp, Artificial Sequence
  derived and/or modified sequence
atggaagagcctcagagtgatcccagtgttgagccccccttgtcccaggaaacgttctctgatctttggaagctgcttccggaaaacaacgttctgtccccccttccatcccaggccatggacgatcttatgctgagcccagacgacattgaacagtggttcaccgaggacccagggcctgacgaggctccccggatgcccgaagccgccccccccgtggcgccagccccagctgcgcccacacctgccgcgcctgcacccgcaccttcctggcctctgtcctctagcgtgccatcacagaagacctatcagggatcttatggctttcgactgggctttctgcatagcgggacagcgaaatctgtgacctgtacctatagccccgctttgaacaaaatgttctgccaactggccaagacatgcccagtacaactgtgggtggacagcactccaccacctggaaccagggtgcgggctatggctatctataagcaaagtcaacacatgaccgaagtcgtccgccgatgccctcaccacgaacgctgtagcgattctgacgggctcgcaccaccccaacatctgatcagagtggaagggaaccttagggtggaataccttgacgaccgaaatacgttccgccactctgtggtagtcccatatgagcctcccgaggtgggatctgactgtaccaccatccactataactatatgtgtaatagctcctgcatgggaggcatgaatagacgtcccattctcacaattataactctcgaagatagcagcggaaatctcctagggcggaactcattcgaggtgagggtgtgtgcctgccctggccgggaccgcaggactgaggaggaaaatctgcggaagaaaggggaaccacatcatgagttaccacccggtagcactaagcgagccttgcccaataatacttccagcagcccacagcctaagaaaaaacctttggacggcgaatacttcacgctgcaaatccggggtcgagagcggttcgagatgttcagggagctgaatgaagcgcttgaattgaaggacgctcaagcaggaaaagagcccggtggcagtcgcgctcattcctcgcacttgaagtcaaagaagggccagtcaacatcaagacataagaagctcatgtttaaaaccgaagggcccgatagcgac

SEQ ID NO: 12334 - DNA, 1179 bp, Artificial Sequence
  derived and/or modified sequence
atggaagagcctcagtcagacccctcagtggagcctcctctttcacaggagactttttcagacctttggaaattgctccccgagaacaacgtgctgtcgcctcttccttcccaagccatggatgatcttatgctttccccagatgatattgaacagtggtttaccgaggacccaggtccggatgaggccccccgaatgcctgaggctgctcctccggtggctccagcacctgcggctcccacgccggcagcaccggccccggcaccatcgtggcctctctcatcaagcgtgccatcacagaaaacttaccaaggtagctatggctttcggctcgggttcctgcactctggaaccgcaaaatccgtcacctgcacgtattcgccagcgcttaacaagatgttttgtcagctcgcaaaaacctgtccagtgcaactgtgggtcgacagcactccccctccaggtactagagtccgggcaatggcaatttacaaacaatcgcaacacatgaccgaagtggtgcggaggtgtccccatcatgagagatgctcggactccgatgggcttgccccgccccaacatctcataagggtggagggaaaccttcgggtcgaatacctcgatgatcgtaacaccttcaggcactctgtggtggttccctatgaaccgcctgaggtcgggtcagattgtactactattcattacaactacatgtgtaattccagctgtatggggggaatgaacaggcgccccatcttgaccattatcactctcgaagattcaagcgggaatttgctcggaagaaactcgttcgaagtccgcgtgtgtgcatgtcccggtcgcgatcgcaggaccgaagaagaaaacctcagaaagaagggggagccacatcatgaattgccccctggttccaccaagcgagcgctgcctaacaacacttccagcagcccacaacctaagaagaagcctctcgacggcgagtactttacgcttcagatccgcggcagggagagattcgaaatgtttagagagctgaatgaagcccttgaactgaaggacgcacaagcaggtaaggaacctgggggaagccgagcgcatagcagccatctgaagtccaagaagggacaatccacgtccagacacaaaaaacttatgtttaagaccgaaggtccagatagcgac

SEQ ID NO: 12335 - DNA, 1179 bp, Artificial Sequence
  derived and/or modified sequence
atggaggaaccacagagtgatccctctgtagagccaccattgagccaggaaaccttttcagacctctggaagctgctccccgagaacaatgtgctgtcgcctctgccctcgcaggcaatggacgacctgatgttgtctcctgatgacatagaacagtggtttacagaggaccctggccctgacgaagccccccggatgcctgaggctgcgcccccagttgcccccgctcctgctgccccaacgccagccgctcccgcgcctgctcccagctggcccctctccagctctgtgccctcccaaaagacttaccaaggtagttatggattcaggctcggctttttgcacagtggaacggctaaatcggtgacgtgcacttacagccccgctctaaataaaatgttttgccagctggctaagacatgtccagtgcagctgtgggttgatagcacacccccacctggcacacgcgtaagggccatggcaatttataaacaatcacagcacatgacagaagtggttaggaggtgtccccatcacgagcgttgttccgattcagacggtttggctccacctcaacatctgatccgagtggagggcaatctaagagtggaatacctggatgatcgcaatacatttcggcattccgtcgtggtgccctatgaaccgcccgaggtggggtccgattgtaccacgatacattacaactacatgtgcaattcgtcctgcatgggtggtatgaataggcgacccatcctgaccataatcactctggaagactcctcaggaaatctgctcggtcgaaactcatttgaagtccgcgtgtgcgcttgtccggggcgcgatcgccggaccgaagaagagaatctgaggaaaaagggggaaccccatcatgaacttccaccgggcagtaccaaacgggcactacccaacaataccagttcttcaccacagccgaagaagaagccactcgacggggaatacttcaccctccaaattagaggacgagaacggtttgagatgttccgggaactgaacgaagctctggaactgaaggacgcacaggctggcaaagaacccggggggagtcgcgcccactctagccatctgaaaagcaagaaggggcagagcacatcacgccacaagaagttaatgtttaagacagaagggcctgacagtgac

SEQ ID NO: 12336 - DNA, 1179 bp, Artificial Sequence
  derived and/or modified sequence
atggaagaacctcagtcagatccctctgtcgagccccccctaagtcaggagacctttagcgatctgtggaagctcctacctgaaaacaatgtcctatctccactgcctagtcaggccatggatgatctcatgttgtctccagatgacattgagcagtggttcacggaggatcccggacctgatgaagccccacgaatgccagaagctgcccctcccgtggccccagcccccgccgcacctaccccagctgcacccgccccggctcccagctggccactgtcctcttcggtgccttctcaaaagacctaccaagggtcatatggcttccgactgggctttctccatagcggaaccgccaagtccgtgacttgtacctattctccggcactcaacaagatgttttgccaactagctaagacctgccccgtgcagctctgggtggacagtacccctccacccggaacacgagtgcgggcaatggcaatatacaaacaaagtcagcacatgaccgaagttgtacggcgttgcccgcatcatgagaggtgcagcgattctgacggacttgcccctccgcagcatcttatccgagtggagggcaatctacgagttgagtatctggacgacagaaacacctttaggcactcagtggtggttccatatgagccgccggaagtgggttccgactgcactaccatccactacaattacatgtgtaacagctcctgcatgggaggaatgaatcgacgaccaattctgactatcatcaccctcgaagattctagcggaaatctcctcggccgaaattcctttgaagtgagggtgtgtgcctgccctgggcgagataggcgcaccgaagaggaaaatctgaggaagaaaggtgaaccccaccatgaactgccccccggttccactaagagagcgctccctaataatacgtccagctcaccacagccaaaaaaaaagccactggatggggaatatttcaccctgcaaataagaggacgggagcgttttgagatgttccgcgaacttaacgaggcactcgaactcaaggatgcacaggccggcaaggaacctgggggatctagagcacacagcagccaccttaagtcgaaaaaaggacaatcaacatcccggcacaaaaagctcatgttcaaaacggaaggcccggattccgac

SEQ ID NO: 12337 - DNA, 1179 bp, Artificial Sequence
  derived and/or modified sequence
atggaggagcctcaatcagatccgtcggtcgagcctcctctgagccaagaaaccttcagcgacctttggaaactcctccctgagaataacgtgctttccccccttccgtcgcaggcaatggacgatctgatgctctcccctgatgatatcgaacagtggtttactgaggacccaggccctgatgaggcccctagaatgccagaagccgcacctccagtggcacccgcacctgcagcgcctacccccgcagcaccagctccagcaccgtcgtggcctctttcatccagcgtgccatcgcaaaaaacttaccaaggctcatacggcttcagactcggattcttgcattcgggaactgcaaaatcggtgacttgtacttactcccctgcgcttaacaagatgttttgtcaacttgcaaaaacctgtccagtgcagctgtgggtcgattccactccgccgcccggaacccgggtgagggcaatggcgatttacaagcaatcgcaacatatgaccgaggtggtgagacgctgcccccatcacgaacggtgtagcgattcggatggtctggcaccaccccaacatctcatcagagtggaagggaatctgcgtgtcgaatatcttgacgatagaaatacctttcggcatagcgtggtggtgccatatgagccacctgaagtgggcagcgattgcacgaccatccattacaactacatgtgcaattccagctgcatgggaggcatgaatcgtaggcctatccttactattatcacccttgaagattcatccggaaaccttctgggtagaaacagcttcgaagtgagagtgtgcgcctgcccaggaagagatcgccgcactgaggaagagaaccttcgcaaaaaaggagaacctcatcacgaactgccacctgggagcaccaagcgggcccttccaaacaacacttcgtctagccctcaacctaagaaaaagccactggatggtgagtactttaccctgcagattcgaggtcgggagcggtttgagatgtttcgggagctcaacgaggctctcgaattgaaggacgcacaagcaggcaaagaacccggtgggtcgcgggcacactcatcgcatcttaagtcgaagaaaggccaatcaacttccagacacaaaaagctcatgtttaagactgaaggacctgactccgat

SEQ ID NO: 12338 - DNA, 1179 bp, Artificial Sequence
  derived and/or modified sequence
atggaagagccacagtcggaccctagcgtggagccacctctcagccaagagaccttttccgacttgtggaaactgttgcctgaaaacaatgtgctaagtccccttccgtctcaggccatggacgacctcatgctgtctccagacgacatcgagcaatggtttacagaggacccagggcccgacgaggcgcccaggatgccggaggctgcccccccagtggcccctgcccccgccgcccccacaccagctgctccggctccggccccttcctggcccctctcaagctccgtaccctcacagaagacttatcagggaagctacgggttccgccttggcttcttgcatagcgggaccgccaaatcagtaacttgcacatatagccccgctttgaacaagatgttctgccaattagccaagacctgtccagtgcagctgtgggtggacagcacgccacctcctgggaccagggtgagggcaatggccatttacaaacaatctcagcatatgacggaggtggttcggaggtgcccacatcacgagaggtgtagcgacagcgatggcttggctccgccacagcatctaatcagggtcgagggtaaccttcgcgttgaatacctcgacgaccgcaatacattccggcactccgttgtggtgccttatgaacctcctgaggtgggatctgattgcacaaccatccactacaattacatgtgtaactcaagctgcatgggcgggatgaatagaagaccaatacttacaataatcactctggaggactcctcggggaacctcttggggaggaatagcttcgaggtcagggtttgtgcctgtccgggcagagaccgcagaacagaggaagagaatctgcgtaaaaaaggcgagccccatcacgaattaccacctggctccacgaaaagggccctccctaataacacctcatcttccccacagcccaagaaaaaaccgctggacggggagtattttaccctgcagatcagaggaagagaacggttcgagatgtttcgggaacttaacgaggcacttgaactcaaggatgctcaggcagggaaagagcctgggggatccagggcccactccagtcaccttaaatctaaaaaaggccagtctacctctaggcacaagaaactgatgtttaaaactgaaggaccagacagcgat

SEQ ID NO: 12339 - DNA, 1179 bp, Artificial Sequence
  derived and/or modified sequence
atggaggaaccacagtccgatccatccgtggaacccccgttgtcccaggaaacttttagcgacctgtggaagctgctgcctgagaataacgtgttgtctcctctgccaagtcaagctatggatgacctgatgctttcccccgacgatattgagcaatggtttaccgaagaccctggacccgacgaggccccccggatgcccgaagccgccccgcccgtagcccctgcccctgcagcccccactccggccgctccagctcccgcacccagctggccactgtccagttccgtcccgtctcagaagacctaccaggggtcttatggctttcggctgggattcctgcattctggcactgcgaaaagtgtgacctgcacttactctcccgcccttaataagatgttttgtcagctggcaaaaacgtgtcccgtgcagctctgggtagactccaccccccccccgggtacccgggttcgagcaatggcaatttataagcagtcacagcatatgaccgaggtagttcgtaggtgtccacaccacgaaaggtgctctgactctgatgggttggcgcccccgcagcacttgataagggttgagggaaatctgcgggtggagtatctcgacgataggaatacattccggcattctgtggtggttccctatgagcctccggaagttgggtcggactgtaccacaatccattacaactatatgtgcaactcctcctgcatgggaggtatgaatcggaggcctatcctcaccattattaccctcgaagacagctcaggtaatttgctggggaggaacagttttgaggtgcgtgtttgtgcctgcccagggcgcgacagacggacagaggaggaaaacctgcgaaaaaagggtgagccgcaccacgaactgcccccagggtcaaccaagcgagcgctgccaaataacacctctagctctccccagccgaagaagaaaccgctcgacggggagtatttcacattgcagatccggggcagagagcgatttgagatgtttcgggagctgaatgaggccctggaactgaaagatgcccaagccggcaaagaacctgggggcagtcgtgcgcatagttcccacttgaaaagcaaaaagggacagagcacttcaaggcacaagaaactaatgtttaagaccgagggtcccgacagcgat

SEQ ID NO: 12340 - DNA, 1179 bp, Artificial Sequence
  derived and/or modified sequence
atggaggagcctcagtccgatccaagcgttgaaccccctctgtcccaggaaacattttccgacctgtggaagctcttgcctgagaacaatgtactctcacctctgccctctcaggctatggacgacctgatgttgtcaccagatgatatcgagcagtggttcacagaagacccagggccggatgaggcacctagaatgccagaggccgccccgccagtagctcctgcaccagccgcccccacaccggcagcacctgcccccgccccatcctggcccctgagcagtagcgtgccctctcagaagacttaccaggggagctacgggtttaggctgggatttctgcattccggcaccgccaagagcgttacttgtacatacagccctgccctcaataagatgttctgtcaactggcaaagacctgcccggtgcaactttgggtggacagtacaccaccccccggaactcgagtgagggctatggctatctacaaacaatcacagcacatgaccgaggtcgttaggcggtgcccgcatcacgaaaggtgcagcgatagcgatggcctggcacctccacagcatctcatcagggtagaaggcaacctgcgagtcgagtatctcgacgaccggaataccttccgccattccgtggtggtgccctacgagcctcccgaggtgggcagtgattgtaccacaatccactataattacatgtgcaattcatcttgtatgggcggcatgaatagacggccgatcctgactatcatcacactcgaggacagctccgggaatttgcttgggaggaactcattcgaagtgcgcgtatgtgcttgccctgggagggacaggcgaaccgaagaggaaaaccttaggaagaagggggaaccccatcacgaacttccaccaggtagcactaaaagggccctccctaacaacacctccagtagtccgcagccgaagaagaagccactcgacggcgagtattttactctgcagatccgcggacgcgaaaggtttgagatgtttagagagctgaatgaagccctggagttgaaggacgcccaggctggaaaggaaccggggggcagcagggcccactcatcacacttgaagtcaaaaaagggtcagagcactagccggcacaagaaactgatgttcaagacggaaggtccagattcagac

SEQ ID NO: 12341 - DNA, 1179 bp, Artificial Sequence
  derived and/or modified sequence
atggaagagccccaaagtgatccatccgtggagcctcccctctctcaggaaacattttcagacctgtggaagttactaccagagaataatgtgctttcgcctcttccatcacaggctatggacgacctaatgttgagcccagacgatatcgaacaatggttcaccgaagatccaggccctgacgaggcaccgagaatgcccgaagccgcccccccagtggcccctgcgcccgccgctccaacacctgcggctcctgcccccgccccgagctggcccctgtctagttcggtgccgtcccagaaaacctaccaggggtcctacgggttccgcttggggttcctacattctggcactgcaaagtcagtgacatgtacctacagtcccgctcttaacaagatgttttgccagcttgcaaaaacctgtcccgtgcaattgtgggttgattctactcccccccctggcacacgcgtgcgtgcgatggcaatatacaagcaaagtcagcacatgacggaggttgttaggagatgtccgcaccacgaacggtgtagcgactctgatggactggccccgccacagcatctgatcagggtcgaggggaacctgcgtgttgagtatctcgacgaccggaatactttccgtcactctgtggtcgtaccatatgagccaccagaggtaggctccgattgtaccacgatccattacaactacatgtgtaatagctcttgtatgggtggaatgaataggagaccaattctgactatcatcacgctggaggattcgtcggggaatctcttaggacgaaactcttttgaagtccgtgtgtgtgcgtgccctggtcgcgatagacgtaccgaagaggagaatttgcgtaaaaaaggtgagccccatcacgagctcccccccggatccaccaaacgggcccttcccaacaatactagtagttctcctcagcccaaaaaaaaaccacttgacggggagtattttacgctgcagattagaggtcgggagcgtttcgagatgttccgggagctcaatgaagccctcgagctcaaggacgcccaggccggcaaggagcctgggggaagtagggctcatagttcccacctgaagtccaaaaaaggtcagtctacctcccgtcataaaaagctgatgtttaagacagaaggaccagattcggac

SEQ ID NO: 12342 - DNA, 1179 bp, Artificial Sequence
  derived and/or modified sequence
atggaggagccacagtctgaccccagcgtcgagcccccattgtcccaggaaacgttttctgatctctggaagttgctccccgaaaacaacgtgctgagtcccctcccctcacaggctatggacgacctgatgctttccccagatgatattgagcaatggttcaccgaggatcctggtcccgacgaggccccgaggatgccggaagctgcaccaccagtcgctcctgcaccagccgccccgacgccggcagctcctgctccagcgcccagctggcctctgtcctcatcagttccctctcagaaaacttatcaaggatcatacggcttcagactgggattcttgcattcaggaactgctaagtccgtgacctgcacatactcacccgctttgaataagatgttttgccagttggccaagacatgccctgttcagctctgggtggatagtacccctccccccggtacccgcgttagggccatggccatctacaagcagtcccagcacatgactgaggtagttagacgctgccctcaccacgagaggtgcagtgatagtgacggactcgcccccccacagcacctgatcagagttgaaggaaatttgagggtcgagtacttggacgacagaaatacattcagacactccgtagtcgttccttacgagcccccggaggtcggatctgactgtactacaattcactacaattatatgtgcaactcttcttgcatgggcggaatgaatagacgcccaatccttactatcattacgctggaggactcttcaggaaacctcctcggcagaaactctttcgaggtcagggtctgcgcctgccccggtcgcgaccgcagaactgaggaggagaacctgaggaaaaagggtgagcctcaccacgagctgcctccgggttcaacgaagagggctttgccgaacaacacctcttccagcccgcaacccaaaaagaagcccctggacggtgaatacttcaccctgcaaattaggggtagggagaggttcgagatgttcagggaattgaatgaagccttggaactgaaagacgctcaggcaggcaaggaaccaggaggttccagggcacattcttcacaccttaaatctaagaagggccagagcacaagccgccataagaagctgatgtttaagacggagggtccggacagtgac

SEQ ID NO: 12343 - DNA, 1179 bp, Artificial Sequence
  derived and/or modified sequence
atggaagaacctcaatcggacccatcagtcgaaccacccctgagccaggaaacctttagcgatctctggaagttgctgcctgagaataatgtgctgtcgcctctgccaagccaggcaatggacgaccttatgctgagtcctgatgacatcgaacaatggttcactgaggacccaggacctgacgaggccccacgaatgcccgaagcagcaccgccggtggcccctgctccggcagcccccactcccgcggcccccgccccagctccctcctggcctctttcctcaagtgtgccatcgcaaaagacttaccagggctcatatggttttcggcttggattcctccactccggaacggcaaaatccgtgacgtgtacttactcaccggcactgaacaagatgttctgtcaactggcaaaaacttgtcccgtgcagctctgggtcgattcgactcctccgcccggcacccgggtcagagcaatggcaatctacaaacagtcccaacacatgactgaagtcgttagacggtgtccccatcacgaaagatgctcggatagcgatggtttggcacctccacaacacctcatcagagtggaggggaaccttcgtgtggaatacctcgatgatcggaacacctttcggcattccgtggtggtcccttacgaaccacccgaggtgggatctgactgtactactatacattacaattacatgtgcaacagctcctgtatgggaggcatgaacaggaggccaattctcaccatcattacgctcgaagatagctccggaaaccttctcggaagaaacagctttgaagtgcgtgtgtgcgcatgcccaggacgggacagaagaaccgaggaagagaatcttcgaaagaaaggcgagccacatcacgaacttccacctgggtcgaccaagcgagcccttcctaacaacacttcctcgtcccctcagccaaagaagaagccgttggatggagagtactttacgctgcaaataagaggcagagaacgatttgaaatgtttcgagaactcaacgaagcactggagctgaaagatgcacaggcgggcaaggagcccggaggatcgcgtgcacatagctcccacttgaaaagcaagaagggacaatcgacctcccggcacaagaagttgatgtttaagaccgaaggacctgattctgat

SEQ ID NO: 12344 - DNA, 1179 bp, Artificial Sequence
  derived and/or modified sequence
atggaagagcctcagtctgatccatcggtggaacctccacttagccaggaaacgttctcggatctttggaaactccttcccgagaataatgtgctgtcgccccttccttcccaagcaatggacgatctcatgctctcacctgacgatattgaacaatggtttactgaggacccaggaccagacgaggcacctcgaatgcccgaggcggcacctcccgttgcaccagcgcctgctgcgcctactccagcagcacctgcacctgcaccctcgtggcctctctcatccagcgtccctagccagaaaacttatcagggctcctacgggtttcgactcgggtttttgcattcaggaactgcaaaatccgtgacttgcacctactcgcccgcacttaacaaaatgttttgtcagctcgccaaaacctgtcctgtgcaactgtgggtggattcgactccccctcctggcactcgtgtcagagcaatggctatatacaagcagtcgcaacatatgactgaagtcgtgaggcgctgtccacaccacgaacgttgttcagattctgatggacttgccccaccacaacatctgatcagagtggaaggcaaccttagagtggagtacctggacgataggaacacctttaggcacagcgttgtggtgccatacgaaccaccggaggtcggctcggattgtactactatccattacaattacatgtgcaactcatcctgtatgggtggtatgaatagacggccgatcctgaccattatcactcttgaagattcgagcggaaacctgctgggccgaaactcgtttgaagtcagggtctgtgcgtgtcctggtcgagatagaagaacggaagaggagaaccttcggaagaaaggagaaccccatcatgagctgccacctggatccaccaagcgcgccctgcccaataacacctcttcgagcccgcaaccgaaaaagaagccgctggacggcgagtactttaccttgcaaatccgaggtcgggaaaggtttgagatgtttagggaactcaacgaagcactggaactgaaagacgcacaagcaggaaaggaacccggtggttccagagctcactcatcacatctgaagtcgaagaaaggacagtcaacctccagacacaagaaacttatgttcaagaccgaaggcccagattccgat

SEQ ID NO: 12345 - DNA, 1179 bp, Artificial Sequence
  derived and/or modified sequence
atggaagaacctcaatcggatccgagcgtggaacctcctttgagccaagaaaccttttccgatctgtggaagctcctcccagaaaacaacgtgctctcacccttgccatcgcaggccatggatgatctgatgttgtcgccagacgacatcgaacaatggtttacggaggatcccggcccagatgaagcccctcgtatgcctgaggccgcgccgcctgtggcccccgcaccagcagcccccactcctgcagccccggccccagcaccaagctggccactttcctcctccgtgccaagccagaaaacttaccagggttcgtatggttttcgacttgggtttctccactcgggcaccgcaaagtcggtgacttgtacttactccccggcactcaacaaaatgttttgtcaattggcaaagacttgtccagtccagctctgggtggatagcaccccaccgccaggtacgagagtgcgcgcgatggctatttacaagcagtcacaacacatgacggaggtcgtgcgaagatgcccacaccacgaacgatgttcagactccgacgggctggcaccaccacagcatcttattagagtcgaaggaaatctgagggtggaatatctggatgaccgaaacacctttcgtcattcagtggtggtcccttacgaacctcccgaggtgggctcagattgtactaccatacattacaactatatgtgcaactcgtcctgtatgggtggtatgaaccggcgacccattctgaccatcataacccttgaggactcaagcggaaaccttcttggtcggaactcctttgaagtgagagtgtgcgcatgcccaggaagggatagaaggaccgaagaagaaaatctccgcaagaagggcgagccccatcatgagcttccgcctgggtctactaagagggcactgccaaacaatacctcgagctccccacagccgaagaagaagcctctggatggagagtacttcactctgcagattagaggtcgcgagagatttgaaatgtttcgagaactgaatgaagcactggagcttaaagacgcacaagccggaaaagaacctggagggagcagagcccatagctcacatcttaagtccaagaaaggacaatcgactagccgtcataagaagctgatgttcaaaactgaaggcccggatagcgat

SEQ ID NO: 12346 - DNA, 1179 bp, Artificial Sequence
  derived and/or modified sequence
atggaagagccccaatctgacccgagcgtggaaccccctctatctcaggagacttttagtgatctgtggaagttgctgcccgagaacaatgtgctctccccgctccccagtcaggcaatggacgacttaatgttgagtcctgacgatattgagcagtggtttaccgaggaccccggtccggatgaagccccaagaatgcctgaggctgcgccccccgtggcccctgctccagccgcacctacgcccgccgccccagcaccggctccatcctggccactcagctctagtgtgcccagccagaagacctatcagggcagctatggattccggctcggctttcttcattcaggtacagccaagtcagtgacttgtacctattctccagcactgaataagatgttctgccagctagccaagacgtgccctgttcagttgtgggtggatagtactccccctcctggcactagagtgcgggctatggccatctacaagcagtcacagcacatgaccgaagtggtgcgaaggtgtccccaccatgagagatgttccgactcggacggcctcgctccgcctcagcatcttattagagtcgagggcaacctgcgcgtggagtatctggacgataggaatacttttcgccattcagtggtggtgccgtacgaaccgcccgaggtgggttctgattgtactaccattcactataattacatgtgcaatagcagttgtatgggaggtatgaatcgacgtccaattctgacaattatcacattggaagactcttctgggaatcttcttggaaggaactcttttgaggtcagagtctgtgcatgtccgggacgcgacaggaggaccgaggaggagaacctgcggaagaagggtgagccacaccacgagttgcctcccgggtccactaagagagctctccccaataacacgagttctagtcctcagcccaagaaaaagccactggacggagagtatttcaccctgcagatccgcgggcgtgaaaggttcgaaatgttccgcgaactaaatgaggccctagagcttaaagatgcccaggctggcaaagagcctggcggaagcagagcccattcctcacacttgaaatctaaaaaaggacagtcaacctcgagacacaaaaagctcatgttcaaaactgaagggcctgatagcgat

SEQ ID NO: 12347 - DNA, 1179 bp, Artificial Sequence
  derived and/or modified sequence
atggaagaaccacagtctgatccctcagtggaaccccccctgagtcaggagacattttctgatctatggaaactcctaccagagaataatgtgctatccccacttccttcccaggccatggatgatctaatgctttcacctgatgacattgaacagtggtttactgaagaccctgggcccgatgaagcccctcggatgcctgaagcagcaccaccagtggccccagctcctgctgctccaacacctgcggccccagccccggctcctagttggcctctatcctcgtccgtcccctctcagaaaacttatcaggggtcctacggatttaggctcggattcctccattctgggacagccaaatccgtcacatgcacatattctccagccctaaataaaatgttctgtcagctggccaaaacatgtcccgtgcagctctgggtcgatagtacaccccctcctggaactcgcgtgagagctatggctatatacaagcagagtcagcatatgactgaagttgtccgtagatgtcctcaccacgagcgatgctcggatagtgatggactcgcccccccccagcatcttattcgcgttgagggaaacctgagagtagagtatctagatgatagaaacacattccggcacagtgtggtagtgccgtatgaaccacctgaagtcgggagtgattgcactactattcattataattatatgtgtaactcaagttgcatgggggggatgaatcgccggccaattctcacaatcataactttagaggatagttcaggaaatctgctcggaagaaatagttttgaggtacgggtctgtgcgtgccctggacgagatagacggactgaggaagaaaaccttagaaaaaagggagaacctcatcacgaactgcccccaggatcaacaaaaagggctctcccaaataatacgtcatcctcaccacagcccaaaaagaaacctctcgatggagaatattttacgttgcagattagaggaagagaaaggtttgaaatgttccgcgagctcaatgaagcactggaacttaaagatgcccaggcggggaaggagccaggagggtcacgcgcacactcatcacatctaaaatctaaaaaaggacagtctacatctcggcataaaaaactcatgttcaaaactgaggggcccgattcagat

SEQ ID NO: 12348 - DNA, 1179 bp, Artificial Sequence
  derived and/or modified sequence
atggaggaaccacagagcgacccttctgtggagcctcccctgagccaagaaacctttagcgacctgtggaagcttctgccagaaaataacgtgttgtcgcctctgccttcacaggcaatggacgatctgatgctaagcccagacgacatcgagcagtggttcaccgaggaccctggccccgacgaagccccccgcatgcctgaagctgcaccccccgtggcccctgcccccgccgcaccgacccctgcggccccagcaccagctccttcttggccactctcatccagtgtaccaagccaaaagacctaccagggctcctatggattccggttggggttcctgcacagcggcaccgccaaatctgtgacttgtacatacagccctgcattgaacaagatgttctgtcagcttgctaaaacatgccccgtgcagttgtgggtggacagtacgcctccccctggaaccagagtccgagccatggcgatttacaaacaaagtcagcacatgacggaggtcgtgaggaggtgtccccaccatgagcgttgttcggatagtgacggccttgcccccccccaacatctgatcagggtggaagggaatctaagggtcgagtatctcgacgaccgaaacacttttaggcattcagtagtagtgccttatgagccccctgaagtgggcagtgattgtacaaccatccactataattacatgtgtaattcgagctgcatgggtgggatgaataggcggccgattcttactattatcacacttgaggattcttctggaaatctgctggggcggaattcgtttgaggtgcgagtctgcgcgtgccccggccgagaccgcaggactgaggaggaaaatctgcgtaagaagggcgagccccatcatgaacttcctcccgggtctaccaagagagccttgccgaacaacacaagctcctccccccaaccaaaaaaaaagcccctggatggcgagtacttcactttgcagatccggggtagagagcgatttgaaatgttcagggaacttaacgaggctctcgagctcaaggacgcccaggcaggaaaagagcccggtgggtccagggcgcacagtagccatctgaaatctaagaagggtcagagcacaagtcgtcataaaaagttgatgtttaagactgagggtcccgactcagat

SEQ ID NO: 12349 - DNA, 1179 bp, Artificial Sequence
  derived and/or modified sequence
atggaagaaccgcagagcgacccgtcggtcgagccaccgctctcccaagaaaccttctcggacctttggaagctcctcccggagaataatgttttgtctccgttgccgtcccaggctatggacgatctcatgctgtcccccgatgacatcgaacaatggttcactgaagatccaggaccagatgaagctcctagaatgccggaggccgcgccgcccgtggccccggctcccgccgctcccactcctgccgctcctgccccagcaccatcgtggccactctcgtcatcagtcccgtcgcaaaagacctaccagggatcctacggattccgccttggcttcctgcattcaggaaccgcaaaatctgtgacgtgcacctattccccagcactgaacaaaatgttttgtcagttggcaaagacctgcccggtgcagctgtgggtggactcgactccgcctccgggaacccgggttagagcaatggccatctacaaacaaagccagcatatgactgaggtggtccggcgctgtccacatcacgaacgttgcagcgactcagacggcctggcgcctccccagcacctgatcagagtggaaggaaatctgcgggtggagtacctggacgatcgcaataccttcagacattcggtggtcgtgccgtacgaaccaccagaagtgggaagcgattgcacgaccatccactacaattacatgtgtaacagctcatgcatggggggtatgaataggcggccgattcttactattatcactctggaagattcaagcggaaatttgctcggaaggaactcctttgaggtcagggtgtgcgcttgcccgggccgggaccgtcgaacggaagaggagaatctccgcaaaaagggggagccccaccatgagctgccccccggaagcactaagagggccctgcctaacaatacgtcgtcgagcccgcagccgaagaagaagcctctggacggcgaatacttcactctccaaataaggggacgagaaagattcgaaatgtttcgcgagcttaacgaggctctcgaactcaaagacgcccaagccggtaaggaaccggggggttcgagagcgcactcctcacaccttaaatcaaagaaggggcaatcaacctcccgccacaagaagctgatgttcaagaccgaaggaccagattcggac

SEQ ID NO: 12350 - DNA, 1179 bp, Artificial Sequence
  derived and/or modified sequence
atggaggagccacaaagcgacccctctgtggagccccccctttctcaagagaccttctcagacctttggaaactcttgccggagaataacgtgctgagcccattgccctcccaggccatggatgaccttatgctgtcccccgatgacattgagcagtggttcactgaggaccccggcccggacgaggcaccacgcatgcccgaggctgccccgcccgtcgccccggcacctgctgcaccaacgccggccgcccccgcacctgctccctcatggcccctcagtagtagcgtaccgtcccagaagacttaccaaggcagctatggttttagactcggctttctccacagtggaacggccaaatccgtcacatgcacatattcacccgcacttaacaagatgttctgccagctggctaagacttgtccggttcagctgtgggtggattccactccaccccctggaacacgggtgagagccatggccatatataaacagtcacagcatatgactgaggtagtcagaaggtgccctcaccacgaaagatgcagcgactccgatggtttggccccgccccaacatctcattagggtggagggcaacctgcgcgtcgaataccttgacgaccgaaacacgtttcgccacagtgtagttgtcccttatgagccccccgaggtgggatccgactgtaccaccatacactataactatatgtgcaatagttcatgcatgggcggtatgaacagacggcctatcctgaccatcatcaccctggaagattcaagcgggaatctgcttggacgcaatagctttgaggtccgggtgtgtgcctgtcctggaagggacaggagaaccgaagaagaaaatctgcggaaaaagggcgaaccacatcacgaactcccgccggggagtacgaaaagagcactcccgaataacacatcttccagcccccaaccgaaaaagaaacccctcgatggcgaatatttcacactgcagatcagagggcgcgagaggttcgaaatgttccgggaacttaatgaagccctcgagctgaaagatgcccaggccggaaaggagcctggagggtccagagcccatagctcacacctcaagtcaaaaaaaggacagagtacgagcagacacaaaaaattgatgtttaagactgaaggacctgactctgat

SEQ ID NO: 12351 - DNA, 1179 bp, Artificial Sequence
  derived and/or modified sequence
atggaagaaccccagagtgacccgtcagtcgagccaccgttatcacaagagactttttccgacctatggaagctgttgccagagaacaacgtgctgtcaccactcccaagccaagcaatggacgacctgatgctgagtcctgacgacattgagcagtggtttacagaggatccaggaccggacgaagcgccacgtatgcccgaggccgctccccccgttgcccccgcccccgctgcacctacacctgcggccccagcacccgccccctcttggcctctgtctagcagcgtgccatctcaaaaaacctaccaggggtcatacggtttcagactggggtttctgcactccggtacagctaaatcggtgacctgcacatactccccggccctgaataagatgttctgtcagctggctaagacatgtcccgttcagctatgggtagactcgactcctcctcctggcacccgcgtgagggcaatggccatctacaagcagtcacagcatatgaccgaggttgttcggaggtgtccgcaccatgaaaggtgctccgattccgacgggctcgcgcctccccaacacctaatacgcgtagaaggcaatctgcgggtagagtacctggatgatcggaacactttccggcactccgtggtagtgccttacgagcctcccgaggtgggcagtgactgtactactattcactataactacatgtgcaatagcagctgcatggggggaatgaacaggaggcccattcttaccattatcaccctggaggatagctctggtaacctgctcggacggaatagcttcgaggtgagggtgtgtgcttgccccggtcgtgatagacgcaccgaggaagagaatttgcgcaagaagggggagccgcatcatgaactaccacccgggtccaccaaaagggctctgcccaataatacttcaagttccccccaaccgaagaagaaaccattggacggcgagtattttaccctccaaatcagaggtagagagcgattcgaaatgttcagagagctgaatgaggccctggaactcaaagatgctcaagcagggaaggagcccggaggatcacgggcccactcttcccacttaaaaagcaaaaaggggcaatctacgtcacgccataagaaactcatgttcaagacggaggggcctgatagtgac

SEQ ID NO: 12352 - DNA, 1179 bp, Artificial Sequence
  derived and/or modified sequence
atggaggaaccccaatccgatccatcagtagagcccccgctgagccaagaaactttttccgatctttggaagctactccctgaaaataacgtcctttccccccttccaagccaagctatggacgacttgatgttgtcccctgacgacatcgagcaatggtttacagaagatcccggcccagacgaagctcccaggatgccagaagcagcccctccggtggcgccggcaccggccgctccaactcctgcggcccccgctccagcgccctcttggccgttgtcgtcctcagtcccgagccagaagacgtaccagggctcgtatggatttcgtcttggattcctacattctggaaccgccaaatccgtaacctgtacctattcgcctgcccttaataagatgttctgccagttggctaagacgtgtcctgtgcagctttgggtggacagcactcctccacctgggactcgggtacgtgctatggctatttacaagcagtctcagcacatgacagaggtcgttcggcgctgtccccatcacgaacgctgttcggattcggatggccttgccccaccccagcacctgatcagagtcgagggaaatctccgagtggaatatttggatgaccgaaacaccttccgtcatagtgtcgtggttccctacgagcctccagaggtgggtagcgactgcaccactatccattacaactacatgtgcaatagctcctgtatgggaggcatgaatcggagacccatacttacaatcatcactttagaggattcctctggtaacttgttgggccggaacagcttcgaagtgcgtgtgtgcgcgtgtccgggccgcgatcgtcgcacagaagaagagaatcttcggaagaagggggagccccaccatgagttgccacctggcagcacaaagcgagcgcttccgaataacacaagttcaagtccccaaccaaaaaaaaagcctcttgatggagagtacttcacgttgcagattagaggccgcgagcgcttcgagatgttccgggagctcaacgaagccctggagctaaaggacgctcaggcaggaaaggaacccggtggttcccgcgcccactcttcccatcttaagagcaagaagggccagtctacatctagacataagaagctgatgtttaagacagaaggacctgattcggat

SEQ ID NO: 12353 - DNA, 1179 bp, Artificial Sequence
  derived and/or modified sequence
atggaggagcctcagtccgatccttcggtggaaccacctctgtctcaagagactttttccgatctttggaaacttctgccagaaaacaacgtcctctcccctctgcctagccaagcaatggacgacttgatgctgtcgcctgatgatattgaacagtggtttaccgaggatccgggtcctgatgaagcccctagaatgcccgaggctgcgccccctgtggccccggcacccgccgcacccacccccgcagcgcccgcacctgccccatcctggcctctgtctagctcagtcccttcgcaaaaaacttaccaaggttcgtacgggttccgcctcggctttctgcattcgggaacggcgaaatcggtgacttgtacttactcgcctgcactgaataagatgttctgtcagcttgctaaaacttgtcctgtgcaattgtgggtggattcgactcccccaccagggacccgggtgagagcgatggcaatttacaagcagtctcaacacatgactgaagtggttagacggtgcccacaccatgaacggtgttcggatagcgatggtcttgcaccgccccagcatctgatccgcgtggaaggcaaccttcgcgtcgaatacctcgacgacagaaatacttttcgtcacagcgtggtggtgccatacgaacccccagaagtagggagcgactgtacgaccatccattacaattacatgtgtaacagctcgtgtatggggggaatgaacaggaggccaatattgaccattatcactctcgaagatagctcaggtaatcttctcggtcgcaactcgttcgaggtgcgggtgtgcgcctgcccagggcgggatcgccgcaccgaggaggagaatctcaggaaaaagggagaaccccaccatgagctcccacctgggtccacgaagagagcccttccgaataacacctcaagctcgccacagccaaaaaagaagccccttgatggtgaatactttacccttcagattagaggaagagagagatttgagatgttcagggaactcaacgaggcactggagcttaaggatgcacaggcaggaaaggaaccaggtgggtcgagagcacatagctcccaccttaagtccaagaagggtcagtcgacgagcagacacaagaagctcatgttcaagactgaaggtcctgatagcgat

SEQ ID NO: 12354 - DNA, 1179 bp, Artificial Sequence
  derived and/or modified sequence
atggaggaaccgcagtccgacccctcggtcgaacctcctctctcgcaggaaaccttctcggatctttggaaacttctgcccgaaaacaatgtcctgagccctctcccctcccaggcaatggatgaccttatgctttcaccggacgatatcgaacagtggttcaccgaagatcccggacctgacgaagcaccacggatgccagaggcagcgcctccggtggcccccgcaccggcggcccctactccagcagcacctgcaccagcaccttcttggccactgtcgtcgtccgtgccgtcacagaaaacctatcagggctcatacggttttagactgggattcctgcattcagggaccgccaagtcagtgacttgcacctactcccctgcactgaataagatgttttgtcagctggctaagacctgcccagtgcaactttgggtggactccacgccaccacctggcaccagggtgagggcaatggcgatctacaagcaatcccaacatatgaccgaagtggtccgtagatgccctcatcatgaacgttgctccgactcagatggacttgcacctccacaacatttgattagggtggaaggtaatctgcgcgtggagtacctggatgataggaatacttttcggcactcggtggtggtgccatacgaacctccagaagtgggcagcgattgtacgaccattcattacaactacatgtgtaattcaagctgtatgggaggtatgaatcgtagaccaatcctgaccatcataaccctggaagatagctcgggaaatcttctcggcagaaactcgtttgaagtgagagtctgtgcatgcccaggaagggacaggagaaccgaagaagaaaacctgcgcaagaagggtgaaccacatcacgagcttccaccaggtagcactaagcgggcgcttcctaacaacacctcctcctcaccacaaccaaagaaaaagcctcttgatggagaatactttactctgcaaatccgtgggagggagcggtttgagatgtttcgtgaacttaacgaagcacttgaactcaaggatgcacaagcaggaaaggagccgggaggttcgagggctcattcgtcgcatcttaagagcaaaaaaggacaaagcacttcacgccacaaaaagctcatgttcaaaaccgaggggcctgatagcgac

SEQ ID NO: 12355 - DNA, 1179 bp, Artificial Sequence
  derived and/or modified sequence
atggaagaacctcagagcgatccatccgtggagccgcctcttagccaggagacgttctccgacctctggaaactgctgccggaaaacaacgttctctcgcccctgccatcgcaggcgatggatgacctgatgctttcgccggatgatatcgaacaatggtttactgaggatccaggaccggatgaagccccacggatgcccgaagcggcaccgccagtggcgcccgctcctgccgcacccactccagcggcccctgctccggcacctagctggcctctcagctcatcggtcccgtctcagaaaacctaccagggttcctacggtttccgcctcggattcttgcactcaggaactgccaaatcagtgacctgtacttatagcccggcactgaacaagatgttctgccaactggcaaaaacgtgcccggtgcaactgtgggtggactccactccaccaccagggactcgcgtgcgggctatggccatctacaagcagtctcagcatatgactgaggtcgtccgccggtgcccgcaccatgaacgctgttcggatagcgatggactcgcgccgccgcaacatctcatccgcgtggagggaaatcttcgggtcgaataccttgacgacagaaatacgtttcgccattcggtggtggtgccctatgagcctcctgaagtcggatcagactgcaccactatccactacaactacatgtgcaactcatcctgcatgggaggaatgaaccgtcgaccaatcctgacgatcattacccttgaggactccagcggtaacctcctgggacgcaactcctttgaagtgagggtgtgcgcctgcccggggcgggaccggcgcactgaagaggagaacctgcgcaagaagggagaacctcatcacgagctgccaccgggttccaccaaacgggcactcccaaacaatacctcgagctcaccgcagccgaagaagaagccacttgacggagagtactttaccctgcagatcaggggtagagaaagattcgaaatgttccgggaactgaacgaagccttggaactgaaggatgcgcaggccgggaaggagccggggggttcccgggcgcacagctcccaccttaagtcaaagaaggggcaaagcacctcgcgccataagaagttgatgttcaaaactgaaggcccggacagcgat

SEQ ID NO: 12356 - DNA, 1179 bp, Artificial Sequence
  derived and/or modified sequence
atggaggaaccgcaatctgacccctccgtcgagccaccactgtcgcaagaaactttctcggacctgtggaagctgctgccggagaacaacgtcctctcgccgctcccaagccaggcgatggatgatctgatgctctcaccagatgacatcgagcagtggttcactgaggacccgggaccggatgaagcaccgaggatgccggaagcagccccgccagtggccccggccccggcagcccctacccccgctgccccggcccccgctccgagctggccgctgtcatccagcgtgccgtcccaaaagacttaccaaggctcatacggcttcaggcttggattcctgcactcgggcactgctaaatccgtaacgtgcacctacagcccagctctgaacaagatgttctgccagctggcgaaaacttgtccggtccagctgtgggtggactcaaccccgccgccgggcacccgcgtgcgggcaatggcgatctacaaacagtcgcaacatatgactgaggttgtcagaagatgtccccaccacgagcgctgttcagattcagatggactcgcaccgcctcagcacctgatcagagtggaaggtaaccttcgcgtggaataccttgacgatcgcaacactttcagacactcggtcgtggtcccgtatgagccgcccgaggtcggctctgattgcacgactatccactacaattacatgtgcaactcgtcatgcatgggcggtatgaatcggcggcccatcctgactatcatcaccctggaggacagctcggggaaccttctgggacgcaactcgttcgaggtgcgcgtgtgtgcctgccccgggcgcgacagacggaccgaagaagaaaatctcagaaagaaaggagaaccacatcatgaacttccgccgggttccaccaaacgcgcgctgccaaataacacctcctccagcccgcaacctaagaaaaaaccactggacggcgagtacttcactctgcagattcggggacgggagaggtttgaaatgttccgggagctgaacgaggcactggagctgaaggacgctcaagcaggtaaggaaccaggaggctcaagagcccactcttcgcacctgaagtccaagaaaggacagtccacctcacgccataagaagctgatgtttaagaccgaaggcccggattccgac

SEQ ID NO: 12357 - DNA, 1179 bp, Artificial Sequence
  derived and/or modified sequence
atggaggagccacaaagcgacccgtccgtggaaccaccgctctcgcaggagactttcagcgacttgtggaagttgctgccagaaaacaacgttctgtcgcctctgccctcgcaggccatggacgatcttatgctctcccctgacgatatcgagcagtggttcactgaagatccgggacctgatgaagcacctcggatgccagaagccgcacctccggtggctccggcgccggcagcgcctacgccagcagcccccgccccggccccttcatggcctttgtcgtcgtcagtcccctcgcaaaagacttatcagggatcctacggattcagactggggttcttgcactccggaaccgccaaatccgtgacgtgcacttactcgccggccctgaacaaaatgttttgccaactcgccaagacctgtccagtccagctctgggtggactccaccccgcctcctggaactcgggtccgcgcgatggctatctataagcagtcacagcacatgactgaagtggtgcgccgctgcccgcaccacgaaagatgttcagactccgatggactcgctccgccgcagcacctcatcagggtggagggaaacctgcgggttgagtacttggacgacaggaatacgttccgccatagcgtggtggtgccatacgagccacctgaagtcggtagcgattgcaccaccattcactacaactacatgtgcaactcttcgtgcatgggaggtatgaatcgacggccaatcctgacgatcatcaccttggaagattcttcaggaaacctcctggggcgcaatagcttcgaagtccgcgtctgcgcctgtccagggcgggatcgtagaacggaggaggagaacctccggaagaaaggcgagccgcaccacgagctgccgccgggatccaccaagcgcgcacttcctaacaatacctcctcatcgccgcagccgaagaaaaaacctttggacggagagtacttcactctccagatccgaggaagggaacgcttcgaaatgttccgcgagctgaatgaagcgcttgaactgaaagacgctcaggctggaaaggagccgggcggaagccgcgcccattcctcccacctcaagtcaaagaagggccaaagcacttcgagacacaaaaagctcatgtttaagactgaaggcccggattctgat

SEQ ID NO: 12358 - DNA, 1179 bp, Artificial Sequence
  derived and/or modified sequence
atggaagaaccccagtcagacccgtccgtcgagccccccctgtcccaggagacgttttccgacttgtggaaattgctcccagagaataacgttcttagcccactgccctctcaagccatggacgatctgatgttgtcccctgatgatatcgaacagtggtttaccgaggacccagggccggacgaggctccacggatgcctgaggccgcacccccggttgctcccgcgcccgcagccccgactccagccgcccctgccccagcgccttcttggccactgagtagcagcgttcccagccagaagacttaccagggatcctacggcttccgcttgggcttcttgcactcgggtacagcgaagtcagtgacctgcacttattcaccagcgctgaataagatgttttgccaattagcgaagacatgtcctgtacagctgtgggtggattctaccccgcctccgggaacaagggtccgagccatggccatctataaacagtcacagcacatgacggaggtcgtcaggaggtgcccacatcacgagaggtgttcggacagcgatgggctggccccaccacagcatttgataagggtagagggaaatcttcgcgtagaatatcttgacgaccgcaataccttcagacacagtgtggtggtgccttacgagcccccagaggtaggcagcgactgcactacgattcactataactacatgtgtaatagcagctgtatgggaggtatgaaccgacgaccgatcctgactatcataacccttgaggactcgtccgggaacctgcttggccgtaattctttcgaggtgagggtatgcgcatgtcctggccgggaccgccggacagaagaggagaacttaagaaagaagggagaaccccaccacgaactcccacctggcagcaccaaacgcgctttgcccaacaacacgtcatcatctccacagcctaagaaaaaaccccttgatggagagtacttcaccctccagatcaggggccgcgaacggtttgagatgttcagagagctgaatgaagcccttgaattgaaggatgcacaagccgggaaagaacccggcgggagtagagcccacagtagccaccttaagagcaaaaagggccaatctaccagcaggcataaaaaactgatgttcaaaactgagggcccagatagtgac

SEQ ID NO: 12359 - DNA, 1179 bp, Artificial Sequence
  derived and/or modified sequence
atggaggaaccacaatccgatccgtcggtggagccaccgctctcccaggaaaccttctcggatctgtggaagttgttgccggagaataacgtcctgtcgcctctgccttcgcaggctatggacgacctcatgctctccccagatgatatcgaacagtggttcactgaggaccctgggccggatgaggccccacgaatgcctgaagcggcaccgccagtcgccccagccccagctgcccccactccggccgctccggcccctgccccctcttggccgctgtcctcctcagtcccctcgcaaaagacctatcaaggttcctacggattccggctgggcttcttgcactcaggcaccgccaagtcggtgacttgcacttactccccggcactgaacaagatgttttgccagcttgcaaagacgtgcccggtccagctgtgggtggattccactccgccgccgggaacgagggtgagagcgatggctatctacaaacagtcacagcacatgacggaagtcgtgcgtcgctgcccgcaccatgagcggtgctcggacagcgacgggctcgctccgcctcagcatctgatcagagtggaaggaaaccttcgcgtagagtacctggacgaccgaaatactttcaggcactcagtggtcgtgccttacgagcccccggaagttggctccgactgtaccacgatccattacaactacatgtgcaatagcagctgcatggggggaatgaatcggcggcccatcctgactataatcaccttggaagattcctctggaaatctgcttggcagaaattccttcgaagtccgcgtgtgtgcatgtcctggccgcgaccggcgcaccgaagaagaaaatctgagaaagaagggagaaccgcaccatgaactgccgcctggtagcactaagagagcgcttccgaacaatacctcgtcctccccacagccaaagaagaagccactggatggcgaatacttcactctccagatcaggggacgggaacggttcgaaatgttcagggagctgaacgaggcactggaactgaaggatgcccaagcgggaaaggagcctggaggatcgcgggcacactcctctcaccttaagtcgaagaagggtcaatcgaccagccgccacaagaaacttatgttcaaaaccgagggaccggactcggat

SEQ ID NO: 12360 - DNA, 1179 bp, Artificial Sequence
  derived and/or modified sequence
atggaggaacctcaatcggatccgagcgtggaaccgcctctgtcacaggaaaccttcagcgacctctggaagctgttgccggagaataatgtgctgagcccactgccgtcccaagcaatggacgatctgatgctgagcccagatgacattgagcagtggtttaccgaggaccctggtcctgatgaagcacctcgaatgcctgaagctgcacctcccgttgcccccgcaccagcagctccaactcctgcggccccggcaccagccccctcgtggcctctttcctcttcagtcccttcgcaaaaaacttaccagggctcctatggatttcgccttgggttccttcatagcggcactgcaaagtcggtgacctgtacttacagccccgcgttgaacaagatgttctgtcagctggccaagacctgccctgtgcagctttgggtggactccaccccaccacctgggacccgagtgcgagcgatggcgatctacaagcagagccaacacatgaccgaagtggtgcggcggtgtcctcaccatgagagatgctcggactcggacggactcgcaccaccccaacatctgatccgagtggagggaaacctccgcgtggaatatctggatgatcgcaatacttttcggcatagcgtggtcgtcccctacgagcccccggaagtgggatcagattgtacgaccattcactataactacatgtgcaattcctcttgtatgggcgggatgaataggcgccctattcttaccataatcaccctggaagattctagcggaaaccttcttggtcgcaattcctttgaagtcagggtgtgtgcatgcccaggacgagatagaaggaccgaggaagaaaacctgaggaaaaaaggtgagccgcaccacgagctgccacccggatcgaccaaacgcgcccttccaaataacacttcgtcgtccccccaaccaaaaaagaagcctctggacggagagtactttaccctgcagattagagggagagaaaggttcgaaatgttccgcgaactgaatgaagcactggagcttaaggacgcgcaggccggtaaggagcctggcgggtcgagagctcattcgagccatcttaagtcgaagaagggacagagcacttcgcggcacaagaagttgatgtttaagaccgagggaccagactccgat

SEQ ID NO: 12361 - DNA, 1179 bp, Artificial Sequence
  derived and/or modified sequence
atggaggagccgcaatccgaccctagtgtggaaccaccgctgagccaagagaccttttccgatctttggaaactgttgcctgagaataatgtgctgagcccactcccttctcaggccatggatgacctgatgttgagtccagacgacattgaacaatggttcactgaggatcctgggcctgatgaagcacctcgcatgcccgaggcggccccaccagtggcgccggcccctgctgcaccaactccagctgcccctgctcccgcgccgtcatggcctctttcctcctccgtgccatctcagaagacataccaggggagctatggcttcagactcggattccttcatagcggtaccgctaaatccgtgacatgcacctacagtcctgctcttaacaaaatgttctgtcaactcgctaagacctgccccgtacagttgtgggtggatagtacccctccgcccggtacccgggtgcgagcaatggctatttacaaacagagccagcatatgactgaggtggtgagaagatgtccgcatcacgaaaggtgttccgactctgatgggctggctccaccccaacatttgatcagggtggaggggaaccttcgcgtcgagtatctcgacgacaggaatacttttaggcactcagtggttgtgccttacgaaccgccagaggttggtagcgattgtacgactatacattacaattacatgtgcaacagtagctgcatgggggggatgaaccggcgacctatcctgactattattacactggaagacagctctggaaatcttctcggtcggaattccttcgaagtccgcgtgtgcgcttgtcccggtcgcgacagacgcactgaggaggaaaacctgaggaagaagggggaacctcatcacgaactgccacccgggtccactaagagagcactcccaaacaatactagttcctcaccacagccaaaaaagaagcctttggatggtgaatactttacactgcaaatcaggggtagggaacgctttgaaatgttcagggagctcaacgaagcactggagctcaaagacgcccaggcgggcaaagagcccggaggaagcagggctcactctagtcacctgaaatcaaagaagggccagagcacttcccgccacaaaaagctcatgtttaagacagagggtccagacagtgat

SEQ ID NO: 12362 - DNA, 1179 bp, Artificial Sequence
  derived and/or modified sequence
atggaggaacctcaatccgacccgagcgtggagccaccgctctctcaggaaactttctcggatctgtggaagctcctgcctgaaaacaacgtgttgtcccctctcccgagccaggccatggacgacctgatgctctccccggatgacatcgaacaatggttcactgaagatccaggcccagacgaagcgcctcggatgccggaagccgcgcctccagtggcgccggcaccagcggcacccaccccggctgcgccggcaccggctccttcctggcctctgagttcatctgtcccttcacagaaaacttaccaagggagttacggtttccgactcggatttctgcactcagggaccgcaaagtccgtcacgtgtacctactcgccagcgctgaataagatgttctgccagctggccaagacttgtccggttcagctctgggtcgactcgacccctccaccaggaacccgggtgagggcaatggccatctataagcagtcgcaacatatgaccgaagtggtacgccggtgcccgcatcacgagcggtgcagcgactccgacggcctcgccccgccccagcacctgattagggtggagggaaacctgagggtggagtaccttgacgatcggaacactttccgccattcagtggtcgtgccctacgagccccccgaagttggatccgactgtaccaccatccattacaattacatgtgcaactcatcctgcatgggaggcatgaatcggcggccgatcttgactatcataacgttggaggatagctcaggcaatctgctcggcagaaactcgttcgaggtgagggtgtgcgcgtgccctggacgcgaccgtaggactgaagaggagaacttgcggaaaaaaggggaaccgcaccacgagctcccaccgggatcgacgaaaagggcccttccaaacaacacctccagctccccgcagccaaagaagaagccgctggatggagagtactttacccttcagatccgcggacgcgaacggttcgaaatgtttagggaactcaatgaagctctggaactcaaagatgcacaggccgggaaggaaccaggaggatcgcgggctcactcttcgcatctgaaatctaaaaagggacaatccacctcgcgccacaagaaacttatgtttaagactgagggacccgattccgat

SEQ ID NO: 12363 - DNA, 1179 bp, Artificial Sequence
  derived and/or modified sequence
atggaagaaccacagtcggacccatcagtagaacctccactttctcaggagacgttttcagatctttggaagttgttgccagaaaacaacgttctgtccccacttccatcccaagcgatggacgatttaatgctttctccagatgatatcgaacaatggtttactgaagacccaggtcctgatgaagcacctcgcatgccggaggccgctcctccagtagcccccgctccggcggcaccaacaccggctgcgccagctccggctccatcgtggccattgtcatcttcagtcccatctcaaaaaacctatcaaggctcatacggattcagactcggttttcttcacagtggcacagccaagtcagtgacgtgcacctacagtccagccctgaataaaatgttctgtcaattggcaaaaacctgtccggttcagctctgggtagattcgacaccaccaccaggtactagggtacgtgctatggctatttataaacaatcacaacacatgactgaggtagtaagaaggtgtccacaccatgaaagatgttcagatagtgatggattggcgcctccacaacatctgattcgggttgaaggaaatttaagagtggaatacttagatgatcgtaacaccttcaggcactctgttgtagttccatacgagccaccagaggttggaagtgattgtacaactattcattataattatatgtgcaattcatcgtgtatgggcggaatgaaccgtcgtccaatccttacaatcatcacactcgaagattcgtctggaaaccttttaggcagaaattcgtttgaagtaagagtgtgtgcatgccctggtagggatcgtcgtactgaggaagaaaatctgcgaaagaaaggtgaaccacatcacgaattgccaccgggttctacaaaacgggcattgcctaataacacttcaagttctccgcagccaaagaagaagccactcgatggggagtactttacgttgcaaataagaggtcgtgaacgattcgaaatgttccgagaacttaatgaagctttagaattgaaggacgcccaggctggaaaggaacctggaggatcgcgcgcacactcatcacaccttaaatcgaagaagggacaatccaccagccgacataagaaattgatgttcaagacagaaggaccagattcggat

SEQ ID NO: 12364 - DNA, 1179 bp, Artificial Sequence
  derived and/or modified sequence
atggaggaacctcagtcggacccgagcgtagagccccctttatctcaggagactttttcggacctctggaagctcctgcccgaaaacaacgttctgtcccctctgccgtcacaggccatggacgacctgatgttaagccctgatgatatcgagcaatggttcaccgaagacccaggacccgacgaggcccccagaatgccagaggccgcaccacctgtcgctcctgctcccgccgccccaactccggctgctcctgcccccgcgccaagttggcccctctcgtcttcggtacccagccagaagacctatcaggggtcttacgggttccggctgggattcttgcactctggaacggccaagtccgtgacgtgcacatacagtcctgcgctgaataaaatgttttgccagctcgcgaagacttgccctgttcagttgtgggttgattcaacgccccccccgggaacccgggtgcgagctatggctatctataagcagagtcagcatatgacggaggtggttcggcgatgtccacaccacgagcgttgctcggacagcgatgggcttgcccccccccagcatctgatccgcgttgaagggaatctgagagtggagtaccttgacgaccgcaacacttttcgacatagtgtcgtagtaccttacgaaccaccggaagtcgggagcgactgtacaaccatccattacaattacatgtgtaattccagttgcatgggcgggatgaaccgccgtccaatactgaccatcataacgctcgaagactcatctggcaacctattgggtaggaactccttcgaggtgcgggtgtgtgcctgccccgggagggatcgcagaaccgaggaagagaatctgcgcaagaagggcgagccacatcacgaactgccacccggctcgacgaaaagagccttgcccaataacacctcttcaagcccacaaccaaagaagaaaccccttgacggagagtacttcactctacagatccgtggtagagagcggtttgaaatgtttcgcgagctaaatgaggcactggagctgaaagatgcccaggccggcaaggagccaggaggttcccgtgcacattctagtcacctgaaaagcaaaaaaggacagtccaccagcagacataagaaactgatgttcaagacggaggggcccgacagcgac

SEQ ID NO: 12365 - DNA, 1179 bp, Artificial Sequence
  derived and/or modified sequence
atggaagagccccagtcagatccatcagtagagccccccctcagccaagagaccttctctgatctctggaaactcctgcccgagaacaacgtcttgtctcccctgcctagccaggctatggatgatttaatgctgtctccagacgatatagagcagtggttcaccgaggatccaggaccggacgaagctccaaggatgcccgaggctgcacctcctgtcgcccctgctccagccgcacctactccagccgctcctgctcccgctcccagctggccactcagcagttctgttccctctcagaagacatatcaagggtcatacggcttcagattgggatttcttcatagcggcactgcaaaaagcgtgacgtgcacttactctccggctctgaataagatgttctgccaactcgctaagacctgtccagttcagctgtgggtggattctacgcccccacctggtacccgtgttcgggctatggccatatataagcagagtcagcatatgactgaagtcgtgaggagatgcccccatcatgagaggtgtagcgacagcgatggcctggctcctccacagcaccttatccgggttgaggggaacctgagagtggaatatctggatgacaggaacactttccgccacagcgtggtagtgccatacgagcctcccgaggttggaagcgactgcactaccatccactataactatatgtgcaacagctcttgcatgggcggaatgaacagaaggccaatcttaaccattatcacactagaagacagcagcggcaaccttctgggcagaaactccttcgaggtgcgtgtgtgcgcttgtcctggaagggatcgccgaactgaagaagaaaaccttaggaagaaaggcgaaccacaccacgaactgcctcccggatctaccaaaagggcgctcccgaacaataccagctcgagccctcagcctaaaaaaaaacctctggatggcgaatattttacactccagatccgtggtcgcgagcgttttgaaatgtttcgggagttgaatgaggccttggaactcaaggatgcacaggcaggcaaggagcccggagggtcccgtgctcacagctcacacctgaaaagcaagaagggccagtccacctcccgccacaagaagctcatgtttaagaccgagggccctgattctgat

SEQ ID NO: 12366 - DNA, 1179 bp, Artificial Sequence
  derived and/or modified sequence
atggaggagccgcaatcggatccttccgtggaaccgcctctcagtcaggaaactttctccgacctgtggaagctgctgcccgagaacaacgtcctctctccacttcccagccaggcaatggatgacctgatgctgagccctgacgacatcgaacagtggttcactgaagatccaggaccagacgaggctccgagaatgcccgaagccgcgccaccggtagccccggcacccgccgcaccgaccccggctgcacctgctcccgcgccatcatggccacttagttcgtctgtcccatcgcaaaaaacttaccaaggatcgtacggctttcgtcttggttttctgcactctggaaccgcgaagtcggtgacctgcacgtattcgcctgcgctgaacaaaatgttctgtcaactcgccaagacgtgcccggtgcagctgtgggttgactccaccccgccgccggggactagggtgcgggccatggccatctacaaacagagccagcacatgactgaggtggtgcgccggtgtccacaccatgagcggtgtagcgactcggatggattggctccaccacagcacctgatccgtgtggaaggtaacctgcgggtggaatacctcgacgatagaaacacttttagacactcggtggtggtcccctacgaaccacctgaggtcggatcggactgcaccacgatccattacaattacatgtgcaattcctcgtgcatgggaggcatgaatcgccgcccaatcctcactatcattaccctggaagatagctccgggaatctgctgggcaggaattcgttcgaagtccgggtgtgcgcatgcccgggacgggacagacgcaccgaggaagaaaacttgcgcaagaagggcgagccgcatcacgaactccctccgggttccaccaagcgcgccctcccaaacaacacctcctcgagtccccagcctaagaaaaagccattggatggcgagtacttcactcttcaaattcggggacgcgaaagattcgaaatgtttagggagctcaacgaggcgctcgaactgaaagacgcccaggccggaaaggaacctggaggctcacgcgctcactcatctcatctgaagagcaaaaagggacaatctacttcccggcataagaaattgatgttcaagaccgaggggccagactcggat

SEQ ID NO: 12367 - DNA, 1182 bp, Artificial Sequence
  derived and/or modified sequence
atggaggagccccagagcgaccccagcgtggagccccccctgagccaggagaccttcagcgacctgtggaagctgctgcccgagaacaacgtgctgagccccctgcccagccaggccatggacgacctgatgctgagccccgacgacatcgagcagtggttcaccgaggaccccggccccgacgaggcccccagaatgcccgaggccgccccccccgtggcccccgcccccgccgcccccacccccgccgcccccgcccccgcccccagctggcccctgagcagcagcgtgcccagccagaagacctaccagggcagctacggcttcagactgggcttcctgcacagcggcaccgccaagagcgtgacctgcacctacagccccgccctgaacaagatgttctgccagctggccaagacctgccccgtgcagctgtgggtggacagcacccccccccccggcaccagagtgagagccatggccatctacaagcagagccagcacatgaccgaggtggtgagaagatgcccccaccacgagagatgcagcgacagcgacggcctggcccccccccagcacctgatcagagtggagggcaacctgagagtggagtacctggacgacagaaacaccttcagacacagcgtggtggtgccctacgagccccccgaggtgggcagcgactgcaccaccatccactacaactacatgtgcaacagcagctgcatgggcggcatgaacagaagacccatcctgaccatcatcaccctggaggacagcagcggcaacctgctgggcagaaacagcttcgaggtgagagtgtgcgcctgccccggcagagacagaagaaccgaggaggagaacctgagaaagaagggcgagccccaccacgagctgccccccggcagcaccaagagagccctgcccaacaacaccagcagcagcccccagcccaagaagaagcccctggacggcgagtacttcaccctgcagatcagaggcagagagagattcgagatgttcagagagctgaacgaggccctggagctgaaggacgcccaggccggcaaggagcccggcggcagcagagcccacagcagccacctgaagagcaagaagggccagagcaccagcagacacaagaagctgatgttcaagaccgagggccccgacagcgactag

SEQ ID NO: 12368 - DNA, 1149 bp, Artificial Sequence
  derived and/or modified sequence
atggaggagccccagagcgaccccagcgtggagccccccctgagccaggagaccttcagcgacctgtggaagctgctgcccgagaacaacgtgctgagccccctgcccagccaggccatggacgacctgatgctgagccccgacgacatcgagcagtggttcaccgaggaccccggccccgacgaggcccccagaatgcccgaggccgccccccccgtggcccccgcccccgccgcccccacccccgccgcccccgcccccgcccccagctggcccctgagcagcagcgtgcccagccagaagacctaccagggcagctacggcttcagactgacctgcacctacagccccgccctgaacaagatgttctgccagctggccaagacctgccccgtgcagctgtgggtggacagcacccccccccccggcaccagagtgagagccatggccatctacaagcagagccagcacatgaccgaggtggtgagaagatgcccccaccacgagagatgcagcgacagcgacggcctggcccccccccagcacctgatcagagtggagggcaacctgagagtggagtacctggacgacagaaacaccttcagacacagcgtggtggtgccctacgagccccccgaggtgggcagcgactgcaccaccatccactacaactacatgtgcaacagcagctgcatgggcggcatgaacagaagacccatcctgaccatcatcaccctggaggacagcagcggcaacctgctgggcagaaacagcttcgaggtgagagtgtgcgcctgccccggcagagacagaagaaccgaggaggagaacctgagaaagaagggcgagccccaccacgagctgccccccggcagcaccaagagagccctgcccaacaacaccagcagcagcccccagcccaagaagaagcccctggacggcgagtacttcaccctgcagatcagaggcagagagagattcgagatgttcagagagctgaacgaggccctggagctgaaggacgcccaggccggcaaggagcccggcggcagcagagcccacagcagccacctgaagagcaagaagggccagagcaccagcagacacaagaagctgatgttcaagaccgagggccccgacagcgactag

SEQ ID NO: 12369 - DNA, 1182 bp, Artificial Sequence
  derived and/or modified sequence
atggaggagcctcagtccgatccttcggtggagcctcctctgagtcaggagacattcagcgacctttggaaattgcttcctgaaaacaatgtgctatcacccctgccttcgcaggctatggatgacctgatgttgtctccagatgatatcgagcagtggtttacggaagaccccggcccagatgaagcacccagaatgcctgaggcagctccgccggtagcccccgcccccgcagctcctacaccagctgccccagcacctgcaccttcttggccgctctcctccagcgtcccctcacagaagacttaccagggcagctacggattcaggctgggtttcttgcactctgggacagccaagagtgtgacttgtacatactctccagccctcaataagatgttttgtcagctggcaaaaacttgccccgttcagctgtgggtggactcgactccacccccaggcacacgagtacgagccatggctatatacaaacagtcccaacatatgacggaggtagtgcgcaggtgtcctcatcatgaaaggtgctctgacagtgacggtctggcacctcctcaacacctgattcgagtcgaaggcaaccttagggtggagtatcttgacgataggaatacttttcgccactctgtcgtagtgccctacgaaccgcctgaagtgggcagcgattgtaccacgatccactacaactatatgtgcaatagttcttgcatggggggtatgaaccggcgtcccatcctcacgattataactctcgaggattccagcggaaaccttctaggccgcaactctttcgaggtgcgagtgtgtgcatgccccggtcgggatcggaggacagaggaggagaatcttcggaaaaagggtgagcctcaccatgagttgccaccaggcagcaccaagcgagccctccctaataatacttcctctagcccacagcctaaaaaaaagcccttagacggcgagtattttactttgcagattcggggacgagaacggtttgagatgttcagagagttaaatgaggctcttgagttgaaggatgcacaggcaggcaaagagcccggcggatcacgcgcacactcctcacacctgaagtcaaagaaggggcagtctacctctaggcataaaaaactgatgtttaaaaccgaaggtcccgatagcgattag

SEQ ID NO: 12370 - DNA, 1149 bp, Artificial Sequence
  derived and/or modified sequence
atggaggagccgcagtcggacccgtctgtcgaaccaccactgagccaggagacatttagtgatctgtggaaacttctgccagagaataacgtcctgtcccccttaccctctcaggcaatggacgatctcatgttgtccccagatgacatcgaacagtggttcacggaagatcccgggccggacgaagcgcctcgaatgcccgaggctgctccacctgtggctccagctcccgctgctcccacacctgcagccccagcacccgctcctagttggcccctatcgtcttccgtgccttcacagaagacataccagggatcctacgggtttcgcctgacatgtacctattctcctgccctgaacaaaatgttttgtcagctggcaaagacctgtcccgtgcaactctgggtggacagcactcctccccctggtacccgagtgcgagcaatggctatctacaaacagagtcagcatatgaccgaggtggtgagaagatgtccccaccacgagcgctgctcggactcagatggacttgccccaccccagcatcttatccgtgtggaaggcaacctgagagtggagtacttggacgacagaaacacgttccggcactcggtagtggtcccctacgaaccgcccgaggtcgggtccgactgtacaaccatccactacaactacatgtgtaacagttcttgtatgggaggcatgaatcgaagacccatcctcaccattattactctggaagattcctccggtaatctccttggaaggaactcgtttgaggtacgggtgtgcgcctgccctggccgggacagaaggactgaggaagagaacctgagaaagaaaggcgaaccccatcatgaacttcctccaggttctacaaagagggctttgcctaacaatacttcgtcatccccacagcctaaaaagaagccccttgacggcgagtactttacccttcagattcgcggacgagagcgctttgaaatgtttcgagaactgaacgaggccctcgaacttaaggacgcacaggccggcaaagaacccggaggctctcgtgctcactcaagccatcttaaaagcaagaagggacaaagtacaagtagacacaagaagctgatgttcaaaactgagggacccgactctgactag

SEQ ID NO: 12371 - DNA, 1182 bp, Artificial Sequence
  derived and/or modified sequence
atggaggagccccagagtgatccttcagtcgaacctcccctaagccaggagacctttagcgatttatggaagctccttcctgagaataacgtactttcgccattaccgtctcaggccatggatgatcttatgcttagcccagacgatatcgagcagtggttcactgaggatcccggcccggatgaagccccacgtatgccagaagccgctccccccgtcgcccctgcacctgccgcccccaccccagcagctcccgcacccgcgccctcctggccgctgtcctccagtgtcccatctcaaaagacttaccaagggagctacgggttcagactgggctttctgcattccgggactgcaaagtctgtgacatgtacttattcccccgctctgaataagatgttttgtcagcttgccaagacttgcccagtgcagctctgggttgatagcaccccccctcccggaactcgggtgagagcgatggctatttataagcagagccagcacatgactgaagtcgtgcgcagatgtccgcatcatgagcgctgctcagacagtgatggcctggctcctcctcaacatctgatccgtgtggaaggtaacctgagggtggagtatctggacgaccgcaacacatttcggcatagcgtggtggtcccatatgagccacctgaggtgggcagcgactgcactaccatacactacaactatatgtgcaattcctcttgcatgggaggtatgaaccgccgcccgatcctgacaataatcaccctcgaggactcttccgggaacctgcttggccgcaactcctttgaagtgcgcgtgtgcgcatgcccgggcagggacaggcggacagaggaagaaaacttacgaaaaaagggggagccacaccacgagttaccaccaggtagcaccaaaagagcactgccaaacaacacgtcctccagcccgcagcccaagaagaaaccactcgacggggagtattttaccctccagattagaggccgagagagattcgaaatgttccgagaactaaacgaggcactcgagctgaaagacgcacaggccgggaaagagcctggcggatctcgagcccactcatctcacctgaaaagcaaaaaaggtcagagcacttctcgacataaaaagttaatgtttaagacagagggtcctgatagcgattag

SEQ ID NO: 12372 - DNA, 1182 bp, Artificial Sequence
  derived and/or modified sequence
atggaggagccccagagcgaccccagcgtggagccccccctgagccaggagaccttcagtgacctgtggaagctgctgcctgagaacaacgtgctgagccccctgcccagccaggccatggatgacctgatgctgagcccagatgacatcgagcagtggttcacagaggaccccggcccagatgaggcccccaggatgcctgaggccgcccctcctgtggccccagccccagctgcccccaccccagctgccccagccccagcccccagctggcccctgagcagctctgtgcccagccagaagacctaccagggcagctatggcttccggctgggcttcctgcacagcggcacagccaagtctgtgacctgcacctacagccctgccctgaacaagatgttctgccagctggccaagacctgccctgtgcagctgtgggtggacagcaccccacctcctggcaccagggtgcgggccatggccatctacaagcagagccagcacatgacagaggtggtgcggcgctgcccccaccacgagcgctgcagcgacagtgatggcctggccccaccccagcacctgatccgggtggagggcaacctgcgggtggagtacctggatgacaggaacaccttccgccacagcgtggtggtgccctatgagcccccagaggtgggcagtgactgcaccaccatccactacaactacatgtgcaacagcagctgcatgggcggcatgaacagaagacccatcctgaccatcatcaccctggaggacagcagcggcaacctgctgggcagaaattcctttgaggtgcgggtgtgtgcctgccccggccgggacagaagaacagaggaggagaacctgaggaagaagggggagccccaccacgagctgcccccaggcagcaccaagagggccctgcccaacaacaccagcagcagcccccagcccaagaagaagcccctggatggagagtacttcaccctgcagatccggggccgggagagatttgagatgttccgggagctgaatgaggccctggagctgaaggatgcccaggccggcaaggagcccggcggcagccgggcccacagcagccacctgaagagcaagaagggccagagcaccagccgccacaagaagctgatgttcaagacagagggccctgacagcgactag

SEQ ID NO: 12373 - DNA, 1149 bp, Artificial Sequence
  derived and/or modified sequence
atggaggagccccagagcgaccccagcgtggagccccccctgagccaggagaccttcagtgacctgtggaagctgctgcctgagaacaacgtgctgagccccctgcccagccaggccatggatgacctgatgctgagcccagatgacatcgagcagtggttcacagaggaccccggcccagatgaggcccccaggatgcctgaggccgcccctcctgtggccccagccccagctgcccccaccccagctgccccagccccagcccccagctggcccctgagcagctctgtgcccagccagaagacctaccagggcagctatggcttccggctgacctgcacctacagccctgccctgaacaagatgttctgccagctggccaagacctgccctgtgcagctgtgggtggacagcaccccacctcctggcaccagggtgcgggccatggccatctacaagcagagccagcacatgacagaggtggtgcggcgctgcccccaccacgagcgctgcagcgacagtgatggcctggccccaccccagcacctgatccgggtggagggcaacctgcgggtggagtacctggatgacaggaacaccttccgccacagcgtggtggtgccctatgagcccccagaggtgggcagtgactgcaccaccatccactacaactacatgtgcaacagcagctgcatgggcggcatgaacagaagacccatcctgaccatcatcaccctggaggacagcagcggcaacctgctgggcaggaacagctttgaggtgcgggtgtgtgcctgccccggccgggacagaagaacagaggaggagaacctgaggaagaagggggagccccaccacgagctgcccccaggcagcaccaagagggccctgcccaacaacaccagcagcagcccccagcccaagaagaagcccctggatggagagtacttcaccctgcagatccggggccgggagagatttgagatgttccgggagctgaatgaggccctggagctgaaggatgcccaggccggcaaggagcccggcggcagccgggcccacagcagccacctgaagagcaagaagggccagagcaccagccgccacaagaagctgatgttcaagacagagggccctgacagcgactag

SEQ ID NO: 12374 - DNA, 1182 bp, Artificial Sequence
  derived and/or modified sequence
atggaggagccccagagcgaccccagcgtggagccccccctgagccaggaaacattttcagacttgtggaagttactgcccgaaaataacgtcctctcaccactgccttctcaggctatggacgatttgatgctcagcccggatgatatagagcagtggtttacagaggatccaggtcctgatgaggcaccaaggatgcccgaggcagctcccccagtggcacctgcccccgctgcgcccacacctgccgctcccgcacctgctccaagttggcctttgtcaagctccgtacctagccagaaaacttatcagggctcgtacggatttcggctcgggtttttgcacagtgggacagccaaaagcgtgacctgtacatattcaccagccctcaataaaatgttctgccagctggcaaaaacttgtccagttcagctctgggtagattcaacccctccgccagggaccagagtgagagcgatggctatttacaaacaatctcagcatatgacagaggtggtgcgtaggtgtcctcatcatgaacgctgtagtgactctgatgggttggcccctccacaacatctgatccgtgtcgagggcaacctgagagtggaatatctcgacgacagaaacacctttcgtcacagcgtcgttgttccatacgaacctcccgaagtgggtagcgactgcaccacgatccactataattatatgtgcaactctagctgtatgggggggatgaacagacggcctattctcacaattattacattagaagactcaagtggtaatctgctcggaagaaattcctttgaggtgcgggtctgtgcctgccccgggagggaccggcgaaccgaggaagagaatctaagaaagaagggggaaccccaccatgaacttccacccggatcgaccaaaagagccctgcccaacaacacatccagctcccctcaacctaagaagaagcctctggatggtgaatatttcacgcttcaaattaggggacgcgaaaggttcgaaatgttccgggagctgaatgaggcgctggagttgaaggatgcccaggctgggaaagagcccggtggtagcagggctcacagcagccacctgaaaagtaagaagggacagtccaccagtcgacataagaaattgatgtttaagaccgaggggcctgactcggactag

SEQ ID NO: 12375 - DNA, 1149 bp, Artificial Sequence
  derived and/or modified sequence
atggaggagccccagagcgaccccagcgtggagccccccctgagccaggaaacctttagtgacctgtggaagctgctccccgaaaacaatgttttgagccccttaccgtcccaggccatggatgaccttatgttaagccccgacgatatagagcagtggtttactgaagaccccggaccagacgaggctcctcgaatgccggaggctgcccccccagtggccccagcaccagcggctcccactcctgctgccccggcacctgcaccaagctggcccctcagctcatccgttccttcccaaaagacatatcagggatcctatggtttcagactgacatgtacatacagtcctgccctaaacaagatgttttgtcagctggccaagacctgccccgtgcagctgtgggttgatagcacccccccacctggaacccgggttcgtgcaatggcaatctataagcaaagccagcatatgaccgaggtggtcagacggtgcccacatcacgaacgttgctcagactccgacgggcttgcacctccacagcaccttatcagagtggagggcaatctcagagtcgagtatctggacgacaggaacacatttagacactcagttgtggtgccgtacgagccccctgaggtgggttcagactgcacaacaatccactacaactatatgtgtaacagcagttgcatgggaggcatgaaccgcagaccaatactgactatcatcacactggaagacagtagcgggaacttgctggggcggaattcatttgaagttagagtctgcgcttgccccggtagggaccggcggacagaagaagagaacctacgaaaaaaaggtgaaccacaccacgaactgcccccgggctcaacaaaacgggcattgcctaataacaccagcagttctccccagcctaagaagaaaccattggatggagagtactttacactccaaatccggggtcgagagaggttcgagatgttccgggagctgaacgaagcccttgagttaaaggacgcccaggcgggcaaagagcctggcgggagtagggcgcactcatcacacttgaagtcaaagaagggccagtctacaagccgacacaagaagttgatgttcaaaacggaaggacctgactccgactag

SEQ ID NO: 12376 - DNA, 1182 bp, Artificial Sequence
  derived and/or modified sequence
atggaggagccccagagcgaccccagcgtggagccccccctgagccaggagacatttagtgatctgtggaaactgttaccggagaacaatgtgttatcgcccctgccgtcccaggctatggacgacctcatgttgtcccctgacgatattgaacagtggttcaccgaggatcctggtccagacgaagctccccgcatgccagaagcggccccacctgtggctcccgcacccgcggccccgacaccagccgctccggcacccgcgcctagttggcctctatcatcatccgtcccaagccagaaaacctaccaaggcagctatgggttccgtctgggcttcctgcattctggaaccgccaagtccgttacctgtacgtactctccagcgttgaataaaatgttttgtcaactggctaagacatgtcctgttcagttatgggttgattcaacgccgccccccggtacacgggtccgcgctatggctatatacaagcagagtcagcatatgactgaagttgtcaggcgctgtccacaccacgagagatgttccgatagcgacgggctggcccccccccaacacctgatccgagtagaaggaaatctgcgggttgaatacctggatgatcgaaatacttttcggcattctgttgtggtgccctacgagcccccagaagtgggcagtgattgcaccaccatccattataactatatgtgtaattcatcctgtatgggggggatgaacagaagaccaattctaaccatcattacgttggaggacagtagtggaaacctattaggccgcaactcattcgaagttagggtatgcgcttgtcctgggagagatcgtcgcacagaagaggagaacctgaggaagaaaggggagccacatcacgaattgcctcctgggagcaccaagagagccttacctaataacacttcaagcagtccccaacccaaaaagaaaccccttgatggcgagtacttcactctacagattcgagggagagaaagatttgaaatgtttcgggagctaaacgaggccctggagctgaaggacgcccaggctggtaaggagccgggggggagtcgggcacactcctcacacctgaaatccaaaaaaggacagtctacttctcgacacaaaaaattaatgttcaaaacagaagggccggactctgattag

SEQ ID NO: 12377 - DNA, 1182 bp, Artificial Sequence
  derived and/or modified sequence
atggaagagccccagagcgaccccagtgtcgagccacccctgtcccaggagacatttagcgatctttggaagctcctgcctgagaacaacgtgttgtcccccctgccttcacaggcaatggacgatctcatgctctctccagacgacatcgagcagtggttcaccgaggacccaggaccagacgaagcccctcgtatgccagaagcagcccctccggtcgcccctgcaccagccgcaccaaccccagctgctcccgctcctgcaccgtcttggcccctgtctagcagtgtgccctcgcagaagacctatcaagggagctatggattcaggcttggtttcctgcatagcggtaccgcaaagtccgtcacctgcacatattcacctgctttgaacaaaatgttttgtcagctggcaaaaacctgccccgtccagctatgggttgactcaacacccccaccgggaacccgcgttagggccatggcaatctacaagcaatcccagcatatgacagaagtcgtccgtcgttgtccgcaccacgagcgatgtagtgattctgatggactggctccgccacagcacctcataagagtggagggcaaccttcgggtagaatacctggatgatcgcaacaccttccgacacagtgttgtagttccctacgagcctccggaagtaggctctgactgtaccaccatccattacaattacatgtgcaatagttcatgtatgggtggaatgaacagaaggccaattctaacgatcattactctcgaagacagcagtgggaatctgttaggcagaaattctttcgaggtgcgagtctgtgcatgtcctggcagggacagacggaccgaagaagaaaatttaaggaaaaaaggggaaccccaccatgagcttcctccaggaagcacgaaaagagctcttcccaataacacctcctcaagtccacagccgaagaagaaaccacttgacggcgaatacttcacgctgcagataagggggcgagagagattcgagatgtttagggagctgaacgaggctttggagcttaaagacgcccaggcagggaaagaaccaggaggaagtcgggcacatagttcccacctcaagagcaaaaagggacagtccacaagccgccacaaaaaattaatgttcaagaccgagggaccggactcagattag

SEQ ID NO: 12378 - DNA, 1149 bp, Artificial Sequence
  derived and/or modified sequence
atggaggaaccccagtctgacccttccgtagagcctcctctatcccaagaaactttctcagacttgtggaagctcctgcccgaaaataacgttctgagccccctgcccagtcaggccatggatgatctcatgttgtcccccgatgatatagaacagtggtttacagaagaccccggacccgacgaggccccacgaatgcctgaagccgctccacctgtagctcccgctcctgcagcccctacacctgcagccccagctcccgctccatcatggcccctgagcagcagtgtgcctagccagaaaacgtaccaaggctcctacggcttcaggttaacctgcacttattccccagcacttaataagatgttctgccagctggcaaaaacatgtcccgttcagctctgggttgactctactccgccaccaggtactagagtgcgtgcaatggcaatctataagcagagccagcatatgactgaagtggtccgtagatgtcctcaccacgaaagatgctccgatagtgacgggctcgcccctccccagcatctgattagggtggaaggaaatttgcgtgtcgagtatctggacgacaggaatacattccggcatagcgtcgtggtcccgtacgagcccccagaggtcggctccgattgcactacaatccactataattatatgtgtaattccagctgcatgggtggaatgaatcgccgacccatacttacgatcattaccctggaagattcgtccgggaatctgctcggcaggaactctttcgaggtgcgggtctgcgcctgtccaggtagagacagacgaacagaggaggaaaaccttcgcaaaaaaggcgagccccaccacgaactgccaccaggaagtactaaacgcgcacttcctaataacacctctagcagccctcagccaaaaaaaaaaccccttgacggggaatattttacacttcagattcggggtagggagcgctttgaaatgtttcgggagctcaacgaagctctggaactgaaagacgctcaagcaggaaaagagccagggggatcccgtgcccactcgtcccacctaaaaagcaagaaaggacaaagtacttcaagacacaagaaactaatgtttaagaccgagggccctgattccgattag

SEQ ID NO: 12379 - DNA, 1182 bp, Artificial Sequence
  derived and/or modified sequence
atggaggagcctcagagcgatccaagtgtcgagccacccctctcccaggagaccttttctgatctctggaaactcctgcccgagaataatgtgctctctcctctgcccagccaagcaatggatgacctgatgctctcccccgacgacatcgaacagtggttcacagaggatccaggccctgatgaggccccaaggatgccagaagcggcacccccagtggccccagccccagcggcaccaacccccgcagctcctgcaccagcacctagctggccattgtctagttctgttccttcccagaaaacatatcaggggtcgtacggctttagacttgggttcctgcacagcgggaccgccaagtccgtgacatgcacctattcccctgctttgaacaaaatgttttgtcagttagccaaaacctgccctgtgcaactgtgggttgacagtacacccccacccggaacccgcgtccgcgctatggccatatacaagcagagccagcacatgaccgaggtggtgcggagatgtccacatcatgagcgctgctctgactctgacggcctcgcgcctcctcagcatttgataagggttgaggggaatctcagagtagagtacttggatgaccgcaatacgtttagacattctgtagtcgttccttacgagccacccgaagtgggaagcgattgtacgactattcactataactacatgtgtaattcctcatgtatggggggaatgaacagaaggccaatcctgacaatcattacactggaagactccagtggaaatctgttgggtcgcaatagtttcgaggtgagggtgtgtgcctgcccaggtcgcgatcgacggactgaagaggaaaatttgaggaaaaagggcgagccacaccacgagcttcccccagggtcaaccaaacgggctctccctaataataccagttcctcacctcagcccaaaaagaagcctcttgacggggagtatttcacgctgcagattcgcggtagagagcgcttcgagatgtttagagaactgaacgaagctcttgagctcaaagacgcacaggcaggcaaagaaccgggaggctcgcgagcacactcctcacacttaaaaagcaaaaaagggcagtcgacatctaggcataagaaattaatgtttaagacagaggggccagatagtgattag

SEQ ID NO: 12380 - DNA, 1182 bp, Artificial Sequence
  derived and/or modified sequence
atggaggaaccacagtcagacccaagcgtggaaccccccctgagccaggagacatttagtgacctttggaagttactccccgagaacaacgtgctctcacccctcccaagccaggctatggatgacctgatgctcagccccgatgacatcgaacagtggttcacggaagatcccgggccggatgaggctccccgtatgccggaagccgcaccccctgtagcccctgcccctgccgcccccaccccagctgctcccgcgccagccccttcctggcctttatccagctcggtaccttcccagaagacttaccaaggttcatatgggttccggctcggtttcctgcattccggcaccgccaagtcagttacttgtacctactcccccgctttgaataaaatgttttgccagctagcaaagacttgcccagtccagttgtgggtggattctacccctccccctggtacgcgcgtgcgggcaatggcaatctataagcagagccagcacatgactgaggtcgttcggagatgcccccaccacgaacgatgtagtgactccgacggcctcgcccccccacagcacctcatcagagtcgaggggaacctgagagtggagtatttggatgatagaaacactttccgacactccgtggtcgtgccttacgagcctcccgaagttggcagcgactgcaccacaatccattataactatatgtgcaacagcagctgtatgggcggaatgaatcggcgccccatcctgacaataattaccctggaggattccagcggaaatttgctgggacgcaatagcttcgaagtgcgggtatgtgcttgtcctggcagagacagacgaaccgaggaagaaaatctccgtaaaaaaggcgaaccccaccatgaactaccacccggaagcaccaaaagagccttgccaaacaatacgagttcctccccccaacctaagaaaaagcctttggatggagagtactttacattgcagattcggggcagagagcgtttcgagatgtttagggaactgaatgaggccttggagctcaaggatgcgcaggccgggaaggagcccggcggctctcgcgcgcacagcagtcaccttaaatctaaaaagggtcagtccacgtctaggcacaagaaacttatgttcaaaaccgaaggccctgatagcgattag

SEQ ID NO: 12381 - DNA, 1149 bp, Artificial Sequence
  derived and/or modified sequence
atggaggagcctcagtccgaccctagtgtggagccccctcttagtcaagaaacattcagtgatctgtggaagctcttgccagagaacaatgttctgtcacctctaccgtcccaagccatggatgacctcatgctgagccctgacgatatagagcaatggtttacagaggatcccggccccgatgaagccccaaggatgccagaggctgcacccccagtcgcaccagcacccgccgcacccacaccagccgcccccgctcccgcaccatcttggccactctctagttccgtccctagccaaaagacttatcaaggaagttacggctttcggctcacctgtacatattctcccgctctgaataaaatgttctgtcagctcgcgaagacatgtccagtgcaattatgggtggacagcacccctccacccggtaccagagttcgggccatggctatctataaacagtcccagcatatgacggaagtggtgagaaggtgtccccaccatgaacgctgctccgattccgatggcttagctccaccacaacatcttattcgagtcgaaggtaacttgcgtgtggagtaccttgacgaccggaacacgtttagacactcggtcgtagtgccttacgagccccccgaagtcggcagcgactgcacaaccatccattataactacatgtgcaactccagttgcatgggcggaatgaatcggaggccaatccttacgatcatcactctggaagactcaagtggaaaccttctcggcagaaacagttttgaggttagagtgtgcgcctgcccaggaagagatcggcggaccgaggaggaaaacctccgcaaaaagggtgaacctcaccatgagttgccacccggctccaccaagagagccctgcccaataacacatcatcaagccctcagccaaagaaaaagccattagacggcgagtattttactctccaaatacgggggagagagaggttcgaaatgtttcgcgagctgaatgaagccctggagctgaaggatgcccaggccgggaaagagcccggcggatcacgtgcgcacagttcacacctgaaaagcaagaagggccagtcaacctcccggcacaaaaaacttatgttcaaaactgaagggccagacagcgattag

SEQ ID NO: 12382 - DNA, 1182 bp, Artificial Sequence
  derived and/or modified sequence
atggaggagccacagtccgatcctagtgtcgagcctcctctgtctcaagaaactttttctgatctgtggaaactgctgcctgagaataacgtactgagtcctttgccctcacaagcaatggatgatctcatgctaagtccagacgatatcgagcagtggtttacggaagacccaggaccagacgaagcccctcgtatgccggaggctgcaccacctgttgccccagcgccggctgcccctacacctgccgccccagctccagccccatcctggcccctttcctcctcagtacccagtcagaagacttatcaaggttcttatggctttcgcctgggattcctgcactctgggaccgcaaaaagcgtgacctgcacttacagtcccgcacttaataaaatgttttgccaacttgcgaaaacttgtcctgttcaattgtgggttgatagcactcctcctcccggcaccagagtacgcgctatggcaatttacaagcagtctcaacatatgaccgaggtcgttcgccgatgccctcaccacgagagatgttccgattcggatggcctcgctccaccacagcacttgattcgagtcgaaggtaacctcagggttgaatatctggacgataggaatacttttaggcattctgtggttgtcccatacgagcctccggaagttggttcagactgcacgaccatccattacaattacatgtgcaacagctcctgtatgggcgggatgaaccggcgcccgattctcacaattatcacattggaggattccagcggcaatctcctcggacggaatagttttgaggttagagtctgtgcatgccccgggcgtgaccgccgcaccgaggaagagaacctgaggaaaaagggggagcctcaccacgaacttccaccaggctctaccaaacgggctctgccaaataatacaagcagctcacctcagccaaagaagaagcctctggacggcgagtactttacactccaaatacgtgggcgtgagcgcttcgaaatgttcagagagctgaacgaagcccttgagctgaaggatgcgcaggcaggaaaggagcctggcggttctagagcccacagttcacatttaaaatccaaaaagggccagtctacctccagacacaagaaactcatgtttaaaactgagggtccagatagcgattag

SEQ ID NO: 12383 - DNA, 1182 bp, Artificial Sequence
  derived and/or modified sequence
atggaagagccgcagagtgatccaagtgtagagcctcctctgtctcaagaaactttttccgacctgtggaagcttctgcccgaaaataatgtgctttctcctttgcccagccaagctatggatgacctgatgctttcacctgatgatatcgagcagtggtttaccgaagaccccggtccagacgaggcacccagaatgcctgaagccgctccaccagtcgcccctgcccctgccgccccaactcctgccgcccccgctccagccccctcgtggccactgagctcttcagtcccttcacagaaaacataccagggatcatacggcttccggctggggtttctccacagtggcacagccaaaagcgtaacctgcacatactctccagccttaaacaagatgttctgccagctggctaagacctgccccgtgcaactctgggtggatagtacaccgccgcctggcaccagagtcagggctatggcaatttacaagcaatcccagcatatgaccgaagtagtcagaagatgtccacatcacgagcgttgctccgatagtgatggactcgcccctccacagcaccttatcagagtcgaaggcaacctgagagtggagtatttggatgatagaaacactttccgacactccgtggtcgtgccttacgagcctcccgaagttggcagcgactgcaccacaatccattataactatatgtgcaacagcagctgtatgggcggaatgaatcggcgccccatcctgacaataattaccctggaggattccagcggaaatttgctgggacgcaatagcttcgaagtgcgggtatgtgcttgtcctggcagagacagacgaaccgaggaagaaaatctccgtaaaaaaggcgaaccccaccatgaactaccaccgggcagtaccaaacgggcgttacccaataacacctcctcgtcgcctcaacctaagaaaaaacctcttgatggagagtactttactctacaaattcgcggcagagagcgctttgaaatgtttcgcgaactgaatgaagcactggaattaaaggatgcgcaagccggaaaggaacccggcggttccagggcccactcttcccacctcaagtcaaagaaaggacagagcacctcacgccacaaaaaactcatgttcaagaccgaaggccctgacagtgattag

SEQ ID NO: 12384 - DNA, 1149 bp, Artificial Sequence
  derived and/or modified sequence
atggaagaaccccaatcagacccgagcgtagagcctccgctcagtcaagaaactttttccgacctctggaaactgttgccagagaacaacgtgctcagtccccttccatcccaggcaatggatgatctcatgctctctcctgatgacattgaacaatggttcactgaagatcccggccccgacgaagctcccagaatgcccgaggctgcacctccagtagctcccgctccagctgccccaacacctgctgctcctgcacccgccccctcctggcctctatcatctagtgtgccatcccagaagacataccagggcagctatggttttagactgacctgcacctactcccctgccctgaataagatgttctgtcagttggctaagacctgtccagtccagttgtgggtagactccaccccccccccaggcacccgcgtcagagcgatggcaatctataagcagtctcagcacatgaccgaggtggtacgaagatgcccgcatcatgagagatgtagcgattccgacggtctagcgccacctcagcacttgatcagagtggaaggcaatttaagagtggagtacttagatgatcgaaatacattccgacattccgttgtggttccatacgagccgccagaggtgggatctgattgtactacgatccattacaactacatgtgtaatagttcctgcatggggggaatgaacaggcgtcctattttgacaatcataacattagaggattcatctggcaacctgctcggccgcaacagttttgaggttcgggtctgcgcttgcccaggaagggacagacggacagaggaggagaatttgcgcaaaaaaggcgagccccaccacgaactccctcccggttctacaaagagggccttacccaacaacacatcttcatcccctcagccaaagaaaaaaccattagatggggaatactttacgctgcagattcgggggagggaacgatttgagatgtttagggaattgaacgaggcattggaactcaaggatgcccaagcagggaaggaaccaggcggttcaagggctcatagctcccacctaaagtctaagaagggacagtccactagccggcataaaaaactgatgttcaagactgagggaccagacagcgattag

SEQ ID NO: 12385 - DNA, 1182 bp, Artificial Sequence
  derived and/or modified sequence
atggaagaaccgcagtcagatccttctgtggagccccccctgtcgcaggaaactttctctgacttgtggaagttgttgcccgaaaataacgtgctcagccctttaccctcacaagcaatggacgacttgatgttgtcgcctgatgatatagaacaatggtttaccgaggatcctgggccagacgaagctccaagaatgcctgaagcagccccccctgtcgcccccgcccccgcagctccgactcccgcagcccccgctccagcgcccagttggcccttaagtagttctgtgcctagccaaaagacctatcaaggtagttatggcttcagactcggattcctgcactccggtaccgccaaaagtgtaacttgcacctactctcccgccttgaacaaaatgttttgccagcttgctaagacgtgcccagtgcagttatgggttgactccaccccaccccccggcacacgggtcagagccatggccatatacaagcaatcccaacatatgaccgaggtcgtgcgccggtgccctcatcacgagcgttgttccgatagcgacggattagctcccccccaacacttgattcgcgtggaagggaacttgcgggtggaatacttggacgaccgtaatacattcagacatagcgttgtggtcccttacgaaccacccgaagtaggctccgactgtactacaatccattataactatatgtgcaattcctcttgtatgggcggaatgaacaggaggcccattcttaccatcattactctggaggatagctcaggaaatctgctggggcgcaattccttcgaagttcgggtgtgtgcttgccctggacgcgacagacgaaccgaagaggaaaatctccgcaaaaaaggagaaccacatcatgaactcccacctggcagtactaaaagagccctgcctaacaatacatcatccagcccccaaccgaaaaagaagcctctcgacggcgaatattttacactgcagatcagagggcgagagagattcgagatgtttagagaacttaatgaggcccttgaactaaaagatgcacaggcagggaaggaacccgggggatccagggcccacagcagccatctcaaaagcaaaaagggtcagagcacctcacgacacaaaaagctgatgtttaagacagaaggtcctgattctgactag

SEQ ID NO: 12386 - DNA, 2579 bp, Artificial Sequence
  derived and/or modified sequence
gttttcccctcccatgtgctcaagactggcgctaaaagttttgagcttctcaaaagtctagagccaccgtccagggagcaggtagctgctgggctccggggacactttgcgttcgggctgggagcgtgctttccacgacggtgacacgcttccctggattggcagccagactgccttccgggtcactgccatggaggagccgcagtcagatcctagcgtcgagccccctctgagtcaggaaacattttcagacctatggaaactacttcctgaaaacaacgttctgtcccccttgccgtcccaagcaatggatgatttgatgctgtccccggacgatattgaacaatggttcactgaagacccaggtccagatgaagctcccagaatgccagaggctgctccccccgtggcccctgcaccagcagctcctacaccggcggcccctgcaccagccccctcctggcccctgtcatcttctgtcccttcccagaaaacctaccagggcagctacggtttccgtctgggcttcttgcattctgggacagccaagtctgtgacttgcacgtactcccctgccctcaacaagatgttttgccaactggccaagacctgccctgtgcagctgtgggttgattccacacccccgcccggcacccgcgtccgcgccatggccatctacaagcagtcacagcacatgacggaggttgtgaggcgctgcccccaccatgagcgctgctcagatagcgatggtctggcccctcctcagcatcttatccgagtggaaggaaatttgcgtgtggagtatttggatgacagaaacacttttcgacatagtgtggtggtgccctatgagccgcctgaggttggctctgactgtaccaccatccactacaactacatgtgtaacagttcctgcatgggcggcatgaaccggaggcccatcctcaccatcatcacactggaagactccagtggtaatctactgggacggaacagctttgaggtgcgtgtttgtgcctgtcctgggagagaccggcgcacagaggaagagaatctccgcaagaaaggggagcctcaccacgagctgcccccagggagcactaagcgagcactgcccaacaacaccagctcctctccccagccaaagaagaaaccactggatggagaatatttcacccttcagatccgtgggcgtgagcgcttcgagatgttccgagagctgaatgaggccttggaactcaaggatgcccaggctgggaaggagccaggggggagcagggctcactccagccacctgaagtccaaaaagggtcagtctacctcccgccataaaaaactcatgttcaagacagaagggcctgactcagactgacattctccacttcttgttccccactgacagcctcccacccccatctctccctcccctgccattttgggttttgggtctttgaacccttgcttgcaataggtgtgcgtcagaagcacccaggacttccatttgctttgtcccggggctccactgaacaagttggcctgcactggtgttttgttgtggggaggaggatggggagtaggacataccagcttagattttaaggtttttactgtgagggatgtttgggagatgtaagaaatgttcttgcagttaagggttagtttacaatcagccacattctaggtaggggcccacttcaccgtactaaccagggaagctgtccctcactgttgaattttctctaacttcaaggcccatatctgtgaaatgctggcatttgcacctacctcacagagtgcattgtgagggttaatgaaataatgtacatctggccttgaaaccaccttttattacatggggtctagaacttgacccccttgagggtgcttgttccctctccctgttggtcggtgggttggtagtttctacagttgggcagctggttaggtagagggagttgtcaagtctctgctggcccagccaaaccctgtctgacaacctcttggtgaaccttagtacctaaaaggaaatctcaccccatcccacaccctggaggatttcatctcttgtatatgatgatctggatccaccaagacttgttttatgctcagggtcaatttcttttttcttttttttttttttttttctttttctttgagactgggtctcgctttgttgcccaggctggagtggagtggcgtgatcttggcttactgcagcctttgcctccccggctcgagcagtcctgcctcagcctccggagtagctgggaccacaggttcatgccaccatggccagccaacttttgcatgttttgtagagatggggtctcacagtgttgcccaggctggtctcaaactcctgggctcaggcgatccacctgtctcagcctcccagagtgctgggattacaattgtgagccaccacgtccagctggaagggtcaacatcttttacattctgcaagcacatctgcattttcaccccacccttcccctccttctccctttttatatcccatttttatatcgatctcttattttacaataaaactttgctgccacctgtgtgtctgaggggtg

SEQ ID NO: 12387 - DNA, 2466 bp, Artificial Sequence
  derived and/or modified sequence
gagccaccgtccagggagcaggtagctgctgggctccggggacactttgcgttcgggctgggagcgtgctttccacgacggtgacacgcttccctggattggcagccagactgccttccgggtcactgccatggaggagccgcagtcagatcctagcgtcgagccccctctgagtcaggaaacattttcagacctatggaaactacttcctgaaaacaacgttctgtcccccttgccgtcccaagcaatggatgatttgatgctgtccccggacgatattgaacaatggttcactgaagacccaggtccagatgaagctcccagaatgccagaggctgctccccccgtggcccctgcaccagcagctcctacaccggcggcccctgcaccagccccctcctggcccctgtcatcttctgtcccttcccagaaaacctaccagggcagctacggtttccgtctgacttgcacgtactcccctgccctcaacaagatgttttgccaactggccaagacctgccctgtgcagctgtgggttgattccacacccccgcccggcacccgcgtccgcgccatggccatctacaagcagtcacagcacatgacggaggttgtgaggcgctgcccccaccatgagcgctgctcagatagcgatggtctggcccctcctcagcatcttatccgagtggaaggaaatttgcgtgtggagtatttggatgacagaaacacttttcgacatagtgtggtggtgccctatgagccgcctgaggttggctctgactgtaccaccatccactacaactacatgtgtaacagttcctgcatgggcggcatgaaccggaggcccatcctcaccatcatcacactggaagactccagtggtaatctactgggacggaacagctttgaggtgcgtgtttgtgcctgtcctgggagagaccggcgcacagaggaagagaatctccgcaagaaaggggagcctcaccacgagctgcccccagggagcactaagcgagcactgcccaacaacaccagctcctctccccagccaaagaagaaaccactggatggagaatatttcacccttcagatccgtgggcgtgagcgcttcgagatgttccgagagctgaatgaggccttggaactcaaggatgcccaggctgggaaggagccaggggggagcagggctcactccagccacctgaagtccaaaaagggtcagtctacctcccgccataaaaaactcatgttcaagacagaagggcctgactcagactgacattctccacttcttgttccccactgacagcctcccacccccatctctccctcccctgccattttgggttttgggtctttgaacccttgcttgcaataggtgtgcgtcagaagcacccaggacttccatttgctttgtcccggggctccactgaacaagttggcctgcactggtgttttgttgtggggaggaggatggggagtaggacataccagcttagattttaaggtttttactgtgagggatgtttgggagatgtaagaaatgttcttgcagttaagggttagtttacaatcagccacattctaggtaggggcccacttcaccgtactaaccagggaagctgtccctcactgttgaattttctctaacttcaaggcccatatctgtgaaatgctggcatttgcacctacctcacagagtgcattgtgagggttaatgaaataatgtacatctggccttgaaaccaccttttattacatggggtctagaacttgacccccttgagggtgcttgttccctctccctgttggtcggtgggttggtagtttctacagttgggcagctggttaggtagagggagttgtcaagtctctgctggcccagccaaaccctgtctgacaacctcttggtgaaccttagtacctaaaaggaaatctcaccccatcccacaccctggaggatttcatctcttgtatatgatgatctggatccaccaagacttgttttatgctcagggtcaatttcttttttcttttttttttttttttttctttttctttgagactgggtctcgctttgttgcccaggctggagtggagtggcgtgatcttggcttactgcagcctttgcctccccggctcgagcagtcctgcctcagcctccggagtagctgggaccacaggttcatgccaccatggccagccaacttttgcatgttttgtagagatggggtctcacagtgttgcccaggctggtctcaaactcctgggctcaggcgatccacctgtctcagcctcccagagtgctgggattacaattgtgagccaccacgtccagctggaagggtcaacatcttttacattctgcaagcacatctgcattttcaccccacccttcccctccttctccctttttatatcccatttttatatcgatctcttattttacaataaaactttgctgcc

SEQ ID NO: 12388 - DNA, 2506 bp, Artificial Sequence
  derived and/or modified sequence
aaaagtctagagccaccgtccagggagcaggtagctgctgggctccggggacactttgcgttcgggctgggagcgtgctttccacgacggtgacacgcttccctggattggccagactgccttccgggtcactgccatggaggagccgcagtcagatcctagcgtcgagccccctctgagtcaggaaacattttcagacctatggaaactacttcctgaaaacaacgttctgtcccccttgccgtcccaagcaatggatgatttgatgctgtccccggacgatattgaacaatggttcactgaagacccaggtccagatgaagctcccagaatgccagaggctgctccccccgtggcccctgcaccagcagctcctacaccggcggcccctgcaccagccccctcctggcccctgtcatcttctgtcccttcccagaaaacctaccagggcagctacggtttccgtctgggcttcttgcattctgggacagccaagtctgtgacttgcacgtactcccctgccctcaacaagatgttttgccaactggccaagacctgccctgtgcagctgtgggttgattccacacccccgcccggcacccgcgtccgcgccatggccatctacaagcagtcacagcacatgacggaggttgtgaggcgctgcccccaccatgagcgctgctcagatagcgatggtctggcccctcctcagcatcttatccgagtggaaggaaatttgcgtgtggagtatttggatgacagaaacacttttcgacatagtgtggtggtgccctatgagccgcctgaggttggctctgactgtaccaccatccactacaactacatgtgtaacagttcctgcatgggcggcatgaaccggaggcccatcctcaccatcatcacactggaagactccagtggtaatctactgggacggaacagctttgaggtgcgtgtttgtgcctgtcctgggagagaccggcgcacagaggaagagaatctccgcaagaaaggggagcctcaccacgagctgcccccagggagcactaagcgagcactgcccaacaacaccagctcctctccccagccaaagaagaaaccactggatggagaatatttcacccttcagatccgtgggcgtgagcgcttcgagatgttccgagagctgaatgaggccttggaactcaaggatgcccaggctgggaaggagccaggggggagcagggctcactccagccacctgaagtccaaaaagggtcagtctacctcccgccataaaaaactcatgttcaagacagaagggcctgactcagactgacattctccacttcttgttccccactgacagcctcccacccccatctctccctcccctgccattttgggttttgggtctttgaacccttgcttgcaataggtgtgcgtcagaagcacccaggacttccatttgctttgtcccggggctccactgaacaagttggcctgcactggtgttttgttgtggggaggaggatggggagtaggacataccagcttagattttaaggtttttactgtgagggatgtttgggagatgtaagaaatgttcttgcagttaagggttagtttacaatcagccacattctaggtaggggcccacttcaccgtactaaccagggaagctgtccctcactgttgaattttctctaacttcaaggcccatatctgtgaaatgctggcatttgcacctacctcacagagtgcattgtgagggttaatgaaataatgtacatctggccttgaaaccaccttttattacatggggtctagaacttgacccccttgagggtgcttgttccctctccctgttggtcggtgggttggtagtttctacagttgggcagctggttaggtagagggagttgtcaagtctctgctggcccagccaaaccctgtctgacaacctcttggtgaaccttagtacctaaaaggaaatctcaccccatcccacaccctggaggatttcatctcttgtatatgatgatctggatccaccaagacttgttttatgctcagggtcaatttcttttttcttttttttttttttttttctttttctttgagactgggtctcgctttgttgcccaggctggagtggagtggcgtgatcttggcttactgcagcctttgcctccccggctcgagcagtcctgcctcagcctccggagtagctgggaccacaggttcatgccaccatggccagccaacttttgcatgttttgtagagatggggtctcacagtgttgcccaggctggtctcaaactcctgggctcaggcgatccacctgtctcagcctcccagagtgctgggattacaattgtgagccaccacgtccagctggaagggtcaacatcttttacattctgcaagcacatctgcattttcaccccacccttcccctccttctccctttttatatcccatttttatatcgatctcttattttacaataaaactttgctgcca

SEQ ID NO: 12389 - DNA, 2580 bp, Artificial Sequence
  derived and/or modified sequence
ctagagccaccgtccagggagcaggtagctgctgggctccggggacactttgcgttcgggctgggagcgtgctttccacgacggtgacacgcttccctggattggcagccagactgccttccgggtcactgccatggaggagccgcagtcagatcctagcgtcgagccccctctgagtcaggaaacattttcagacctatggaaactacttcctgaaaacaacgttctgtcccccttgccgtcccaagcaatggatgatttgatgctgtccccggacgatattgaacaatggttcactgaagacccaggtccagatgaagctcccagaatgccagaggctgctccccccgtggcccctgcaccagcagctcctacaccggcggcccctgcaccagccccctcctggcccctgtcatcttctgtcccttcccagaaaacctaccagggcagctacggtttccgtctgggcttcttgcattctgggacagccaagtctgtgacttgcacgtactcccctgccctcaacaagatgttttgccaactggccaagacctgccctgtgcagctgtgggttgattccacacccccgcccggcacccgcgtccgcgccatggccatctacaagcagtcacagcacatgacggaggttgtgaggcgctgcccccaccatgagcgctgctcagatagcgatggtctggcccctcctcagcatcttatccgagtggaaggaaatttgcgtgtggagtatttggatgacagaaacacttttcgacatagtgtggtggtgccctatgagccgcctgaggttggctctgactgtaccaccatccactacaactacatgtgtaacagttcctgcatgggcggcatgaaccggaggcccatcctcaccatcatcacactggaagactccagtggtaatctactgggacggaacagctttgaggtgcgtgtttgtgcctgtcctgggagagaccggcgcacagaggaagagaatctccgcaagaaaggggagcctcaccacgagctgcccccagggagcactaagcgagcactgcccaacaacaccagctcctctccccagccaaagaagaaaccactggatggagaatatttcacccttcagatgctacttgacttacgatggtgttacttcctgataaactcgtcgtaagttgaaaatattatccgtgggcgtgagcgcttcgagatgttccgagagctgaatgaggccttggaactcaaggatgcccaggctgggaaggagccaggggggagcagggctcactccagccacctgaagtccaaaaagggtcagtctacctcccgccataaaaaactcatgttcaagacagaagggcctgactcagactgacattctccacttcttgttccccactgacagcctcccacccccatctctccctcccctgccattttgggttttgggtctttgaacccttgcttgcaataggtgtgcgtcagaagcacccaggacttccatttgctttgtcccggggctccactgaacaagttggcctgcactggtgttttgttgtggggaggaggatggggagtaggacataccagcttagattttaaggtttttactgtgagggatgtttgggagatgtaagaaatgttcttgcagttaagggttagtttacaatcagccacattctaggtaggggcccacttcaccgtactaaccagggaagctgtccctcactgttgaattttctctaacttcaaggcccatatctgtgaaatgctggcatttgcacctacctcacagagtgcattgtgagggttaatgaaataatgtacatctggccttgaaaccaccttttattacatggggtctagaacttgacccccttgagggtgcttgttccctctccctgttggtcggtgggttggtagtttctacagttgggcagctggttaggtagagggagttgtcaagtctctgctggcccagccaaaccctgtctgacaacctcttggtgaaccttagtacctaaaaggaaatctcaccccatcccacaccctggaggatttcatctcttgtatatgatgatctggatccaccaagacttgttttatgctcagggtcaatttcttttttcttttttttttttttttttctttttctttgagactgggtctcgctttgttgcccaggctggagtggagtggcgtgatcttggcttactgcagcctttgcctccccggctcgagcagtcctgcctcagcctccggagtagctgggaccacaggttcatgccaccatggccagccaacttttgcatgttttgtagagatggggtctcacagtgttgcccaggctggtctcaaactcctgggctcaggcgatccacctgtctcagcctcccagagtgctgggattacaattgtgagccaccacgtccagctggaagggtcaacatcttttacattctgcaagcacatctgcattttcaccccacccttcccctccttctccctttttatatcccatttttatatcgatctcttattttacaataaaactttgctgccacctgtgtgtctgagggg

SEQ ID NO: 12390 - DNA, 1325 bp, Artificial Sequence
  derived and/or modified sequence
gggaaataagagagaaaagaagagtaagaagaaatataagagccaccatggaagagccacagtcagacccgagcgtggagccgccattgagccaggagactttcagcgacttgtggaaacttctcccggaaaacaatgtgctgtcaccgttgccgagccaggcgatggatgacctgatgctttcgccggacgacatcgagcagtggttcactgaagatcccggaccggacgaggcaccgagaatgcccgaagcggctccgcctgtggcgcctgccccagcagcgcccacgcccgcagcgcccgccccggcaccaagctggccgctgtcgtcatcagtgccctcgcaaaagacctatcagggatcgtacgggttccgcctgggctttcttcactcgggaacggccaagtcggtcacatgcacgtactccccagcgctcaacaaaatgttctgccagttggcaaaaacgtgtcccgtccaactctgggtggattccacacccccacccggtacaagggtacgagccatggcaatctacaagcagtcccaacacatgacggaagtcgtgcggcggtgcccccaccatgagcggtgctcagattcagatggtcttgctccgccccagcacttgattagggtggaaggtaacctcagagtcgagtatcttgatgacagaaatacctttcggcactccgtggtagtcccctatgaacccccggaagtggggtcggactgtactaccatccattacaactatatgtgcaattcgagctgtatgggcgggatgaatcgacggcctatcctcaccatcattacgttggaagatagctcgggaaacctgctcggtcgcaacagctttgaggtccgagtatgtgcctgcccgggacgcgaccgacgcacagaggaagagaacttgaggaaaaagggagagccccatcacgagttgccccctggatcgacgaaacgcgcgctccctaacaatacatcatcatcacctcagccgaagaagaaaccgcttgatggggaatactttacgcttcagattaggggtagagagagattcgaaatgtttagagagttgaatgaggccctcgagcttaaagacgcgcaagcgggaaaggagcccggtggctccagggctcattcctcgcaccttaagagcaagaaagggcagtcgacgtcgcggcataagaaactcatgttcaagacagaagggcccgacagcgattgataagctgccttctgcggggcttgccttctggccatgcccttcttctctcccttgcacctgtacctcttggtctttgaataaagcctgagtaggaag

SEQ ID NO: 12391 - RNA, 1182 nt, Artificial Sequence
  derived and/or modified sequence
auggaggaaccacagucagacccaagcguggaacccccccugagccaggagacauuuagugaccuuuggaaguuacuccccgagaacaacgugcucucaccccucccaagccaggcuauggaugaccugaugcucagccccgaugacaucgaacagugguucacggaagaucccgggccggaugaggcuccccguaugccggaagccgcacccccuguagccccugccccugccgcccccaccccagcugcucccgcgccagccccuuccuggccuuuauccagcucgguaccuucccagaagacuuaccaagguucauauggguuccggcucgguuuccugcauuccggcaccgccaagucaguuacuuguaccuacucccccgcuuugaauaaaauguuuugccagcuagcaaagacuugcccaguccaguuguggguggauucuaccccucccccugguacgcgcgugcgggcaauggcaaucuauaagcagagccagcacaugacugaggucguucggagaugcccccaccacgaacgauguagugacuccgacggccucgcccccccacagcaccucaucagagucgaggggaaccugagaguggaguauuuggaugauagaaacacuuuccgacacuccguggucgugccuuacgagccucccgaaguuggcagcgacugcaccacaauccauuauaacuauaugugcaacagcagcuguaugggcggaaugaaucggcgccccauccugacaauaauuacccuggaggauuccagcggaaauuugcugggacgcaauagcuucgaagugcggguaugugcuuguccuggcagagacagacgaaccgaggaagaaaaucuccguaaaaaaggcgaaccccaccaugaacuaccacccggaagcaccaaaagagccuugccaaacaauacgaguuccuccccccaaccuaagaaaaagccuuuggauggagaguacuuuacauugcagauucggggcagagagcguuucgagauguuuagggaacugaaugaggccuuggagcucaaggaugcgcaggccgggaaggagcccggcggcucucgcgcgcacagcagucaccuuaaaucuaaaaagggucaguccacgucuaggcacaagaaacuuauguucaaaaccgaaggcccugauagcgauuag

SEQ ID NO: 12392 - RNA, 1149 nt, Artificial Sequence
  derived and/or modified sequence
auggaggagccucaguccgacccuaguguggagcccccucuuagucaagaaacauucagugaucuguggaagcucuugccagagaacaauguucugucaccucuaccgucccaagccauggaugaccucaugcugagcccugacgauauagagcaaugguuuacagaggaucccggccccgaugaagccccaaggaugccagaggcugcacccccagucgcaccagcacccgccgcacccacaccagccgcccccgcucccgcaccaucuuggccacucucuaguuccgucccuagccaaaagacuuaucaaggaaguuacggcuuucggcucaccuguacauauucucccgcucugaauaaaauguucugucagcucgcgaagacauguccagugcaauuauggguggacagcaccccuccacccgguaccagaguucgggccauggcuaucuauaaacagucccagcauaugacggaaguggugagaagguguccccaccaugaacgcugcuccgauuccgauggcuuagcuccaccacaacaucuuauucgagucgaagguaacuugcguguggaguaccuugacgaccggaacacguuuagacacucggucguagugccuuacgagccccccgaagucggcagcgacugcacaaccauccauuauaacuacaugugcaacuccaguugcaugggcggaaugaaucggaggccaauccuuacgaucaucacucuggaagacucaaguggaaaccuucucggcagaaacaguuuugagguuagagugugcgccugcccaggaagagaucggcggaccgaggaggaaaaccuccgcaaaaagggugaaccucaccaugaguugccacccggcuccaccaagagagcccugcccaauaacacaucaucaagcccucagccaaagaaaaagccauuagacggcgaguauuuuacucuccaaauacgggggagagagagguucgaaauguuucgcgagcugaaugaagcccuggagcugaaggaugcccaggccgggaaagagcccggcggaucacgugcgcacaguucacaccugaaaagcaagaagggccagucaaccucccggcacaaaaaacuuauguucaaaacugaagggccagacagcgauuag

SEQ ID NO: 12393 - RNA, 1182 nt, Artificial Sequence
  derived and/or modified sequence
auggaggagccacaguccgauccuagugucgagccuccucugucucaagaaacuuuuucugaucuguggaaacugcugccugagaauaacguacugaguccuuugcccucacaagcaauggaugaucucaugcuaaguccagacgauaucgagcagugguuuacggaagacccaggaccagacgaagccccucguaugccggaggcugcaccaccuguugccccagcgccggcugccccuacaccugccgccccagcuccagccccauccuggccccuuuccuccucaguacccagucagaagacuuaucaagguucuuauggcuuucgccugggauuccugcacucugggaccgcaaaaagcgugaccugcacuuacagucccgcacuuaauaaaauguuuugccaacuugcgaaaacuuguccuguucaauuguggguugauagcacuccuccucccggcaccagaguacgcgcuauggcaauuuacaagcagucucaacauaugaccgaggucguucgccgaugcccucaccacgagagauguuccgauucggauggccucgcuccaccacagcacuugauucgagucgaagguaaccucaggguugaauaucuggacgauaggaauacuuuuaggcauucugugguugucccauacgagccuccggaaguugguucagacugcacgaccauccauuacaauuacaugugcaacagcuccuguaugggcgggaugaaccggcgcccgauucucacaauuaucacauuggaggauuccagcggcaaucuccucggacggaauaguuuugagguuagagucugugcaugccccgggcgugaccgccgcaccgaggaagagaaccugaggaaaaagggggagccucaccacgaacuuccaccaggcucuaccaaacgggcucugccaaauaauacaagcagcucaccucagccaaagaagaagccucuggacggcgaguacuuuacacuccaaauacgugggcgugagcgcuucgaaauguucagagagcugaacgaagcccuugagcugaaggaugcgcaggcaggaaaggagccuggcgguucuagagcccacaguucacauuuaaaauccaaaaagggccagucuaccuccagacacaagaaacucauguuuaaaacugaggguccagauagcgauuag

SEQ ID NO: 12394 - RNA, 1182 nt, Artificial Sequence
  derived and/or modified sequence
auggaagagccgcagagugauccaaguguagagccuccucugucucaagaaacuuuuuccgaccuguggaagcuucugcccgaaaauaaugugcuuucuccuuugcccagccaagcuauggaugaccugaugcuuucaccugaugauaucgagcagugguuuaccgaagaccccgguccagacgaggcacccagaaugccugaagccgcuccaccagucgccccugccccugccgccccaacuccugccgcccccgcuccagcccccucguggccacugagcucuucagucccuucacagaaaacauaccagggaucauacggcuuccggcugggguuucuccacaguggcacagccaaaagcguaaccugcacauacucuccagccuuaaacaagauguucugccagcuggcuaagaccugccccgugcaacucuggguggauaguacaccgccgccuggcaccagagucagggcuauggcaauuuacaagcaaucccagcauaugaccgaaguagucagaagauguccacaucacgagcguugcuccgauagugauggacucgccccuccacagcaccuuaucagagucgaaggcaaccugagaguggaguauuuggaugauagaaacacuuuccgacacuccguggucgugccuuacgagccucccgaaguuggcagcgacugcaccacaauccauuauaacuauaugugcaacagcagcuguaugggcggaaugaaucggcgccccauccugacaauaauuacccuggaggauuccagcggaaauuugcugggacgcaauagcuucgaagugcggguaugugcuuguccuggcagagacagacgaaccgaggaagaaaaucuccguaaaaaaggcgaaccccaccaugaacuaccaccgggcaguaccaaacgggcguuacccaauaacaccuccucgucgccucaaccuaagaaaaaaccucuugauggagaguacuuuacucuacaaauucgcggcagagagcgcuuugaaauguuucgcgaacugaaugaagcacuggaauuaaaggaugcgcaagccggaaaggaacccggcgguuccagggcccacucuucccaccucaagucaaagaaaggacagagcaccucacgccacaaaaaacucauguucaagaccgaaggcccugacagugauuag

SEQ ID NO: 12395 - RNA, 1149 nt, Artificial Sequence
  derived and/or modified sequence
auggaagaaccccaaucagacccgagcguagagccuccgcucagucaagaaacuuuuuccgaccucuggaaacuguugccagagaacaacgugcucaguccccuuccaucccaggcaauggaugaucucaugcucucuccugaugacauugaacaaugguucacugaagaucccggccccgacgaagcucccagaaugcccgaggcugcaccuccaguagcucccgcuccagcugccccaacaccugcugcuccugcacccgcccccuccuggccucuaucaucuagugugccaucccagaagacauaccagggcagcuaugguuuuagacugaccugcaccuacuccccugcccugaauaagauguucugucaguuggcuaagaccuguccaguccaguuguggguagacuccaccccccccccaggcacccgcgucagagcgauggcaaucuauaagcagucucagcacaugaccgaggugguacgaagaugcccgcaucaugagagauguagcgauuccgacggucuagcgccaccucagcacuugaucagaguggaaggcaauuuaagaguggaguacuuagaugaucgaaauacauuccgacauuccguugugguuccauacgagccgccagaggugggaucugauuguacuacgauccauuacaacuacauguguaauaguuccugcauggggggaaugaacaggcguccuauuuugacaaucauaacauuagaggauucaucuggcaaccugcucggccgcaacaguuuugagguucgggucugcgcuugcccaggaagggacagacggacagaggaggagaauuugcgcaaaaaaggcgagccccaccacgaacucccucccgguucuacaaagagggccuuacccaacaacacaucuucauccccucagccaaagaaaaaaccauuagauggggaauacuuuacgcugcagauucgggggagggaacgauuugagauguuuagggaauugaacgaggcauuggaacucaaggaugcccaagcagggaaggaaccaggcgguucaagggcucauagcucccaccuaaagucuaagaagggacaguccacuagccggcauaaaaaacugauguucaagacugagggaccagacagcgauuag

SEQ ID NO: 12396 - RNA, 1182 nt, Artificial Sequence
  derived and/or modified sequence
auggaagaaccgcagucagauccuucuguggagcccccccugucgcaggaaacuuucucugacuuguggaaguuguugcccgaaaauaacgugcucagcccuuuacccucacaagcaauggacgacuugauguugucgccugaugauauagaacaaugguuuaccgaggauccugggccagacgaagcuccaagaaugccugaagcagcccccccugucgcccccgcccccgcagcuccgacucccgcagcccccgcuccagcgcccaguuggcccuuaaguaguucugugccuagccaaaagaccuaucaagguaguuauggcuucagacucggauuccugcacuccgguaccgccaaaaguguaacuugcaccuacucucccgccuugaacaaaauguuuugccagcuugcuaagacgugcccagugcaguuauggguugacuccaccccaccccccggcacacgggucagagccauggccauauacaagcaaucccaacauaugaccgaggucgugcgccggugcccucaucacgagcguuguuccgauagcgacggauuagcucccccccaacacuugauucgcguggaagggaacuugcggguggaauacuuggacgaccguaauacauucagacauagcguuguggucccuuacgaaccacccgaaguaggcuccgacuguacuacaauccauuauaacuauaugugcaauuccucuuguaugggcggaaugaacaggaggcccauucuuaccaucauuacucuggaggauagcucaggaaaucugcuggggcgcaauuccuucgaaguucgggugugugcuugcccuggacgcgacagacgaaccgaagaggaaaaucuccgcaaaaaaggagaaccacaucaugaacucccaccuggcaguacuaaaagagcccugccuaacaauacaucauccagcccccaaccgaaaaagaagccucucgacggcgaauauuuuacacugcagaucagagggcgagagagauucgagauguuuagagaacuuaaugaggcccuugaacuaaaagaugcacaggcagggaaggaacccgggggauccagggcccacagcagccaucucaaaagcaaaaagggucagagcaccucacgacacaaaaagcugauguuuaagacagaagguccugauucugacuag

SEQ ID NO: 12397 - RNA, 1325 nt, Artificial Sequence
  derived and/or modified sequence
gggaaauaagagagaaaagaagaguaagaagaaauauaagagccaccauggaagagccacagucagacccgagcguggagccgccauugagccaggagacuuucagcgacuuguggaaacuucucccggaaaacaaugugcugucaccguugccgagccaggcgauggaugaccugaugcuuucgccggacgacaucgagcagugguucacugaagaucccggaccggacgaggcaccgagaaugcccgaagcggcuccgccuguggcgccugccccagcagcgcccacgcccgcagcgcccgccccggcaccaagcuggccgcugucgucaucagugcccucgcaaaagaccuaucagggaucguacggguuccgccugggcuuucuucacucgggaacggccaagucggucacaugcacguacuccccagcgcucaacaaaauguucugccaguuggcaaaaacgugucccguccaacucuggguggauuccacacccccacccgguacaaggguacgagccauggcaaucuacaagcagucccaacacaugacggaagucgugcggcggugcccccaccaugagcggugcucagauucagauggucuugcuccgccccagcacuugauuaggguggaagguaaccucagagucgaguaucuugaugacagaaauaccuuucggcacuccgugguaguccccuaugaacccccggaaguggggucggacuguacuaccauccauuacaacuauaugugcaauucgagcuguaugggcgggaugaaucgacggccuauccucaccaucauuacguuggaagauagcucgggaaaccugcucggucgcaacagcuuugagguccgaguaugugccugcccgggacgcgaccgacgcacagaggaagagaacuugaggaaaaagggagagccccaucacgaguugcccccuggaucgacgaaacgcgcgcucccuaacaauacaucaucaucaccucagccgaagaagaaaccgcuugauggggaauacuuuacgcuucagauuagggguagagagagauucgaaauguuuagagaguugaaugaggcccucgagcuuaaagacgcgcaagcgggaaaggagcccgguggcuccagggcucauuccucgcaccuuaagagcaagaaagggcagucgacgucgcggcauaagaaacucauguucaagacagaagggcccgacagcgauugauaagcugccuucugcggggcuugccuucuggccaugcccuucuucucucccuugcaccuguaccucuuggucuuugaauaaagccugaguaggaag

SEQ ID NO: 12398 - protein, 1807 aa, Artificial Sequence
  derived and/or modified sequence
MAKPTSKDSGLKEKFKILLGLGTPRPNPRSAEGKQTEFIITAEILRELSMECGLNNRIRMIGQICEVAKTKKFEEHAVEALWKAVADLLQPERPLEARHAVLALLKAIVQGQGERLGVLRALFFKVIKDYPSNEDLHERLEVFKALTDNGRHITYLEEELADFVLQWMDVGLSSEFLLVLVNLVKFNSCYLDEYIARMVQMICLLCVRTASSVDIEVSLQVLDAVVCYNCLPAESLPLFIVTLCRTINVKELCEPCWKLMRNLLGTHLGHSAIYNMCHLMEDRAYMEDAPLLRGAVFFVGMALWGAHRLYSLRNSPTSVLPSFYQAMACPNEVVSYEIVLSITRLIKKYRKELQVVAWDILLNIIERLLQQLQTLDSPELRTIVHDLLTTVEELCDQNEFHGSQERYFELVERCADQRPESSLLNLISYRAQSIHPAKDGWIQNLQALMERFFRSESRGAVRIKVLDVLSFVLLINRQFYEEELINSVVISQLSHIPEDKDHQVRKLATQLLVDLAEGCHTHHFNSLLDIIEKVMARSLSPPPELEERDVAAYSASLEDVKTAVLGLLVILQTKLYTLPASHATRVYEMLVSHIQLHYKHSYTLPIASSIRLQAFDFLLLLRADSLHRLGLPNKDGVVRFSPYCVCDYMEPERGSEKKTSGPLSPPTGPPGPAPAGPAVRLGSVPYSLLFRVLLQCLKQESDWKVLKLVLGRLPESLRYKVLIFTSPCSVDQLCSALCSMLSGPKTLERLRGAPEGFSRTDLHLAVVPVLTALISYHNYLDKTKQREMVYCLEQGLIHRCASQCVVALSICSVEMPDIIIKALPVLVVKLTHISATASMAVPLLEFLSTLARLPHLYRNFAAEQYASVFAISLPYTNPSKFNQYIVCLAHHVIAMWFIRCRLPFRKDFVPFITKGLRSNVLLSFDDTPEKDSFRARSTSLNERPKSLRIARPPKQGLNNSPPVKEFKESSAAEAFRCRSISVSEHVVRSRIQTSLTSASLGSADENSVAQADDSLKNLHLELTETCLDMMARYVFSNFTAVPKRSPVGEFLLAGGRTKTWLVGNKLVTVTTSVGTGTRSLLGLDSGELQSGPESSSSPGVHVRQTKEAPAKLESQAGQQVSRGARDRVRSMSGGHGLRVGALDVPASQFLGSATSPGPRTAPAAKPEKASAGTRVPVQEKTNLAAYVPLLTQGWAEILVRRPTGNTSWLMSLENPLSPFSSDINNMPLQELSNALMAAERFKEHRDTALYKSLSVPAASTAKPPPLPRSNTVASFSSLYQSSCQGQLHRSVSWADSAVVMEEGSPGEVPVLVEPPGLEDVEAALGMDRRTDAYSRSSSVSSQEEKSLHAEELVGRGIPIERVVSSEGGRPSVDLSFQPSQPLSKSSSSPELQTLQDILGDPGDKADVGRLSPEVKARSQSGTLDGESAAWSASGEDSRGQPEGPLPSSSPRSPSGLRPRGYTISDSAPSRRGKRVERDALKSRATASNAEKVPGINPSFVFLQLYHSPFFGDESNKPILLPNESQSFERSVQLLDQIPSYDTHKIAVLYVGEGQSNSELAILSNEHGSYRYTEFLTGLGRLIELKDCQPDKVYLGGLDVCGEDGQFTYCWHDDIMQAVFHIATLMPTKDVDKHRCDKKRHLGNDFVSIVYNDSGEDFKLGTIKGQFNFVHVIVTPLDYECNLVSLQCRKDMEGLVDTSVAKIVSDRNLPFVARQMALHANMASQVHHSRSNPTDIYPSKWIARLRHIKRLRQRICEEAAYSNPSLPLVHPPSHSKAPAQTPAEPTPGYEVGQRKRLISSVEDFTEFV

SEQ ID NO: 12399 - DNA, 6156 bp, Artificial Sequence
  derived and/or modified sequence
cgttttcttgcttggggcgaaagggggcagcggagcggagcgcccgaaacccagcccctgcggaccgcaatctttgggaaaaaggcgcaaggtgggaacgcagggccgcacgtgggaaccgttcgcggctgccgggtttgcagcccctgcccgcgcagctgggagccgcaggaggcggcccgggactccagcctgcagcccctatcccgcctcctcccacgctccagccacggcgcggcgctacctgctgcagcctctcttctccggagaggcccgggctcctccctacacccccgcggcccagccccgggtcccaggctccggctccgggtcagcatcctcgcgctcaaggcggtcatgccggactcctgcggactacacatcccggcggcccatgcggccccgtcacgtgatgcaaggatcgccggcctttccgccagagggcggcacagaactacaactcccagcaagctcccaaggcggccctccgcgcaatgccgctaccggaagtgcgggtcgcgcttccggcggcgtcccggggccaggggggtgcgcctttctccgcgtcggggcggcccggagcgcggtggcgcggcgcgggaggggttttctggtgcgtcctggtccaccatggccaaaccaacaagcaaagattcaggcttgaaggagaagtttaagattctgttgggactgggaacaccgaggccaaatcccaggtctgcagagggtaaacagacggagtttatcatcaccgcggaaatactgagagaactgagcatggaatgtggcctcaacaatcgcatccggatgatagggcagatttgtgaagtcgcaaaaaccaagaaatttgaagagcacgcagtggaagcactctggaaggcggtcgcggatctgttgcagccggagcggccgctggaggcccggcacgcggtgctggctctgctgaaggccatcgtgcaggggcagggcgagcgtttgggggtcctcagagccctcttctttaaggtcatcaaggattacccttccaacgaagaccttcacgaaaggctggaggttttcaaggccctcacagacaatgggagacacatcacctacttggaggaagagctggctgactttgtcctgcagtggatggatgttggcttgtcctcggaattccttctggtgctggtgaacttggtcaaattcaatagctgttacctcgacgagtacatcgcaaggatggttcagatgatctgtctgctgtgcgtccggaccgcgtcctctgtggacatagaggtctccctgcaggtgctggacgccgtggtctgctacaactgcctgccggctgagagcctcccgctgttcatcgttaccctctgtcgcaccatcaacgtcaaggagctctgcgagccttgctggaagctgatgcggaacctccttggcacccacctgggccacagcgccatctacaacatgtgccacctcatggaggacagagcctacatggaggacgcgcccctgctgagaggagccgtgttttttgtgggcatggctctctggggagcccaccggctctattctctcaggaactcgccgacatctgtgttgccatcattttaccaggccatggcatgtccgaacgaggtggtgtcctatgagatcgtcctgtccatcaccaggctcatcaagaagtataggaaggagctccaggtggtggcgtgggacattctgctgaacatcatcgaacggctccttcagcagctccagaccttggacagcccggagctcaggaccatcgtccatgacctgttgaccacggtggaggagctgtgtgaccagaacgagttccacgggtctcaggagagatactttgaactggtggagagatgtgcggaccagaggcctgagtcctccctcctgaacctgatctcctatagagcgcagtccatccacccggccaaggacggctggattcagaacctgcaggcgctgatggagagattcttcaggagcgagtcccgaggcgccgtgcgcatcaaggtgctggacgtgctgtcctttgtgctgctcatcaacaggcagttctatgaggaggagctgattaactcagtggtcatctcgcagctctcccacatccccgaggataaagaccaccaggtccgaaagctggccacccagttgctggtggacctggcagagggctgccacacacaccacttcaacagcctgctggacatcatcgagaaggtgatggcccgctccctctccccacccccggagctggaagaaagggatgtggccgcatactcggcctccttggaggatgtgaagacagccgtcctggggcttctggtcatccttcagaccaagctgtacaccctgcctgcaagccacgccacgcgtgtgtatgagatgctggtcagccacattcagctccactacaagcacagctacaccctgccaatcgcgagcagcatccggctgcaggcctttgacttcctgttgctgctgcgggccgactcactgcaccgcctgggcctgcccaacaaggatggagtcgtgcggttcagcccctactgcgtctgcgactacatggagccagagagaggctctgagaagaagaccagcggccccctttctcctcccacagggcctcctggcccggcgcctgcaggccccgccgtgcggctggggtccgtgccctactccctgctcttccgcgtcctgctgcagtgcttgaagcaggagtctgactggaaggtgctgaagctggttctgggcaggctgcctgagtccctgcgctataaagtgctcatctttacttccccttgcagtgtggaccagctgtgctctgctctctgctccatgctttcaggcccaaagacactggagcggctccgaggcgccccagaaggcttctccagaactgacttgcacctggccgtggttccagtgctgacagcattaatctcttaccataactacctggacaaaaccaaacagcgcgagatggtctactgcctggagcagggcctcatccaccgctgtgccagccagtgcgtcgtggccttgtccatctgcagcgtggagatgcctgacatcatcatcaaggcgctgcctgttctggtggtgaagctcacgcacatctcagccacagccagcatggccgtcccactgctggagttcctgtccactctggccaggctgccgcacctctacaggaactttgccgcggagcagtatgccagtgtgttcgccatctccctgccgtacaccaacccctccaagtttaatcagtacatcgtgtgtctggcccatcacgtcatagccatgtggttcatcaggtgccgcctgcccttccggaaggattttgtccctttcatcactaagggcctgcggtccaatgtcctcttgtcttttgatgacacccccgagaaggacagcttcagggcccggagtactagtctcaacgagagacccaagagtctgaggatagccagaccccccaaacaaggcttgaataactctccacccgtgaaagaattcaaggagagctctgcagccgaggccttccggtgccgcagcatcagtgtgtctgaacatgtggtccgcagcaggatacagacgtccctcaccagtgccagcttggggtctgcagatgagaactccgtggcccaggctgacgatagcctgaaaaacctccacctggagctcacggaaacctgtctggacatgatggctcgatacgtcttctccaacttcacggctgtcccgaagaggtctcctgtgggcgagttcctcctagcgggtggcaggaccaaaacctggctggttgggaacaagcttgtcactgtgacgacaagcgtgggaaccgggacccggtcgttactaggcctggactcgggggagctgcagtccggcccggagtcgagctccagccccggggtgcatgtgagacagaccaaggaggcgccggccaagctggagtcccaggctgggcagcaggtgtcccgtggggcccgggatcgggtccgttccatgtcggggggccatggtcttcgagttggcgccctggacgtgccggcctcccagttcctgggcagtgccacttctccaggaccacggactgcaccagccgcgaaacctgagaaggcctcagctggcacccgggttcctgtgcaggagaagacgaacctggcggcctatgtgcccctgctgacccagggctgggcggagatcctggtccggaggcccacagggaacaccagctggctgatgagcctggagaacccgctcagccctttctcctcggacatcaacaacatgcccctgcaggagctgtctaacgccctcatggcggctgagcgcttcaaggagcaccgggacacagccctgtacaagtcactgtcggtgccggcagccagcacggccaaaccccctcctctgcctcgctccaacacagtggcctctttctcctccctgtaccagtccagctgccaaggacagctgcacaggagcgtttcctgggcagactccgccgtggtcatggaggagggaagtccgggcgaggttcctgtgctggtggagcccccagggttggaggacgttgaggcagcgctaggcatggacaggcgcacggatgcctacagcaggtcgtcctcagtctccagccaggaggagaagtcgctccacgcggaggagctggttggcaggggcatccccatcgagcgagtcgtctcctcggagggtggccggccctctgtggacctctccttccagccctcgcagcccctgagcaagtccagctcctctcccgagctgcagactctgcaggacatcctcggggaccctggggacaaggccgacgtgggccggctgagccctgaggttaaggcccggtcacagtcagggaccctggacggggaaagtgctgcctggtcggcctcgggcgaagacagtcggggccagcccgagggtcccttgccttccagctccccccgctcgcccagtggcctccggccccgaggttacaccatctccgactcggccccatcacgcaggggcaagagagtagagagggacgccttaaagagcagagccacagcctccaatgcagagaaagtgccaggcatcaaccccagtttcgtgttcctgcagctctaccattcccccttctttggcgacgagtcaaacaagccaatcctgctgcccaatgagtcacagtcctttgagcggtcggtgcagctcctcgaccagatcccatcatacgacacccacaagatcgccgtcctgtatgttggagaaggccagagcaacagcgagctcgccatcctgtccaatgagcatggctcctacaggtacacggagttcctgacgggcctgggccggctcatcgagctgaaggactgccagccggacaaggtgtacctgggaggcctggacgtgtgtggtgaggacggccagttcacctactgctggcacgatgacatcatgcaagccgtcttccacatcgccaccctgatgcccaccaaggacgtggacaagcaccgctgcgacaagaagcgccacctgggcaacgactttgtgtccattgtctacaatgactccggtgaggacttcaagcttggcaccatcaagggccagttcaactttgtccacgtgatcgtcaccccgctggactacgagtgcaacctggtgtccctgcagtgcaggaaagacatggagggccttgtggacaccagcgtggccaagatcgtgtctgaccgcaacctgcccttcgtggcccgccagatggccctgcacgcaaatatggcctcacaggtgcatcatagccgctccaaccccaccgatatctacccctccaagtggattgcccggctccgccacatcaagcggctccgccagcggatctgcgaggaagccgcctactccaaccccagcctacctctggtgcaccctccgtcccatagcaaagcccctgcacagactccagccgagcccacacctggctatgaggtgggccagcggaagcgcctcatctcctcggtggaggacttcaccgagtttgtgtgaggccggggccctccctcctgcactggccttggacggtattgcctgtcagtgaaataaataaagtcctgaccccagtgcacagacatagaggcacagattgca

SEQ ID NO: 12400 - DNA, 5424 bp, Artificial Sequence
  derived and/or modified sequence
atggccaagcccaccagcaaggacagcggcctgaaggagaagttcaagatcctgctgggcctgggcacccccagacccaaccccagaagcgccgagggcaagcagaccgagttcatcatcaccgccgagatcctgagagagctgagcatggagtgcggcctgaacaacagaatcagaatgatcggccagatctgcgaggtggccaagaccaagaagttcgaggagcacgccgtggaggccctgtggaaggccgtggccgacctgctgcagcccgagagacccctggaggccagacacgccgtgctggccctgctgaaggccatcgtgcagggccagggcgagagactgggcgtgctgagagccctgttcttcaaggtgatcaaggactaccccagcaacgaggacctgcacgagagactggaggtgttcaaggccctgaccgacaacggcagacacatcacctacctggaggaggagctggccgacttcgtgctgcagtggatggacgtgggcctgagcagcgagttcctgctggtgctggtgaacctggtgaagttcaacagctgctacctggacgagtacatcgccagaatggtgcagatgatctgcctgctgtgcgtgagaaccgccagcagcgtggacatcgaggtgagcctgcaggtgctggacgccgtggtgtgctacaactgcctgcccgccgagagcctgcccctgttcatcgtgaccctgtgcagaaccatcaacgtgaaggagctgtgcgagccctgctggaagctgatgagaaacctgctgggcacccacctgggccacagcgccatctacaacatgtgccacctgatggaggacagagcctacatggaggacgcccccctgctgagaggcgccgtgttcttcgtgggcatggccctgtggggcgcccacagactgtacagcctgagaaacagccccaccagcgtgctgcccagcttctaccaggccatggcctgccccaacgaggtggtgagctacgagatcgtgctgagcatcaccagactgatcaagaagtacagaaaggagctgcaggtggtggcctgggacatcctgctgaacatcatcgagagactgctgcagcagctgcagaccctggacagccccgagctgagaaccatcgtgcacgacctgctgaccaccgtggaggagctgtgcgaccagaacgagttccacggcagccaggagagatacttcgagctggtggagagatgcgccgaccagagacccgagagcagcctgctgaacctgatcagctacagagcccagagcatccaccccgccaaggacggctggatccagaacctgcaggccctgatggagagattcttcagaagcgagagcagaggcgccgtgagaatcaaggtgctggacgtgctgagcttcgtgctgctgatcaacagacagttctacgaggaggagctgatcaacagcgtggtgatcagccagctgagccacatccccgaggacaaggaccaccaggtgagaaagctggccacccagctgctggtggacctggccgagggctgccacacccaccacttcaacagcctgctggacatcatcgagaaggtgatggccagaagcctgagccccccccccgagctggaggagagagacgtggccgcctacagcgccagcctggaggacgtgaagaccgccgtgctgggcctgctggtgatcctgcagaccaagctgtacaccctgcccgccagccacgccaccagagtgtacgagatgctggtgagccacatccagctgcactacaagcacagctacaccctgcccatcgccagcagcatcagactgcaggccttcgacttcctgctgctgctgagagccgacagcctgcacagactgggcctgcccaacaaggacggcgtggtgagattcagcccctactgcgtgtgcgactacatggagcccgagagaggcagcgagaagaagaccagcggccccctgagcccccccaccggcccccccggccccgcccccgccggccccgccgtgagactgggcagcgtgccctacagcctgctgttcagagtgctgctgcagtgcctgaagcaggagagcgactggaaggtgctgaagctggtgctgggcagactgcccgagagcctgagatacaaggtgctgatcttcaccagcccctgcagcgtggaccagctgtgcagcgccctgtgcagcatgctgagcggccccaagaccctggagagactgagaggcgcccccgagggcttcagcagaaccgacctgcacctggccgtggtgcccgtgctgaccgccctgatcagctaccacaactacctggacaagaccaagcagagagagatggtgtactgcctggagcagggcctgatccacagatgcgccagccagtgcgtggtggccctgagcatctgcagcgtggagatgcccgacatcatcatcaaggccctgcccgtgctggtggtgaagctgacccacatcagcgccaccgccagcatggccgtgcccctgctggagttcctgagcaccctggccagactgccccacctgtacagaaacttcgccgccgagcagtacgccagcgtgttcgccatcagcctgccctacaccaaccccagcaagttcaaccagtacatcgtgtgcctggcccaccacgtgatcgccatgtggttcatcagatgcagactgcccttcagaaaggacttcgtgcccttcatcaccaagggcctgagaagcaacgtgctgctgagcttcgacgacacccccgagaaggacagcttcagagccagaagcaccagcctgaacgagagacccaagagcctgagaatcgccagaccccccaagcagggcctgaacaacagcccccccgtgaaggagttcaaggagagcagcgccgccgaggccttcagatgcagaagcatcagcgtgagcgagcacgtggtgagaagcagaatccagaccagcctgaccagcgccagcctgggcagcgccgacgagaacagcgtggcccaggccgacgacagcctgaagaacctgcacctggagctgaccgagacctgcctggacatgatggccagatacgtgttcagcaacttcaccgccgtgcccaagagaagccccgtgggcgagttcctgctggccggcggcagaaccaagacctggctggtgggcaacaagctggtgaccgtgaccaccagcgtgggcaccggcaccagaagcctgctgggcctggacagcggcgagctgcagagcggccccgagagcagcagcagccccggcgtgcacgtgagacagaccaaggaggcccccgccaagctggagagccaggccggccagcaggtgagcagaggcgccagagacagagtgagaagcatgagcggcggccacggcctgagagtgggcgccctggacgtgcccgccagccagttcctgggcagcgccaccagccccggccccagaaccgcccccgccgccaagcccgagaaggccagcgccggcaccagagtgcccgtgcaggagaagaccaacctggccgcctacgtgcccctgctgacccagggctgggccgagatcctggtgagaagacccaccggcaacaccagctggctgatgagcctggagaaccccctgagccccttcagcagcgacatcaacaacatgcccctgcaggagctgagcaacgccctgatggccgccgagagattcaaggagcacagagacaccgccctgtacaagagcctgagcgtgcccgccgccagcaccgccaagcccccccccctgcccagaagcaacaccgtggccagcttcagcagcctgtaccagagcagctgccagggccagctgcacagaagcgtgagctgggccgacagcgccgtggtgatggaggagggcagccccggcgaggtgcccgtgctggtggagccccccggcctggaggacgtggaggccgccctgggcatggacagaagaaccgacgcctacagcagaagcagcagcgtgagcagccaggaggagaagagcctgcacgccgaggagctggtgggcagaggcatccccatcgagagagtggtgagcagcgagggcggcagacccagcgtggacctgagcttccagcccagccagcccctgagcaagagcagcagcagccccgagctgcagaccctgcaggacatcctgggcgaccccggcgacaaggccgacgtgggcagactgagccccgaggtgaaggccagaagccagagcggcaccctggacggcgagagcgccgcctggagcgccagcggcgaggacagcagaggccagcccgagggccccctgcccagcagcagccccagaagccccagcggcctgagacccagaggctacaccatcagcgacagcgcccccagcagaagaggcaagagagtggagagagacgccctgaagagcagagccaccgccagcaacgccgagaaggtgcccggcatcaaccccagcttcgtgttcctgcagctgtaccacagccccttcttcggcgacgagagcaacaagcccatcctgctgcccaacgagagccagagcttcgagagaagcgtgcagctgctggaccagatccccagctacgacacccacaagatcgccgtgctgtacgtgggcgagggccagagcaacagcgagctggccatcctgagcaacgagcacggcagctacagatacaccgagttcctgaccggcctgggcagactgatcgagctgaaggactgccagcccgacaaggtgtacctgggcggcctggacgtgtgcggcgaggacggccagttcacctactgctggcacgacgacatcatgcaggccgtgttccacatcgccaccctgatgcccaccaaggacgtggacaagcacagatgcgacaagaagagacacctgggcaacgacttcgtgagcatcgtgtacaacgacagcggcgaggacttcaagctgggcaccatcaagggccagttcaacttcgtgcacgtgatcgtgacccccctggactacgagtgcaacctggtgagcctgcagtgcagaaaggacatggagggcctggtggacaccagcgtggccaagatcgtgagcgacagaaacctgcccttcgtggccagacagatggccctgcacgccaacatggccagccaggtgcaccacagcagaagcaaccccaccgacatctaccccagcaagtggatcgccagactgagacacatcaagagactgagacagagaatctgcgaggaggccgcctacagcaaccccagcctgcccctggtgcacccccccagccacagcaaggcccccgcccagacccccgccgagcccacccccggctacgaggtgggccagagaaagagactgatcagcagcgtggaggacttcaccgagttcgtgtag

SEQ ID NO: 12401 - DNA, 5424 bp, Artificial Sequence
  derived and/or modified sequence
atggcaaaacctacttctaaagatagcggactgaaggagaagttcaaaatcctcctgggattgggcacgccgcgccctaatccacgtagcgccgaaggcaagcaaacagagttcatcatcaccgcggaaatcttgcgggagttgagcatggaatgcggccttaacaaccgtattaggatgatagggcagatttgtgaggtagcaaaaaccaagaagttcgaagagcacgccgtggaagctctgtggaaagccgtcgccgatttgctgcaaccagaacgacccctcgaggctagacacgctgttctcgctctgttgaaagctatcgttcaggggcagggcgaacggctcggggtgctaagagctctcttttttaaggtgataaaggattatccttcaaacgaagatctgcacgaaagactggaagtgttcaaggcacttactgataacggccgtcacattacatatctggaagaagagttggccgattttgtgctgcagtggatggatgttggactgtcaagcgaattcttactggtcctcgttaatcttgtgaagtttaactcatgttatctggatgagtatattgcgcgaatggtccagatgatatgcctgctgtgtgtgaggaccgcaagcagtgtcgatatcgaggtgtcattgcaggtgctcgacgcagtggtctgttataactgtctgcccgctgagtcactcccactgtttatcgtgacactctgcagaaccatcaatgttaaagagctctgtgagccatgctggaaactgatgcgcaaccttttggggacacatctgggacatagtgctatctacaatatgtgtcatctgatggaggaccgggcctatatggaagacgcccccctactgcgcggtgctgttttctttgtgggaatggccctctggggagcccatagactgtacagcttaaggaattcccccactagtgtcctgccctccttctatcaggccatggcttgccccaatgaagtggtttcttacgagatcgtgctgtctatcaccaggttgatcaagaagtacaggaaagaacttcaagttgtcgcatgggatatcttactcaatattatcgagaggttactccagcagctgcaaactctggacagtccagaactccgaaccattgtccacgacttactgacaacggtggaggagctctgcgatcaaaacgagtttcatggcagccaggaacggtattttgaattggtggaaagatgcgctgatcaaagacctgaaagttcattgcttaacctcatcagttatagagcccagagcatccatcccgcaaaggatggttggatacagaatctgcaggctctgatggaaagattctttagatccgagtcacgaggcgccgtaaggatcaaggtgctcgacgttctgagtttcgtcctgctgattaatcgacagttctatgaggaagagctgataaattcagtcgtcatctcccagctgtctcacatcccggaggataaggaccatcaggtgcgaaaactggctactcaactactggttgacctcgcagaaggttgccatacccatcacttcaatagccttctggacattatcgagaaggttatggccagatctctatcgccaccacccgagttagaagaaagggatgtggccgcctacagcgcaagtctcgaagacgtgaaaaccgctgtgctggggttattggtgatcctgcagacgaagctctacaccttgccagcatctcacgctaccagagtctatgagatgctggtctcacacatccagctacactataagcacagctataccctacccatcgctagctccattcgtcttcaagccttcgatttcctgctgttattgcgcgcagatagtttgcaccgactcggcctgcccaacaaagacggcgtcgtgaggttttctccctactgcgtgtgcgattatatggaaccagaaagaggtagcgaaaaaaaaactagcggtcccttatctcctccgaccgggcctcccggccctgcccccgccgggcccgctgtgagattgggtagtgtcccgtactcccttctcttccgagtgctgctgcagtgcctcaagcaggaatctgactggaaggtgcttaagttggtcctcggtcggctgcctgagagcctaagatacaaggtcttgatattcacatccccctgcagcgtcgaccaattatgtagcgctctctgttcaatgctgtcgggtcccaaaacgctagaacgcctgcgcggagccccagaagggttcagccggaccgaccttcatctggccgtggtgccagtgttgactgccttgattagctaccacaattatttggataagaccaaacaacgagaaatggtgtactgcctcgaacagggactcatccacaggtgcgcttcccagtgcgttgtcgcactgtccatatgctctgtggagatgccagacattatcatcaaggcactacccgtgttagtcgttaaactcacacacatttcagccaccgcgtctatggctgtccctctcctggagtttctaagtacactagcaagactgccccacctttaccggaacttcgctgccgaacagtatgcatcagtgtttgccataagcctaccttacaccaatccaagcaagttcaaccagtatatagtttgcctcgcccatcacgtcattgctatgtggttcataagatgcaggttgccttttcgcaaggattttgttccctttataaccaagggcctgagaagtaacgtcctcctttcttttgacgacacacccgagaaagatagctttcgggcccggagcacaagcttgaacgagagacccaagtctctgagaatcgctcgcccgcctaaacaaggcctgaataatagccctcccgtgaaagagttcaaagagagctctgcagccgaggccttccgctgcagaagtataagtgtatctgaacatgttgttagaagcaggatacagacttccttgacatctgcatccctggggtcagcagacgaaaatagtgtggcccaggctgatgacagcttaaagaatctgcatctggagttaacagagacttgtctcgacatgatggcccggtatgtgttctcaaacttcaccgcagtccccaagcgctctcccgtgggagagtttctgctggccgggggcaggaccaagacctggcttgtgggaaataagctggtgaccgttaccacaagcgtaggaaccggtactcgcagcctactcgggctggattccggagagttgcagagtgggccagagtcatccagctcaccaggagtgcacgtgcgacaaaccaaagaagccccagccaaactcgagtctcaggcgggacagcaggttagccgcggcgcccgggacagagttaggtccatgagtggaggtcacggcctccgtgtcggtgctctggatgttccagctagccagtttttaggctcggccacgagccccggaccaagaacagcgcctgccgccaagccagagaaagcgagcgccgggactcgtgttccagtccaggaaaaaacgaatcttgccgcatatgttccactccttactcagggatgggccgaaattctggttaggcggcctacaggcaacactagctggctgatgtcattagagaatccccttagtccatttagcagtgatatcaataacatgccattgcaggagctcagcaatgccctgatggccgcggaaaggtttaaagaacaccgtgatactgccctctacaagagccttagtgtgcccgccgcctctaccgctaagccccccccactgcctagatctaataccgtggcctcattttcctccctctaccaatccagctgccagggacagctccatcgctctgtgagctgggccgactccgccgtggtcatggaggagggtagtcccggcgaggtgcccgtactggttgaacctcccggactagaagatgtggaagcagccctgggtatggaccggaggacagacgcttattcacgcagcagcagcgtgagctcacaagaggagaaatccctacatgccgaagagttggtgggtagaggcattccaattgaaagggtagtgtcctctgagggcggcagaccctcagtcgacctatcctttcagccctctcagccactttctaagtcctccagttctcctgagctgcagaccctccaggatattttgggcgatccaggagacaaagccgacgtcggcagactctcacccgaagtcaaggcacgctctcaatccggcacactagatggcgagtccgcagcctggtctgcgtctggcgaagatagccgtggccagccagaagggcctctcccatcaagctcaccacggtccccatccggcctgagacccagagggtacacaatctccgactcagcaccttccagacgaggcaaaagagtggagcgcgatgcgctgaagagtcgagcgaccgcctcgaatgcggaaaaagtgcctggaattaatcctagcttcgtttttctgcagctctaccacagtccattctttggggatgagtcgaataagccgattcttctccccaacgagtctcaaagctttgagcgctcagttcaacttctagatcagattccttcttacgacacccataagattgccgtcttatatgtgggggagggacagtcaaacagcgaactggccatcctcagcaacgaacacggcagctatcgctatactgaattccttaccggcctgggaagacttatcgaactaaaagattgccagccggataaggtctatctcggcggacttgacgtttgcggcgaggatggacaatttacgtactgttggcatgacgacattatgcaggcagtgtttcatatagctaccttgatgcccaccaaagacgtggacaagcaccggtgcgacaagaaacgtcacctgggaaacgacttcgtttctatcgtttataatgattctggggaggatttcaagctcggcactattaaagggcagtttaatttcgtccacgtcatcgttacacctctagattatgagtgcaatctggttagcctccagtgcagaaaagatatggagggactagtagatacttcagtggcaaaaatcgtttcagatcggaatctgccgttcgttgccaggcaaatggccctacacgccaacatggccagtcaggtgcaccactcacgttccaaccctactgacatctatcctagcaaatggatagctaggctgaggcatatcaaacgtctccgccagaggatctgtgaggaagccgcatatagtaatcctagcttgcccctggtgcaccctccatcccacagcaaggctcctgcccagaccccggctgaacctactcccggctacgaggttggccagcggaagaggctgataagttccgtagaagacttcacagaatttgtgtag

SEQ ID NO: 12402 - DNA, 5424 bp, Artificial Sequence
  derived and/or modified sequence
atggccaagcccaccagcaaggacagcggcctgaaggagaagttcaagatcctgctgggcctgggcaccccccggcccaaccccaggtctgctgagggcaagcagacagagttcatcatcacagctgagatcctgcgggagctgtccatggagtgtggcctgaacaaccgcatccgcatgattggccagatctgtgaggtggccaagaccaagaagtttgaggagcacgctgtggaggccctgtggaaggctgtggccgacctgctgcagcctgagcggcccctggaggcccggcatgctgtgctggccctgctgaaggccatcgtgcagggccagggcgagcggctgggcgtgctgcgggccctcttcttcaaggtgatcaaggactaccccagcaatgaagacctgcacgagcggctggaggtgttcaaggccctgacagacaatggccgccacatcacctacctggaggaggagctggccgactttgtgctgcagtggatggatgtgggcctgagcagcgagttcctgctggtgctggtgaacctggtgaagttcaacagctgctacctggatgagtacatcgccaggatggtgcagatgatctgcctgctgtgtgtgaggacagccagctctgtggacatcgaggtgtccctgcaggtgctggatgctgtggtgtgctacaactgcctgcctgctgagagcctgcccctcttcatcgtgaccctgtgcaggaccatcaacgtgaaggagctgtgtgagccctgctggaagctgatgaggaacctgctgggcacccacctgggccacagcgccatctacaacatgtgccacctgatggaggaccgggcctacatggaggatgcccccctgctgcggggagctgtgttctttgtgggcatggccctgtggggcgcccaccggctgtacagcctgaggaacagccccacctctgtgctgcccagcttctaccaggccatggcctgccccaatgaggtggtgtcctatgagatcgtgctgagcatcaccaggctcatcaagaagtacaggaaggagctgcaggtggtggcctgggacatcctgctgaacatcatcgagcggctgctgcagcagctgcagaccctggacagccctgagctgcggaccatcgtgcatgacctgctgaccaccgtggaggagctgtgtgaccagaatgagttccacggcagccaggagcgctactttgagctggtggagcgctgtgccgaccagaggcctgagagcagcctgctgaacctgatctcctaccgggcccagagcatccacccagccaaggatggctggatccagaacctgcaggccctgatggagcgcttcttccgctctgagagcagaggagctgtgcgcatcaaggtgctggatgtgctgagctttgtgctgctgatcaaccggcagttctatgaggaggagctgatcaacagcgtggtgatcagccagctgagccacatccctgaggacaaggaccaccaggtgaggaagctggccacccagctgctggtggacctggccgagggctgccacacccaccacttcaacagcctgctggacatcatcgagaaggtgatggcccggagcctgagccccccacctgagctggaggagagagatgtggccgcctacagcgccagcctggaggatgtgaagacagctgtgctgggcctgctggtgatcctgcagaccaagctgtacaccctgcctgccagccacgccaccagggtgtatgagatgctggtgagccacatccagctgcactacaagcacagctacaccctgcccatcgccagcagcatccggctgcaggcctttgacttcctgctgctgctgcgggctgacagcctgcaccggctgggcctgcccaacaaggatggagtggtgcgcttcagcccctactgtgtgtgtgactacatggagcctgagcggggcagcgagaagaagaccagcggccccctgagccccccaactggacctcctggccctgccccagctggccctgctgtgcggctgggctctgtgccctacagcctgctcttccgggtgctgctgcagtgcctgaagcaggagagtgactggaaggtgctgaagctggtgctgggccgcctgcctgagagcctgcgctacaaggtgctgatcttcaccagcccctgcagcgtggaccagctgtgcagcgccctgtgcagcatgctgagcggccccaagaccctggagcggctgcggggggcccctgagggcttcagcaggacagacctgcacctggccgtggtgcctgtgctgacagccctgatctcctaccacaactacctggacaagaccaagcagcgggagatggtgtactgcctggagcagggcctcatccaccgctgtgccagccagtgtgtggtggccctgagcatctgcagcgtggagatgccagacatcatcatcaaggccctgcctgtgctggtggtgaagctgacccacatcagcgccacagcctccatggctgtgcccctgctggagttcctgagcaccctggcccggctgccccacctgtacagaaactttgctgctgagcagtatgcctctgtgtttgccatcagcctgccctacaccaaccccagcaagttcaaccagtacatcgtgtgcctggcccaccacgtgattgccatgtggttcatccgctgccgcctgcccttcaggaaggactttgtgcccttcatcaccaagggcctgcggagcaatgtgctgctgagctttgatgacaccccagagaaggacagcttccgggcccggagcaccagcctgaatgaaagacccaagagcctgagaattgcccggccccccaagcagggcctgaacaacagcccccctgtgaaggagttcaaggagagcagcgctgctgaggccttccgctgccgcagcatctctgtgtctgaacatgtggtgcgcagccgcatccagaccagcctgaccagcgccagcctgggcagcgcagatgaaaattctgtggcccaggctgatgacagcctgaagaacctgcacctggagctgacagagacctgcctggacatgatggcccgctacgtgttcagcaacttcaccgctgtgcccaagaggagccctgtgggggagttcctgctggccggcggccgcaccaagacctggctggtgggcaacaagctggtgacagtgaccacctctgtgggcaccggcaccaggagcctgctgggcctggacagcggggagctgcagagcggccctgagagcagcagcagccctggggtgcacgtgcggcagaccaaggaggccccagccaagctggagagccaggccggccagcaggtgtccagaggagcccgggacagagtgcgctccatgtctgggggccacggcctgcgggtgggcgccctggatgtgcctgccagccagttcctgggcagcgccaccagccctggccccaggacagccccagctgccaagccagagaaggccagcgctggcaccagggtgcctgtgcaggagaagaccaacctggccgcctacgtgcccctgctgacccagggctgggccgagatcctggtgcggcggcccactggaaacacctcctggctgatgagcctggagaaccccctgagccccttcagcagtgacatcaacaacatgcccctgcaggagctgagcaatgccctgatggctgctgagcgcttcaaggagcaccgggacacagccctgtacaagagcctgtctgtgcctgctgccagcacagccaagcccccacccctgcccaggagcaacacagtggccagcttcagcagcctgtaccagagcagctgccagggccagctgcacaggtctgtgtcctgggccgacagcgctgtggtgatggaggagggcagccctggagaggtgcctgtgctggtggagcccccaggcctggaggatgtggaggccgccctgggcatggacagaagaacagatgcctacagccgcagcagctctgtgagcagccaggaggagaagagcctgcatgctgaggagctggtgggccggggcatccccatcgagcgggtggtgtcctctgagggcggccggcccagcgtggacctgtccttccagcccagccagcccctgagcaagagcagcagcagccctgagctgcagaccctgcaggacatcctgggggaccccggggacaaggcagatgtgggccgcctgagccctgaggtgaaggcccggagccagagcggcaccctggatggagagagcgctgcctggagcgccagcggggaggacagccggggccagcctgagggccccctgcccagcagcagccccaggagccccagcggcctgcggccccggggctacaccatcagtgacagcgcccccagccggcggggcaagagggtggagagagatgccctgaagagccgggccacagccagcaatgctgagaaggtgcccggcatcaaccccagctttgtgttcctgcagctgtaccacagccccttctttggagatgagagcaacaagcccatcctgctgcccaatgaaagccagagctttgagaggtctgtgcagctgctggaccagatccccagctatgacacccacaagattgctgtgctgtatgtgggggagggccagagcaacagcgagctggccatcctgagcaatgagcacggcagctaccgctacacagagttcctgaccggcctgggccgcctcatcgagctgaaggactgccagcctgacaaggtgtacctgggcggcctggatgtgtgtggggaggatggccagttcacctactgctggcatgatgacatcatgcaggccgtgttccacatcgccaccctgatgcccaccaaggatgtggacaagcaccgctgtgacaagaagaggcacctgggcaatgactttgtgtccatcgtgtacaatgattctggagaggacttcaagctgggcaccatcaagggccagttcaactttgtgcacgtgattgtgacccccctggactatgagtgcaacctggtgtccctgcagtgcaggaaggacatggagggcctggtggacacctctgtggccaagatcgtgtctgacaggaacctgccctttgtggcccggcagatggccctgcacgccaacatggccagccaggtgcaccacagccgcagcaaccccacagacatctaccccagcaagtggatcgcccggctgcggcacatcaagaggctgcggcagaggatctgtgaggaggccgcctacagcaaccccagcctgcccctggtgcacccccccagccacagcaaggccccagcccagaccccagctgagcccaccccaggctatgaggtgggccagaggaagaggctcatcagctctgtggaggacttcacagaatttgtgtag

SEQ ID NO: 12403 - DNA, 5424 bp, Artificial Sequence
  derived and/or modified sequence
atggccaagcccaccagcaaggacagcggcctgaaggagaagttcaaaattttgctcgggttaggcacccctagaccaaaccccagatccgcagaaggcaaacagactgagtttataatcacagctgagattctgcgagaactgagtatggagtgcggactcaataacagaatcagaatgataggacaaatttgcgaagtggcaaaaacaaaaaaatttgaggagcatgctgtcgaggctctttggaaggccgtggcagacctcctccagccggagaggccactggaggcacgtcatgctgtgcttgctctgttgaaggctatcgtccaggggcagggagagagactgggtgtgttaagagcgctattcttcaaggtgattaaggattatccaagcaatgaagacctgcatgagcgcctagaggtgttcaaagctctgaccgataatggcaggcatataacttatctggaagaagaactggctgattttgtgctgcagtggatggacgttgggctgagcagtgagtttttgctcgtgttggttaacctcgtcaagttcaacagttgctatctagacgagtatatcgcacgcatggtacagatgatctgcctgctctgtgtgcggacagccagctcagtggatatcgaggtctctttgcaggtgctggatgcagtggtgtgttacaattgcctgccggctgaatctcttcccttgttcattgtcaccctctgtcgtaccatcaacgtcaaggaattatgcgagccctgctggaagttaatgcgaaacttactaggaacccacctggggcattctgctatatacaacatgtgccacctaatggaggaccgcgcttacatggaggatgccccccttctgcgtggagctgtattcttcgttggcatggcactgtggggcgctcacagactttacagcctgcgcaactcaccaacttccgtgctgccgtcgttctaccaggccatggcttgcccgaatgaggtcgtgagttatgaaattgtgctgtccatcacgaggcttataaagaaatacaggaaggaactgcaagtcgtggcatgggatatccttctaaatataatcgagcgattgctccagcagctccaaacattagatagcccagagctgcgcacaatcgttcacgacttgcttactactgtggaggagctttgtgatcaaaacgaattccatgggtctcaggagagatactttgagttggttgaaaggtgtgctgaccagagacctgaatcaagcctcctgaacttgatctcttaccgagcccaatccattcaccctgccaaagacggatggattcagaacctccaggccctgatggagcgattcttcagaagcgagtccaggggggccgtgcgaattaaagtcttagatgttctatcctttgtgttacttattaaccgtcaattttatgaggaagagttaatcaatagcgtcgtcatctctcaattgagccacattccagaggacaaggatcaccaggtaagaaaactcgccacgcaattgcttgtggaccttgccgagggctgccatactcaccacttcaactctctgttggacatcatagagaaagtgatggccagatcgctgtccccacctccagagctggaagagcgagatgtggctgcctactctgcctcattggaggatgtgaagactgccgttctggggttgctcgtaatccttcagaccaaactctatactctgcccgccagccacgctaccagagtgtatgagatgctcgtgagccatattcagcttcattacaagcattcttacacactgccgattgctagctctatccggttgcaggcatttgatttccttctgttattacgggcagatagcctgcatagactcggcctgccaaataaagacggggtggtgagattttctccttactgcgtgtgcgattatatggagccagagagagggtctgagaagaaaaccagtggaccactgagtccgccgacaggaccccccgggcccgctccagccggtcccgccgtgcgactgggttcggttccctattctctgttatttcgggtccttctgcagtgtctgaaacaggagtcggactggaaagtgcttaaactcgtcctgggccgactccccgagagcttacgctataaggttctgatatttacttctccatgttccgtcgaccagctctgtagtgccctgtgttctatgctgagtggtccaaagacattggagcggctgcgtggagcaccagaggggttcagtaggacagatctacacctggctgtggtgcccgtactgaccgccctcatttcctaccataattatctcgataagaccaaacagcgggagatggtctattgcttagagcagggcttgatccatcggtgcgcctcacagtgcgtagtggcactgtcaatttgctctgttgagatgccagacataatcattaaagctctgccggtgttggtcgttaaacttacccacatctcagctaccgcttcaatggcggtgccactgttagagtttctgtccacactcgcaaggctcccacatctttaccgaaactttgccgcagagcagtatgcctctgtctttgctatcagtctgccctatacaaacccgtccaagtttaaccagtacatcgtgtgcttggcccatcatgtcatagcgatgtggtttattcgctgcagacttcctttccggaaagattttgtgcctttcattaccaaggggcttcgatccaacgtcctgctgtcctttgatgataccccggaaaaggacagctttagggcgcgtagcacgagtctgaatgaacgcccgaagagtctgcggattgccaggcccccgaaacagggactgaacaattcccccccggtgaaggaattcaaggaaagttccgcagccgaagccttccggtgtcggtcaataagcgtgagtgagcatgtggtgcgctccagaatccaaacgtccctgacgtctgcatcactgggtagtgccgacgagaattccgtcgctcaggctgatgacagtctcaagaatctgcacctggagctcacagagacctgcctggatatgatggcccgatatgtatttagcaacttcactgccgtccccaaaagatcccccgtgggagaattcctgcttgccgggggccgcaccaagacttggctggtgggtaacaagcttgtgaccgtcacgaccagcgtcggcactggcactcgatctctattggggcttgactctggtgagctgcagagcggaccagaaagctcatcgtccccaggggtgcatgtgcggcagaccaaagaagctccagcaaaactcgaatcacaggcaggacagcaggtgagcaggggcgctcgggatcgcgttagaagcatgtctggcggacacggactacgagtgggcgcattggatgtgcccgccagccagttcttgggaagcgcaacgtctcccggaccacggacagccccagccgccaagcctgagaaagcctcagctgggacacgcgttccagtgcaagaaaaaacaaatctggcagcctatgtgccacttcttactcaaggctgggcggaaattctggtccggcgaccgactgggaatacttcgtggctcatgtctctcgaaaatcccctgtcccctttctcttccgatatcaataacatgcctctgcaggagttgagcaatgcactgatggccgccgaacgtttcaaggaacacagggacacagccctgtataaatccctcagcgtgcccgctgccagcaccgccaaacccccacccttgcctaggagcaacactgtagcctcattctcttcattgtaccagagttcctgccagggccagctccacagatcagtgtcttgggccgatagtgccgttgtgatggaggaggggagtcccggcgaggtgcctgtgctggttgaacctcccggcctggaagatgtggaggcggccttgggaatggatcgccgaactgacgcctatagtaggtccagtagtgtgagttctcaggaggaaaaatcacttcatgccgaggagctggtaggcagaggaatcccgatagaaagagtcgttagttccgagggcgggcgtccatcagtggatcttagctttcagccgagccagcccctgtcaaaaagtagctcttcacctgaacttcagacacttcaagacattttgggagaccccggtgataaggccgacgtgggacggctgagccccgaagtcaaggcaaggtctcaatcgggtaccctggatggtgagagtgcagcctggagcgctagcggtgaagattctcgggggcagcccgaaggtccactccctagtagtagcccgcgatccccctctggcctgcgcccgaggggatatactatcagtgactcagccccgtcaagacgtgggaagagggtggaacgcgatgcactcaagtcacgagctaccgccagcaacgcagaaaaggtgcctgggatcaatccaagcttcgttttcctgcagctctaccactcaccattcttcggagatgagtccaataagcccatccttctgcccaacgaatcccagagctttgagagatcagtccaattattggaccaaatccccagctatgatacgcacaaaatcgctgtcctttacgttggggaaggccagtcgaattctgaactggcaatactcagtaatgagcacgggtcatacaggtacacagaattcctcactgggttgggccggctcattgagcttaaagattgccagccggacaaagtgtatttgggaggtctcgacgtgtgcggagaagacggtcagttcacatattgttggcatgatgacattatgcaagcggtgttccatatcgccaccctaatgcccacaaaggatgttgacaaacacagatgcgataagaaaagacaccttggcaacgatttcgtatcaattgtctataatgatagcggagaagattttaagctgggcactattaagggccaattcaactttgtgcacgtgatcgtgacccctttggattacgaatgcaacctcgtctccttgcagtgcaggaaagacatggagggtctggtagacacctcagtggctaaaattgtgtctgatcgcaatctgccatttgtcgcaaggcaaatggcccttcacgcgaacatggcatcccaggtgcaccacagcagatcgaatcctactgacatttacccttccaaatggattgccagacttcggcacatcaagcgcctgagacagagaatttgcgaagaagcggcctacagtaacccaagcttgcccctggtccatcccccatcccacagcaaagcacccgctcagaccccagcagagcccactccaggctacgaggtcggacaaaggaagcgcttgatctcgagcgtggaagacttcactgagtttgtgtag

SEQ ID NO: 12404 - DNA, 5424 bp, Artificial Sequence
  derived and/or modified sequence
atggcgaagcctacctcgaaggactcagggctgaaggaaaaattcaagattcttctgggactgggtacgccacgtccgaaccccagaagcgcggagggcaagcaaactgagttcattatcacagcagagatcttgagggaattatccatggagtgcgggctgaataaccgtatccgcatgataggacagatatgcgaggtggcgaagacaaaaaaatttgaagaacatgcggtggaggcactttggaaggccgtggccgaccttttgcagccagagagacctttagaggccaggcatgcagtgctggcactcctgaaagccatcgtgcagggccagggcgaacgattgggagttctcagagcactcttcttcaaagtcatcaaagactatcccagtaacgaagacctgcatgagcggctggaggtcttcaaggctctgaccgataacgggaggcacataacatatctggaggaagaactggctgacttcgtcctccagtggatggatgtaggtctttcaagtgagttcctactcgtcctggtcaacctcgtgaagtttaatagctgttatctcgacgagtacatcgctcgcatggttcagatgatttgcctgctctgtgtgagaacagcatctagcgtagatattgaagtgagcctccaggtcctcgatgccgttgtatgttacaattgcctgcccgcagaatcgcttcctctgtttatcgtgacactttgtaggacaatcaatgttaaggagctttgtgagccctgctggaaactgatgcggaatttactaggtacccacctcggtcactccgctatatataacatgtgtcatcttatggaggaccgcgcatacatggaagacgcgccacttttacggggtgcagtgttcttcgtcggtatggctctgtggggggcacacagactttattctctccggaacagcccaacgagcgttctgcccagtttttaccaggctatggcatgtcccaatgaggttgttagttacgagatcgtgttgtccattacccggttgatcaaaaagtataggaaggagctgcaggtcgtcgcttgggatatcctgcttaatatcatagaaagattactgcaacagctgcagactctggactcaccggagttaaggaccatcgtacacgacctgctgaccaccgtcgaggagctctgtgaccagaacgaattccacggatcccaggagcggtacttcgagctcgttgagaggtgcgccgatcagcgcccagaatcttctctcctaaacctcatttcctatagggcgcagagcatacatcctgcgaaggatggttggatccagaacctccaagctttgatggaaagattcttccgctctgagtctaggggagccgtccgcatcaaggtgctcgatgtgttgagctttgtcctgctgatcaacaggcagttctacgaggaagaactcattaatagtgtcgtcattagtcagctgtcccatatcccagaggataaggatcaccaggtgaggaagctagctactcagctcctggttgatttagcagaggggtgccatacacatcattttaattccctactggacatcatcgagaaagtgatggcgagatccctctctcccccaccagagctcgaggagcgagatgtagctgcttattccgctagcctggaggacgtcaagactgcagtgctgggactcctggtgatcttacagacaaaattgtataccctcccagccagccacgccacacgcgtttatgagatgctggtttctcatatccagcttcattacaaacatagctacaccttacctatcgccagtagcatccgcctccaggcattcgattttctactgttgctgcgagccgattcccttcaccgcctgggtctacctaataaggacggggtggttagatttagcccttactgcgtctgtgattatatggaaccggagcggggatccgaaaagaagacgtctgggcctctgagccctccaaccggaccaccgggaccagcccctgcaggtcccgctgtgcggcttgggagcgtgccttactccctgctgttcagggtgttgctgcagtgtttgaagcaagagagtgactggaaagtgctgaagctggtgcttggacgcctgcccgaaagcttgcgctataaagtgcttattttcacaagtccttgctcagtcgatcagctgtgttcagccctgtgcagcatgctttccggaccaaagactttagagcggctgcggggtgcgcctgagggattcagtcggaccgatctccacctagcggtggttccagttctcaccgcactgatctcctatcataattacttagacaagacaaagcaaagggagatggtgtattgtttagagcagggactgattcacaggtgcgcgagccagtgcgtggttgccctgagtatctgctccgtggagatgcccgatatcatcatcaaggcactacccgtgctagtcgtaaagttgacacatatctccgctaccgcatccatggccgttccactcttggaattcttatccaccctggcgagactgccccatctgtatcggaatttcgccgcagagcaatacgcatccgtcttcgcaatcagtctgccctacactaatcccagcaaatttaatcaatatatagtgtgcctagcccaccacgtgatcgcaatgtggtttatccgttgccgactgcctttccgcaaggacttcgtacccttcattactaaaggcctgcgatcaaatgtgctcctgtcctttgacgatacacctgaaaaggatagtttcagggccagatcaacgtcccttaatgagaggcccaagtccttgcgaattgcccgtccgccaaagcagggtctgaataattctccccctgttaaagaattcaaagagtctagtgctgcagaagccttcaggtgccggtcaatctccgttagtgaacacgtcgtacggagtcggattcagacaagcctgacctccgccagccttggctccgcggacgaaaactccgtcgcccaggccgacgattctctcaaaaatcttcatctggaactcactgagacttgcctggacatgatggctcggtacgtatttagtaacttcacagcagtaccaaaacgtagtcccgttggcgaattcctcttagcaggtggacgcaccaagacatggctcgtcggaaacaagcttgtgaccgtgacgacctcggtcggcactggtacacgcagtctgcttggcttggattccggcgaacttcagagcgggccagagagtagcagctctcctggcgttcacgttcggcagaccaaggaggcgcctgccaagctggaatcccaggcaggacagcaggtcagccgaggggcaagagacagggtgaggtccatgtccggtgggcatggcctgcgcgtgggggctttggacgtcccagctagccagtttctggggtctgctacatcacctggccctaggacggcccctgctgccaaacctgagaaagcctccgcgggtacccgagtcccagtccaagagaagacgaatctagctgcctatgtacctctcctgactcaggggtgggcagaaattttagtgcggcgaccaacaggcaacactagttggctaatgtccctggagaatcccctgagcccgttttcatccgatatcaacaatatgccactacaagaattaagtaacgctctgatggctgctgagagatttaaggagcaccgagacactgccttgtacaagagcctgagtgtgccagccgcaagtaccgcaaaaccgccacccctccccagatctaacaccgtagcatccttttcaagtctgtatcagtcatcttgccagggacagctccacagatccgtctcctgggccgactccgctgtggtgatggaagaagggtcaccaggagaagtaccagtgctggtcgagccaccgggattggaggacgttgaggccgctctcggcatggacaggaggactgacgcttacagcagaagtagctctgtatcatcgcaggaagagaagagtctacatgccgaagaactcgtgggcaggggcattcctattgaaagggttgtgtcttccgaggggggacgcccttccgtggacctgagcttccagccttcacagcccctgagtaagtctagctcgagcccagagcttcagacactgcaggacatccttggagatccaggtgacaaggccgacgtgggacggcttagccctgaagttaaggcgcgatcccagtcaggaaccttggacggggagtccgctgcctggtcagccagcggcgaagattctcgtggacagccagagggccctctacccagctcgtccccccgtagtcctagtggccttcgccctcggggatatacaattagtgactctgccccttctcgacgcggtaagcgtgtggaaagggacgccttaaagtcccgtgccaccgccagtaatgctgagaaggtcccaggcatcaaccccagctttgtctttctgcagctctaccactctccttttttcggtgatgagagcaataagccaattttactgccaaatgagtcacagtcattcgagcgctcagttcagcttctggatcaaataccatcgtatgatacccataagattgctgtactgtatgtaggggagggccagagtaatagcgaattggctatcctgagcaacgagcatggaagctatcggtacacagaatttctgacaggactggggaggctgatcgagctcaaagattgtcagccagacaaagtttacctggggggacttgatgtgtgcggcgaggatgggcagtttacatattgttggcacgatgacattatgcaggccgtgttccatattgcaacactaatgcccaccaaagatgtggataaacatagatgtgacaaaaaaaggcaccttgggaacgactttgtttctatagtctacaatgatagcggcgaagacttcaagttgggtaccatcaagggacagtttaattttgtgcatgtaatcgtaacaccactggattacgagtgcaacctggtctcactgcaatgtaggaaggatatggagggactcgttgacacaagcgtggcaaagatcgtatccgatcggaacctgccatttgtggctaggcagatggcgctgcatgcaaatatggcaagccaggtacatcattcaagaagcaacccaaccgatatatacccaagcaaatggatcgctaggctgaggcatatcaagcgtctgcgacagcgaatttgtgaggaagccgcttatagtaaccccagcctgccgctcgtgcatcctcctagtcattccaaggccccagctcagacacccgcagagcctactccaggttacgaagtgggccaacggaagagacttatttccagcgtggaggacttcacagaattcgtttaa

SEQ ID NO: 12405 - protein, 246 aa, Artificial Sequence
  derived and/or modified sequence
MAQVPPPASGERHAGTEDGPIRRNPAGNVARPMVQRLPEPQDVAQCLEVGLFDTPPFYSNSTNSFRNTVEGNDPTGKYDPAVRSLHNLAHLFLNGTGGQTHLSPNDPIFVLLHTFTDAVFDEWLRRYNADISTFPLENAPIGHNRQYNMVPFWPPVTNTEMFVTAPDNLGYTYEIQWPSREFSVPEIIAIAVVGALLLVALIFGTASYLIRARRSMDEANQPLLTDQYQCYAEEYEKLQNPNQSVV

SEQ ID NO: 12406 - protein, 537 aa, Artificial Sequence
  derived and/or modified sequence
MSAPKLLSLGCIFFPLLLFQQARAQFPRQCATVEALRSGMCCPDLSPVSGPGTDRCGSSSGRGRCEAVTADSRPHSPQYPHDGRDDREVWPLRFFNRTCHCNGNFSGHNCGTCRPGWRGAACDQRVLIVRRNLLDLSKEEKNHFVRALDMAKRTTHPLFVIATRRSEEILGPDGNTPQFENISIYNYFVWTHYYSVKKTFLGVGQESFGEVDFSHEGPAFLTWHRYHLLRLEKDMQEMLQEPSFSLPYWNFATGKNVCDICTDDLMGSRSNFDSTLISPNSVFSQWRVVCDSLEDYDTLGTLCNSTEDGPIRRNPAGNVARPMVQRLPEPQDVAQCLEVGLFDTPPFYSNSTNSFRNTVEGYSDPTGKYDPAVRSLHNLAHLFLNGTGGQTHLSPNDPIFVLLHTFTDAVFDEWLRRYNADISTFPLENAPIGHNRQYNMVPFWPPVTNTEMFVTAPDNLGYTYEIQWPSREFSVPEIIAIAVVGALLLVALIFGTASYLIRARRSMDEANQPLLTDQYQCYAEEYEKLQNPNQSVV

SEQ ID NO: 12407 - protein, 102 aa, Artificial Sequence
  derived and/or modified sequence
MSAPKLLSLGCIFFPLLLFQQARAQFPRQCATVEALRSGMCCPDLSPVSGPGTDRCGSSSGRGRCEAVTADSRPHSPQYPHDGRDDREVWPLRFFNRTCHCN

SEQ ID NO: 12408 - DNA, 741 bp, Artificial Sequence
  derived and/or modified sequence
atggcccaggtgcccccccccgccagcggcgagagacacgccggcaccgaggacggccccatcagaagaaaccccgccggcaacgtggccagacccatggtgcagagactgcccgagccccaggacgtggcccagtgcctggaggtgggcctgttcgacaccccccccttctacagcaacagcaccaacagcttcagaaacaccgtggagggcaacgaccccaccggcaagtacgaccccgccgtgagaagcctgcacaacctggcccacctgttcctgaacggcaccggcggccagacccacctgagccccaacgaccccatcttcgtgctgctgcacaccttcaccgacgccgtgttcgacgagtggctgagaagatacaacgccgacatcagcaccttccccctggagaacgcccccatcggccacaacagacagtacaacatggtgcccttctggccccccgtgaccaacaccgagatgttcgtgaccgcccccgacaacctgggctacacctacgagatccagtggcccagcagagagttcagcgtgcccgagatcatcgccatcgccgtggtgggcgccctgctgctggtggccctgatcttcggcaccgccagctacctgatcagagccagaagaagcatggacgaggccaaccagcccctgctgaccgaccagtaccagtgctacgccgaggagtacgagaagctgcagaaccccaaccagagcgtggtgtag

SEQ ID NO: 12409 - DNA, 1614 bp, Artificial Sequence
  derived and/or modified sequence
atgagcgcccccaagctgctgagcctgggctgcatcttcttccccctgctgctgttccagcaggccagagcccagttccccagacagtgcgccaccgtggaggccctgagaagcggcatgtgctgccccgacctgagccccgtgagcggccccggcaccgacagatgcggcagcagcagcggcagaggcagatgcgaggccgtgaccgccgacagcagaccccacagcccccagtacccccacgacggcagagacgacagagaggtgtggcccctgagattcttcaacagaacctgccactgcaacggcaacttcagcggccacaactgcggcacctgcagacccggctggagaggcgccgcctgcgaccagagagtgctgatcgtgagaagaaacctgctggacctgagcaaggaggagaagaaccacttcgtgagagccctggacatggccaagagaaccacccaccccctgttcgtgatcgccaccagaagaagcgaggagatcctgggccccgacggcaacaccccccagttcgagaacatcagcatctacaactacttcgtgtggacccactactacagcgtgaagaagaccttcctgggcgtgggccaggagagcttcggcgaggtggacttcagccacgagggccccgccttcctgacctggcacagataccacctgctgagactggagaaggacatgcaggagatgctgcaggagcccagcttcagcctgccctactggaacttcgccaccggcaagaacgtgtgcgacatctgcaccgacgacctgatgggcagcagaagcaacttcgacagcaccctgatcagccccaacagcgtgttcagccagtggagagtggtgtgcgacagcctggaggactacgacaccctgggcaccctgtgcaacagcaccgaggacggccccatcagaagaaaccccgccggcaacgtggccagacccatggtgcagagactgcccgagccccaggacgtggcccagtgcctggaggtgggcctgttcgacaccccccccttctacagcaacagcaccaacagcttcagaaacaccgtggagggctacagcgaccccaccggcaagtacgaccccgccgtgagaagcctgcacaacctggcccacctgttcctgaacggcaccggcggccagacccacctgagccccaacgaccccatcttcgtgctgctgcacaccttcaccgacgccgtgttcgacgagtggctgagaagatacaacgccgacatcagcaccttccccctggagaacgcccccatcggccacaacagacagtacaacatggtgcccttctggccccccgtgaccaacaccgagatgttcgtgaccgcccccgacaacctgggctacacctacgagatccagtggcccagcagagagttcagcgtgcccgagatcatcgccatcgccgtggtgggcgccctgctgctggtggccctgatcttcggcaccgccagctacctgatcagagccagaagaagcatggacgaggccaaccagcccctgctgaccgaccagtaccagtgctacgccgaggagtacgagaagctgcagaaccccaaccagagcgtggtgtag

SEQ ID NO: 12410 - DNA, 309 bp, Artificial Sequence
  derived and/or modified sequence
atgagcgcccccaagctgctgagcctgggctgcatcttcttccccctgctgctgttccagcaggccagagcccagttccccagacagtgcgccaccgtggaggccctgagaagcggcatgtgctgccccgacctgagccccgtgagcggccccggcaccgacagatgcggcagcagcagcggcagaggcagatgcgaggccgtgaccgccgacagcagaccccacagcccccagtacccccacgacggcagagacgacagagaggtgtggcccctgagattcttcaacagaacctgccactgcaactag

SEQ ID NO: 12411 - DNA, 741 bp, Artificial Sequence
  derived and/or modified sequence
atggcccaggtccctccccctgcctcaggagagcggcatgctgggacagaggacggccctatacggcgcaaccccgcgggtaatgtggcgcggcccatggtgcagaggcttcccgagccccaggatgtcgcccaatgcctggaggtgggccttttcgatactcctcccttttattccaattcaaccaattcttttaggaacactgtcgaggggaatgaccctacaggcaagtatgacccggcagtacgctcgttgcataacctggcacacctgttcctgaacgggacgggtggccagacgcacctgtcacccaatgacccaatattcgttttactacatacatttacagatgccgtgttcgatgaatggctgcgcagatataatgctgatatatcgacgtttccacttgagaatgcgcccatcggtcacaaccgacagtataacatggtacctttctggcctcccgtcactaacaccgagatgtttgtaaccgcacccgacaacctgggttatacatacgagatccagtggccctcaagggagttcagcgtgcccgagatcatcgctatcgcggtcgtcggggcactgctcctcgtcgccctaattttcgggacagcctcttacctgatccgcgcaagacgctccatggatgaagcaaatcaaccgctgctgacagaccagtaccagtgctacgcagaggagtatgagaaactccaaaatcccaaccagtccgtcgtgtag

SEQ ID NO: 12412 - DNA, 1614 bp, Artificial Sequence
  derived and/or modified sequence
atgtctgccccgaagttactgagccttggctgtatatttttcccccttctactgtttcagcaagctcgtgcccagttcccaagacaatgtgccactgtagaggcccttaggagtgggatgtgctgcccagatttatcccctgtgtcggggccaggtaccgacaggtgcggttcctccagtggtcgcgggcggtgtgaggccgtgacagccgacagcaggcctcactccccgcagtacccccatgatggacgggatgacagagaagtctggccgctcagattctttaataggacttgccattgtaatgggaacttctctggccacaactgtggaacctgccgccctggctggaggggggccgcttgcgaccagagagtgctgattgtgcgcagaaatcttttggacttgagtaaagaggaaaaaaaccatttcgtgagagcccttgatatggccaagagaactacacatccgttgtttgtaattgcgaccagacggagcgaggaaattcttgggccagatgggaatacaccacagttcgaaaatattagcatttataactatttcgtatggacccactattactccgtgaaaaaaacctttctgggagtgggacaggagtccttcggagaggtcgacttctcccatgaaggcccagcattcctgacatggcataggtaccacctcctcaggctcgagaaagatatgcaggagatgctgcaggagccatcgttttcgctgccctactggaattttgctaccggcaagaacgtatgtgacatttgtacagacgacttgatgggaagtaggagcaattttgatagcacactaatcagtcctaactctgtgttctctcagtggagagtcgtgtgtgattcacttgaggattacgacaccttgggcacgctctgcaatagcaccgaggacggtccaattaggcggaatcccgcggggaatgttgcccggcctatggttcagaggctgccagagccccaggacgttgcccagtgcctggaagttgggcttttcgatacccctcccttttatagtaacagtacgaattccttccgtaatactgtcgaagggtactccgaccccaccggaaaatacgaccctgccgttcgcagccttcacaacttggcacacttgtttctcaatggcactggagggcaaacgcacctaagccctaacgatccaatctttgtgctcctgcatactttcacggatgccgtgttcgatgaatggctgcgccgatataatgctgacatctctacctttcccctagagaacgcccccatcggacacaacagacagtataacatggttccattttggcctccagtgactaacactgagatgtttgtgaccgcgcctgacaatctaggatacacctacgaaatccagtggccttctagggagttctccgttccggaaattattgccatcgccgtcgttggcgcattgttgctggtcgctctcatttttggcacagcatcctacctgataagggcccggcggtcaatggacgaagcaaaccagcctctgctgactgaccaataccagtgttatgccgaggagtacgagaagctgcagaaccctaatcaatctgtggtgtag

SEQ ID NO: 12413 - DNA, 309 bp, Artificial Sequence
  derived and/or modified sequence
atgagtgcccctaaacttctgtcactgggctgtattttcttccccctactgctgtttcaacaggcccgggctcagttcccaagacagtgtgctaccgtggaggccctgagatcaggcatgtgctgtcctgacctgtccccagtgagcggccccggcaccgaccgatgcggaagcagctctggccgaggccggtgtgaggcagtgacagccgacagcagaccacattctccccagtaccctcacgatggcagagatgacagggaggtgtggcctcttcggttctttaacaggacatgtcattgcaactag

SEQ ID NO: 12414 - DNA, 741 bp, Artificial Sequence
  derived and/or modified sequence
atggcccaggtgcccccaccagccagcggggagagacatgctggaacagaagatggccccatcagaagaaatcctgctggaaatgtggcccggcccatggtgcagaggctgcctgagccccaggatgtggcccagtgcctggaggtgggcctgtttgacaccccacccttctacagcaacagcaccaacagcttcaggaacacagtggagggcaatgaccccaccgggaagtatgaccctgctgtgcgcagcctgcacaacctggcccacctgttcctgaatggcaccggcggccagacccacctgagccccaatgaccccatctttgtgctgctgcacaccttcacagatgctgtgtttgatgagtggctgcggcgctacaatgctgacatcagcaccttccccctggagaatgcccccatcggccacaaccggcagtacaacatggtgcccttctggccccctgtgaccaacacagagatgtttgtgacagccccagacaacctgggctacacctatgagatccagtggcccagccgggagttctctgtgcctgagatcatcgccatcgctgtggtgggcgccctgctgctggtggccctgatctttggaacagccagctacctgatccgggcccggcgctccatggatgaggccaaccagcccctgctgacagaccagtaccagtgctacgccgaggagtatgagaagctgcagaaccccaaccagagcgtggtgtag

SEQ ID NO: 12415 - DNA, 1614 bp, Artificial Sequence
  derived and/or modified sequence
atgtctgcccccaagctgctgagcctgggctgcatcttcttccccctgctgctcttccagcaggcccgggcccagttcccccggcagtgtgccaccgtggaggccctgcggagcggcatgtgctgcccagacctgagccctgtgtctggccctggaacagacagatgtggcagcagcagcggccggggccgctgtgaggccgtgacagctgacagccggccccacagcccccagtacccccatgatggaagagatgaccgggaggtgtggcccctgcgcttcttcaacagaacctgccactgcaatggaaacttcagcggccacaactgtggcacctgcaggcctggctggaggggggccgcctgtgaccagagggtgctgattgtgagaagaaacctgctggacctgagcaaggaggagaagaaccactttgtgcgggccctggacatggccaagaggaccacccaccccctgtttgtgattgccacccggcgctctgaggagatcctgggcccagatggcaacaccccccagtttgagaacatcagcatctacaactactttgtgtggacccactactacagcgtgaagaagaccttcctgggcgtgggccaggagagctttggagaggtggacttcagccatgagggccctgccttcctgacctggcaccgctaccacctgctgcggctggagaaggacatgcaggagatgctgcaggagcccagcttcagcctgccctactggaactttgccaccgggaagaatgtgtgtgacatctgcacagatgacctgatgggcagccgcagcaactttgacagcaccctcatcagccccaacagcgtcttcagccagtggagggtggtgtgtgacagcctggaggactatgacaccctgggcaccctgtgcaacagcacagaagatggccccatcagaagaaatcctgctggaaatgtggcccggcccatggtgcagaggctgcctgagccccaggatgtggcccagtgcctggaggtgggcctgtttgacaccccacccttctacagcaacagcaccaacagcttcaggaacacagtggagggctacagcgaccccaccgggaagtatgaccctgctgtgcgcagcctgcacaacctggcccacctgttcctgaatggaactggaggccagacccacctgagccccaatgaccccatctttgtgctgctgcacaccttcacagatgctgtgtttgatgagtggctgcggcgctacaatgctgacatcagcaccttccccctggagaatgcccccatcggccacaaccggcagtacaacatggtgcccttctggccccctgtgaccaacacagagatgtttgtgacagccccagacaacctgggctacacctatgagatccagtggcccagccgggagttctctgtgcctgagatcatcgccatcgctgtggtgggcgccctgctgctggtggccctgatcttcggcacagccagctacctgatccgggcccggcgctccatggatgaggccaaccagcccctgctgacagaccagtaccagtgctacgccgaggagtatgagaagctgcagaaccccaaccagagcgtggtgtag

SEQ ID NO: 12416 - DNA, 309 bp, Artificial Sequence
  derived and/or modified sequence
atgtctgcccccaagctgctgagcctgggctgcatcttcttccccctgctgctcttccagcaggcccgggcccagttcccccggcagtgtgccaccgtggaggccctgcggagcggcatgtgctgcccagacctgagccctgtgtctggccctggaacagacagatgtggcagcagcagcggccggggccgctgtgaggccgtgacagctgacagccggccccacagcccccagtacccccatgatggaagagatgaccgggaggtgtggcccctgcgcttcttcaacagaacctgccactgcaactag

SEQ ID NO: 12417 - DNA, 741 bp, Artificial Sequence
  derived and/or modified sequence
atggcccaggtgcccccccccgccagcggcgagcggcacgccggcactgaagatggaccaattcgccggaaccccgcaggaaatgttgctcgtccgatggtccagaggctgcccgaacctcaagatgtggcgcaatgcctagaggtaggactctttgatacacctcctttttattccaactccacgaatagcttcaggaacactgttgaaggaaacgacccgaccggaaagtatgatccagccgtgcgttcactgcacaacctcgcccacctcttcctgaatgggacaggcgggcagactcacctctctccaaatgaccccatctttgtgctactgcatactttcacagacgctgtgttcgatgaatggctgcgccggtacaacgccgacatctccacctttcccctggagaatgctccaatcgggcataacaggcagtacaatatggtacccttctggccccccgtgactaataccgaaatgtttgtgaccgccccggacaaccttggctacacgtatgaaatccagtggccttcacgagaattcagcgtacccgagatcatcgcgattgccgtagtgggtgcacttctacttgtagccctgatctttggcactgctagctatcttattagagccaggagatctatggacgaggcaaatcagccgctcttgacagaccagtatcagtgttatgccgaagagtatgagaaactgcagaacccaaatcagtctgtcgtttag

SEQ ID NO: 12418 - DNA, 1614 bp, Artificial Sequence
  derived and/or modified sequence
atgagcgcccccaagctgctgagcctgggctgcatcttcttccccctccttctgtttcaacaggccagagctcagttccctaggcagtgcgcaacggtggaggccctcagatccgggatgtgctgcccagacctctcgccggtgagcggtcccgggactgatcgatgcggttcttcctcaggtcgcgggcgctgcgaggcagttactgctgactctcgtcctcactcccctcagtatccccatgatggtagagacgatcgggaagtctggccccttagattcttcaaccggacatgccactgcaatggaaatttttctggacacaattgcggcacttgtagacccgggtggcgcggagcagcttgcgatcagagagtgctgatagtccggagaaatttgctggacctgagcaaggaggaaaagaaccattttgtgcgggcactggatatggccaagagaactacccaccccctgtttgtcattgctactcggagatccgaggaaatactcggccctgacgggaataccccccaatttgaaaatatttccatttacaattactttgtgtggacccattactattccgttaagaagacatttttgggcgtgggacaggagtctttcggcgaggttgacttctcccatgagggaccggcctttctgacttggcaccgctaccacctattgagactagagaaggacatgcaggagatgctgcaggagccatctttctccctgccatattggaacttcgcgacgggtaagaacgtctgtgatatttgcactgatgacctcatgggaagtcggtctaactttgacagtactcttatcagccctaactcagtgtttagccagtggagggtggtctgcgactctctcgaggattacgacaccctgggcactttgtgtaacagcaccgaggatggaccgatcaggaggaacccggcaggaaatgtcgctcgcccaatggtccaacgcctaccagaacctcaagacgtggcgcaatgcctggaagtcgggctgttcgacacccctcccttttattcgaactcgacgaactcattcaggaataccgtggagggttactcagatcccaccggaaaatacgacccagcagtgcgatccctgcataatctggcccatctgttcttgaacggtactggaggccagacacatctgtccccgaatgatcccatcttcgtactgctgcataccttcactgacgccgtctttgatgagtggctaagacgctataacgccgatatctcgacttttccgctcgagaacgcccccatcggtcacaatcgacagtataacatggtgcctttttggccacccgtgaccaatactgagatgtttgtgaccgcccctgataatctgggttacacatacgagatccagtggccgtccagagagttcagcgttcccgagatcatcgccattgccgtcgtgggtgcattgctgctggtagcattaattttcgggactgcttcttatttgatccgcgcccgccgttccatggacgaggctaatcaacctcttctgaccgaccagtatcagtgttacgcagaggaatacgagaaattgcagaatccgaatcagagcgtggtctag

SEQ ID NO: 12419 - DNA, 309 bp, Artificial Sequence
  derived and/or modified sequence
atgagcgcccccaagctgctgagcctgggctgcatcttcttccccctgttgctcttccagcaagcacgagcccaattcccgcgccaatgtgccaccgttgaagccctcaggagcggcatgtgctgtcccgatctgtcacctgtcagcgggcctggaactgacaggtgcggttcaagctcagggagagggcgatgcgaggcggttactgcggactctcgcccacactctccccaatacccacatgatggcagggacgatagagaggtatggcctctcagatttttcaatcgaacatgtcactgtaactag

SEQ ID NO: 12420 - DNA, 741 bp, Artificial Sequence
  derived and/or modified sequence
atggcgcaggtccctcctccagcgagcggtgagcggcacgcaggtacggaagacggacctatacgcaggaacccagctggcaacgtagctagacccatggtgcagagactgccagagccccaggacgtagcccagtgcctcgaggtggggttgttcgacacccccccattttacagtaatagcaccaactcctttcgtaataccgtggagggaaatgatccaacaggaaagtacgatcccgcagtgcggagtcttcacaacctagcacacctgttcctgaatggcaccggcggacagacccacctgagtccaaacgatcctatctttgtgctgttacatacattcacggacgcagtattcgatgagtggctgcggaggtacaatgcggatatcagtaccttccctctagaaaatgcccctattggccacaatcgtcagtacaacatggtccccttctggcctcctgttactaatacagaaatgttcgtgactgctcccgacaatctcggctacacctacgagatccagtggccatcccgcgaattctctgtgccagagataatagccattgcagttgttggggctcttctccttgtagccctgattttcggcaccgcctcctatctgatccgtgctcggagatccatggatgaggctaaccaaccacttcttactgaccaataccagtgctacgctgaggaatacgagaagttgcagaaccccaaccaatcagtcgtttag

SEQ ID NO: 12421 - DNA, 1614 bp, Artificial Sequence
  derived and/or modified sequence
atgagcgctcccaagttgctgagccttggctgcatcttttttccactgctcctgttccaacaagctcgcgcacagttccctcgacaatgtgccacagtagaggccctgaggagcggaatgtgctgccccgacttgtcacctgtttctgggccaggaacagacaggtgtggctcctccagcgggaggggccgttgtgaagccgtcaccgctgactcacgtccccattccccgcagtacccccacgatggcagagacgacagagaagtgtggcccctccgattttttaacagaacttgccactgcaatggcaatttttcggggcacaactgcggcacgtgcagacccggatggagaggcgctgcatgtgaccagcgcgtgctcatcgttcggcgtaacctgttagacctctccaaagaagagaagaaccactttgtccgagcccttgatatggccaaaagaaccacccatccactctttgtcattgctactaggcggagtgaagaaattctagggccagatggaaacacgccccagtttgagaacatctctatttataattacttcgtctggacccactactacagtgtgaagaagactttcctaggggttgggcaggaatcattcggggaagtggatttctcccatgagggacctgcttttctcacgtggcaccgctatcacctgttgaggctcgagaaagatatgcaagagatgctccaggagcccagtttcagcctgccctattggaacttcgccaccggtaagaacgtttgcgatatatgtacagacgacctgatggggtccagaagcaattttgattccacactgatctcccctaacagcgtgttctcccagtggcgagtcgtgtgtgattcacttgaggactatgacacactcggcacattatgtaattctaccgaagacggcccaatcagaaggaaccccgctggaaatgtggcgcgaccaatggtgcagcgtctccccgagccccaggatgtggctcaatgcctcgaagtgggattgtttgacacaccacctttctatagcaacagtacaaatagcttcaggaatacagtggaggggtacagcgatccaaccggtaagtatgatcccgctgtgcgtagcctccataacttggcccatctattcttaaacggaactggcggacagacccacctctcccctaatgacccgatatttgtgttactgcacacatttaccgacgccgtgtttgatgagtggcttcgacgctacaacgccgacattagcacttttccactggagaacgctccaattgggcacaatcggcaatataacatggttcccttctggcctcctgtgaccaacacagaaatgtttgtcaccgcgccagacaatctgggttatacctatgaaatacagtggccctcaagagagttcagcgtgcctgagattatagccattgccgtggttggggctctcttattggtggccctaattttcggaaccgcatcctacctcattcgagccagacgtagcatggacgaggccaatcagccattacttacggaccagtaccagtgttatgccgaagagtacgagaaacttcagaatcccaaccagagtgtggtgtag

SEQ ID NO: 12422 - DNA, 309 bp, Artificial Sequence
  derived and/or modified sequence
atgtcggcacccaaactgctctctctcggctgtatattcttcccattgttactcttccagcaggccagggcccagttcccacgccagtgcgctaccgtagaggccttgagatctggcatgtgctgccccgatctttcccccgtgagtggacccggaactgacagatgcggaagctcttctgggaggggtcgctgcgaggcagtcactgcggattctaggccacactccccgcagtatccccacgacgggcgagatgacagagaggtatggccgctccgattctttaatagaacatgccactgcaactag

SEQ ID NO: 12423 - DNA, 2668 bp, Artificial Sequence
  derived and/or modified sequence
acagttctgacgtgagaggacaagaaacacaagcaaatataaaacattcaattctaagagaagttcatcagagacatccttcaggattgtgagctggattttcctctacgtgcttcagtcttctctacacaaagagctgcaaaccaggtctttgttttgcactcttatttcaagcagaatgagtgctcctaaactcctctctctgggctgtatcttcttccccttgctactttttcagcaggcccgggctcaattcccaagacagtgtgccactgttgaggctttgagaagtggtatgtgttgcccagacctgtcccctgtgtctgggcctgggacagaccgctgtggctcatcatcagggaggggcagatgtgaggcagtgactgcagactcccggccccacagccctcagtatccccatgatggcagagatgatcgggaggtctggcccttgcgcttcttcaataggacatgtcactgcaacggcaatttctcaggacacaactgtgggacgtgccgtcctggctggagaggagctgcctgtgaccagagggttctcatagtcaggagaaatcttctggacttaagtaaagaagaaaagaaccactttgtccgggccctggatatggcaaagcgcacaactcaccctttatttgtcattgccaccaggagatcagaagaaatactggggccagatggcaacacgccacaatttgagaacatttccatttataactactttgtttggacacactattactcagtcaaaaagactttccttggggtaggacaggaaagctttggtgaagtggatttctctcatgagggaccagcttttctcacatggcacaggtaccacctcctgcgtctggagaaagacatgcaggcaccgaggatgggccaattaggagaaatccagctggaaatgtggccagaccaatggtgcaacgtcttcctgaaccacaggatgtcgctcagtgcttggaagttggtttatttgacacgcctcctttttattccaactctacaaacagtttccgaaacacagtggaaggcaatgaccccacgggaaagtatgaccctgctgttcgaagtcttcacaatttggctcatctattcctgaatggaacagggggacaaacccatttgtctccaaatgatcctatttttgtcctcctgcacaccttcacagatgcagtctttgatgaatggctgaggagatacaatgctgatatatccacatttccattggaaaatgcccctattggacataatagacaatacaacatggtgccattctggcccccagtcaccaacacagaaatgtttgttactgctccagacaacctgggatacacttatgaaattcaatggccaagtcgggagtttagtgtacctgagataattgccatagcagtagttggcgctttgttactggttgcactcatttttgggactgcttcttatctgattcgtgccagacgcagtatggatgaagctaaccagcctctcctcactgatcagtatcaatgctatgctgaagaatatgaaaaactccagaatcctaatcagtctgtggtctaacaaatgccctactctcttatgcattagtatcacaaaaccacctggttgaatataatagattgagttattaactgtattttctttcactttattaccttctttctaatacaagcatatgttagcattaaagttctaggcatacttttcaaagctgggaagaccctttcagaatcttttcaatgggttttaattttcagttctatttaaaatggtgaatgacactaaactccatgatatttaaggatagtgtgaagatctttggcatgatttaaaggttgagtatgtgaagatataagtaagtgaactaccatgctttgtttacgtgtaaaggaaaataatgtttgatagtaaatgtccacttaaaatacatgaatgggcatttctaaaatgttaaaacataaacacatttccattcatggatatttgtcaacagatttaaagaaaaccacagttattaattaaagaaaattaattatgtgtagttataaaccaatgaaattttgattaaccttttcaaattaatgttccagtttgaagaccaatcaaatatattatttagtcaacatatactatttagtctcaggttcaaggctacaacaaaaatcaccatctttgtcaaactttggagagggaaaatcttcactttcttaagcaacaatggatattgcctgtgtttgccactgtgtttccctgcctctcaattcgctgaaaaaggaactacctatccttacatttcacctactaatgtctcttctaacatcttagaggtccatggagaaggcatatggagaacatgttttatactgctctataaatagtattccaatcactgtgcttaatttaaatagcattatcttatcatttatcagccttttatgtattttccaagtaaaatattaacatattatttcattggtcttcttttttatctggttctatatgaatgctattttttcccttctcttctaacatgaaatatattttctctttttgatcttgtgctatgaaacaatcttccaaagaactgtataaggtggtcataagtgaatattttaattaaaattggtaaaaataaataataaca

SEQ ID NO: 12424 - DNA, 2835 bp, Artificial Sequence
  derived and/or modified sequence
aattctaagagaagttcatcagagacatccttcaggattgtgagctggattttcctctacgtgcttcagtcttctctacacaaagagctgcaaaccaggtctttgttttgcactcttatttcaagcagaatgagtgctcctaaactcctctctctgggctgtatcttcttccccttgctactttttcagcaggcccgggctcaattcccaagacagtgtgccactgttgaggctttgagaagtggtatgtgttgcccagacctgtcccctgtgtctgggcctgggacagaccgctgtggctcatcatcagggaggggcagatgtgaggcagtgactgcagactcccggccccacagccctcagtatccccatgatggcagagatgatcgggaggtctggcccttgcgcttcttcaataggacatgtcactgcaacggcaatttctcaggacacaactgtgggacgtgccgtcctggctggagaggagctgcctgtgaccagagggttctcatagtcaggagaaatcttctggacttaagtaaagaagaaaagaaccactttgtccgggccctggatatggcaaagcgcacaactcaccctttatttgtcattgccaccaggagatcagaagaaatactggggccagatggcaacacgccacaatttgagaacatttccatttataactactttgtttggacacactattactcagtcaaaaagactttccttggggtaggacaggaaagctttggtgaagtggatttctctcatgagggaccagcttttctcacatggcacaggtaccacctcctgcgtctggagaaagacatgcaggaaatgttgcaagagccttctttctcccttccttactggaattttgcaacggggaaaaatgtctgtgatatctgcacggatgacttgatgggatccagaagcaactttgattccactctaataagcccaaactctgtcttttctcaatggcgagtggtctgtgactccttggaagattatgataccctgggaacactttgtaacagcaccgaggatgggccaattaggagaaatccagctggaaatgtggccagaccaatggtgcaacgtcttcctgaaccacaggatgtcgctcagtgcttggaagttggtttatttgacacgcctcctttttattccaactctacaaacagtttccgaaacacagtggaaggttacagtgaccccacgggaaagtatgaccctgctgttcgaagtcttcacaatttggctcatctattcctgaatggaacagggggacaaacccatttgtctccaaatgatcctatttttgtcctcctgcacaccttcacagatgcagtctttgatgaatggctgaggagatacaatgctgatatatccacatttccattggaaaatgcccctattggacataatagacaatacaacatggtgccattctggcccccagtcaccaacacagaaatgtttgttactgctccagacaacctgggatacacttatgaaattcaatggccaagtcgggagtttagtgtacctgagataattgccatagcagtagttggcgctttgttactggttgcactcatttttgggactgcttcttatctgattcgtgccagacgcagtatggatgaagctaaccagcctctcctcactgatcagtatcaatgctatgctgaagaatatgaaaaactccagaatcctaatcagtctgtggtctaacaaatgccctactctcttatgcattagtatcacaaaaccacctggttgaatataatagattgagttattaactgtattttctttcactttattaccttctttctaatacaagcatatgttagcattaaagttctaggcatacttttcaaagctgggaagaccctttcagaatcttttcaatgggttttaattttcagttctatttaaaatggtgaatgacactaaactccatgatatttaaggatagtgtgaagatctttggcatgatttaaaggttgagtatgtgaagatataagtaagtgaactaccatgctttgtttacgtgtaaaggaaaataatgtttgatagtaaatgtccacttaaaatacatgaatgggcatttctaaaatgttaaaacataaacacatttccattcatggatatttgtcaacagatttaaagaaaaccacagttattaattaaagaaaattaattatgtgtagttataaaccaatgaaattttgattaaccttttcaaattaatgttccagtttgaagaccaatcaaatatattatttagtcaacatatactatttagtctcaggttcaaggctacaacaaaaatcaccatctttgtcaaactttggagagggaaaatcttcactttcttaagcaacaatggatattgcctgtgtttgccactgtgtttccctgcctctcaattcgctgaaaaaggaactacctatccttacatttcacctactaatgtctcttctaacatcttagaggtccatggagaaggcatatggagaacatgttttatactgctctataaatagtattccaatcactgtgcttaatttaaatagcattatcttatcatttatcagccttttatgtattttccaagtaaaatattaacatattatttcattggtcttcttttttatctggttctatatgaatgctattttttcccttctcttctaacatgaaatatattttctctttttgatcttgtgctatgaaacaatcttccaaagaactgtataaggtggtcataagtgaatattttaattaaaattggtaaaaataaataataacagtaataat

SEQ ID NO: 12425 - DNA, 549 bp, Artificial Sequence
  derived and/or modified sequence
ataaaagttatctcactaaatacttgagactcaaagtgatatacttcacttttccatacagcctgcagacaaaacccatcatatagctctgcctagctacaaggggatggcaaaatataatcccatatatctgaaaggagagaagaaccagatatggctggattttcctctacgtgcttcagtcttctctacacaaagagctgcaaaccaggtctttgttttgcactcttatttcaagcagaatgagtgctcctaaactcctctctctgggctgtatcttcttccccttgctactttttcagcaggcccgggctcaattcccaagacagtgtgccactgttgaggctttgagaagtggtatgtgttgcccagacctgtcccctgtgtctgggcctgggacagaccgctgtggctcatcatcagggaggggcagatgtgaggcagtgactgcagactcccggccccacagccctcagtatccccatgatggcagagatgatcgggaggtctggcccttgcgcttcttcaataggacatgtcactgcaacg

SEQ ID NO: 12426 - protein, 213 aa, Artificial Sequence
  derived and/or modified sequence
MPRRAENWDEAEVGAEEAGVEEYGPEEDGGEESGAEESGPEESGPEELGAEEEMEAGRPRPVLRSVNSREPSQVIFCNRSPRVVLPVWLNFDGEPQPYPTLPPGTGRRIHSYRGHLWLFRDAGTHDGLLVNQTELFVPSLNVDGQPIFANITLPVYTLKERCLQVVRSLVKPENYRRLDIVRSLYEDLEDHPNVQKDLERLTQERIAHQRMGD

SEQ ID NO: 12427 - protein, 131 aa, Artificial Sequence
  derived and/or modified sequence
MPRRAENWDEAEVGAEEAGVEEYGPEEDSYRGHLWLFRDAGTHDGLLVNQTELFVPSLNVDGQPIFANITLPVYTLKERCLQVVRSLVKPENYRRLDIVRSLYEDLEDHPNVQKDLERLTQERIAHQRMGD

SEQ ID NO: 12428 - DNA, 642 bp, Artificial Sequence
  derived and/or modified sequence
atgcccagaagagccgagaactgggacgaggccgaggtgggcgccgaggaggccggcgtggaggagtacggccccgaggaggacggcggcgaggagagcggcgccgaggagagcggccccgaggagagcggccccgaggagctgggcgccgaggaggagatggaggccggcagacccagacccgtgctgagaagcgtgaacagcagagagcccagccaggtgatcttctgcaacagaagccccagagtggtgctgcccgtgtggctgaacttcgacggcgagccccagccctaccccaccctgccccccggcaccggcagaagaatccacagctacagaggccacctgtggctgttcagagacgccggcacccacgacggcctgctggtgaaccagaccgagctgttcgtgcccagcctgaacgtggacggccagcccatcttcgccaacatcaccctgcccgtgtacaccctgaaggagagatgcctgcaggtggtgagaagcctggtgaagcccgagaactacagaagactggacatcgtgagaagcctgtacgaggacctggaggaccaccccaacgtgcagaaggacctggagagactgacccaggagagaatcgcccaccagagaatgggcgactag

SEQ ID NO: 12429 - DNA, 396 bp, Artificial Sequence
  derived and/or modified sequence
atgcccagaagagccgagaactgggacgaggccgaggtgggcgccgaggaggccggcgtggaggagtacggccccgaggaggacagctacagaggccacctgtggctgttcagagacgccggcacccacgacggcctgctggtgaaccagaccgagctgttcgtgcccagcctgaacgtggacggccagcccatcttcgccaacatcaccctgcccgtgtacaccctgaaggagagatgcctgcaggtggtgagaagcctggtgaagcccgagaactacagaagactggacatcgtgagaagcctgtacgaggacctggaggaccaccccaacgtgcagaaggacctggagagactgacccaggagagaatcgcccaccagagaatgggcgactag

SEQ ID NO: 12430 - DNA, 642 bp, Artificial Sequence
  derived and/or modified sequence
atgccaaggcgcgccgagaattgggatgaggcggaagtaggtgctgaggaggccggtgtggaagagtacggacccgaggaagatggaggcgaagagtctggtgcggaggagagcggcccagaagagtcgggccccgaagagctgggggccgaggaggagatggaggcgggccggcctcgtccagtcctgcggtccgttaattctcgggaaccatcccaggtgatattctgcaaccgaagtccaagagtcgtcctgcccgtctggctgaatttcgatggcgagcctcagccctatcccaccttaccccccgggacgggcaggcggatacactcttacaggggccatttatggctgttccgagacgctggcacccacgacggcctgctggtcaaccagaccgagctgttcgtcccctcattgaatgtagacggccagcccatctttgctaacattacacttccagtctacaccctgaaagagcgctgcctgcaggtggtgaggagcctagtcaagccagagaattatcgccgactggacatcgttaggtccctgtatgaagacctagaggaccaccccaacgtgcagaaggatctggagagactcacacaggaacgaattgctcaccagcggatgggggattag

SEQ ID NO: 12431 - DNA, 396 bp, Artificial Sequence
  derived and/or modified sequence
atgcccagaagagcggagaattgggacgaggctgaggtcggagccgaggaggctggggttgaggaatatggcccagaggaggactcctatcgggggcacttatggctgttccgtgacgccgggacacatgatggactccttgttaatcagacggaacttttcgtgccatctctcaatgtcgacggccagcctatatttgccaacatcaccctgcccgtttacacactcaaagaaagatgtcttcaggtagtgcgaagccttgtcaaacctgaaaattatcggagactcgatattgtgcggtcactgtacgaagaccttgaagatcatcctaacgtgcagaaggatctagagaggctcacccaagagaggattgcacatcaaagaatgggagattag

SEQ ID NO: 12432 - DNA, 642 bp, Artificial Sequence
  derived and/or modified sequence
atgcccaggagagctgagaactgggatgaagctgaggtgggcgctgaggaggccggcgtggaggagtatggcccagaagaagatggaggagaggagagcggggctgaggagagcggccctgaggagagcggccctgaggagctgggcgctgaggaggagatggaggccggccggcccaggcctgtgctgcggtctgtgaacagccgggagcccagccaggtgatcttctgcaacagaagcccccgggtggtgctgcctgtgtggctgaactttgatggagagccccagccctaccccaccctgcccccaggcactggaagacgcatccacagctaccggggccacctgtggctgttcagagatgctggcacccatgatggcctgctggtgaaccagacagagctgtttgtgcccagcctgaatgtggatggccagcccatctttgccaacatcaccctgcctgtgtacaccctgaaggagcgctgcctgcaggtggtgcgcagcctggtgaagccagagaactaccgccgcctggacatcgtgcgcagcctgtatgaggacctggaggaccaccccaacgtgcagaaggacctggagcggctgacccaggagcgcatcgcccaccagaggatgggagactag

SEQ ID NO: 12433 - DNA, 396 bp, Artificial Sequence
  derived and/or modified sequence
atgcccaggagagctgagaactgggatgaagctgaggtgggcgctgaggaggccggcgtggaggagtatggcccagaagaagattcctaccggggccacctgtggctgttcagagatgctggcacccatgatggcctgctggtgaaccagacagagctgtttgtgcccagcctgaatgtggatggccagcccatctttgccaacatcaccctgcctgtgtacaccctgaaggagcgctgcctgcaggtggtgcgcagcctggtgaagccagagaactaccgccgcctggacatcgtgcgcagcctgtatgaggacctggaggaccaccccaacgtgcagaaggacctggagcggctgacccaggagcgcatcgcccaccagaggatgggagactag

SEQ ID NO: 12434 - DNA, 642 bp, Artificial Sequence
  derived and/or modified sequence
atgccccggcgggccgagaactgggacgaggccgaggtgggcgccgaagaggcaggggtcgaagagtatggacctgaagaagacgggggtgaggagtccggcgctgaagaatccggtcccgaggagagtggccccgaggaactgggagctgaagaggagatggaagctggacggccccgccccgtactgcggagcgttaactctagggaaccttcacaggtgatcttttgcaaccggagccctcgcgtagtgctaccagtatggctcaacttcgatggtgagccacagccatacccaactctaccgccaggcacaggtcggaggatccacagctaccggggccacctctggctctttagagatgcgggcacacacgacgggctactggtgaaccagaccgaattattcgtgccctccctaaatgttgatggacaacctatctttgctaacatcaccctgcccgtgtacactttgaaggagcgctgcttgcaggtcgtacgctccttagtcaaacctgagaattaccgacgactcgacatcgtgcggtccctgtacgaagaccttgaagatcatccaaatgttcaaaaggatctcgagagattgactcaggaacggattgctcatcagcggatgggcgactag

SEQ ID NO: 12435 - DNA, 396 bp, Artificial Sequence
  derived and/or modified sequence
atgccccggcgggccgagaactgggacgaggccgaggtgggcgccgaggaggcaggcgttgaagaatatggcccagaggaagactcgtaccgagggcatttgtggctttttagggacgccggtactcatgacggcctcttagttaatcagacagaactctttgtgccaagccttaacgttgatggccagcctatctttgccaatattactctacctgtatacactctgaaggaacggtgtctccaggtggtgagatctctggtgaagcccgagaactatagacgactggatatcgtccggagtctctatgaggacctcgaggaccatcctaacgtccagaaggacctggagcgactaacacaggagcgcatcgcacaccagcgcatgggagattag

SEQ ID NO: 12436 - DNA, 642 bp, Artificial Sequence
  derived and/or modified sequence
atgcctagacgggctgaaaactgggacgaagcagaagtgggggctgaggaagctggagtcgaggagtacggtccggaagaggatggaggggaagaatcaggcgctgaggaatccggcccagaagagagtggccctgaggagctgggagcagaggaggagatggaagctggcagacctcggccagtcttgaggtccgttaactcaagggaacctagccaggtaatcttttgcaaccgtagtccgagagtcgtgctacctgtgtggctaaactttgatggcgagccccagccttatcctactctgcccccaggcacaggcaggagaatccactcctacagaggacacctgtggctgtttcgtgatgctgggacacatgatggcttacttgttaaccagacagagctgtttgtcccctccctgaacgtcgatggccagcccatttttgccaatattactttgcccgtgtatactttaaaggagagatgtctgcaggttgtgcgaagtttagtgaaaccagaaaattatcgcaggctggacattgtccgaagcctgtacgaggacctcgaggaccatccaaatgtccaaaaagatctggagagactcacccaggaacgtatcgcccatcaacgaatgggggactag

SEQ ID NO: 12437 - DNA, 396 bp, Artificial Sequence
  derived and/or modified sequence
atgccgagaagggccgagaactgggatgaagctgaggtgggagccgaggaagctggcgtggaagaatacggcccagaggaggattcttatcggggacatctctggctgttccgcgacgctggaacacacgatggacttctggttaatcaaacagagctcttcgtgccatctctgaatgtagacggccagccgatctttgcaaacatcaccctgcccgtgtataccctaaaagagcgctgccttcaggtggtgcgtagtttggtcaaaccggagaactacagacgcctggatatagtgcgctcgctgtacgaagacttagaggaccaccctaacgttcagaaagacctggagcgcctgacccaggagcgtatcgcgcaccagcgcatgggcgattag

SEQ ID NO: 12438 - DNA, 3737 bp, Artificial Sequence
  derived and/or modified sequence
tgagtgtttatgtttgtagttttaattgctctgaagtaaatatctgattttccaatttccaccagagtgctctgcacatagtaggtctaattatttttccctctttactaatcacccatgccttgtaagaattcagttagttgactttttgtactttataagcgtgatgattgggtgttcccgtgtgagatgcgccaccctcgaaccttgttacgacgtcggcacattgcgcgtctgacatgaagaaaaaaaaaattcagttagtccaccaggcacagtggctaaggcctgtaatccctgcactttgagaggccaaggcaggaggatcacttgaacccaggagttcgagaccagcctaggcaacatagcgagactccgtttcaaacaacaaataaaaataattagtcgggcatggtggtgcgcgcctacagtaccaactactcgggaggctgaggcgagacgatcgcttgagccagggaggtcaaggctgcagtgagccaagctcgcgccactgcactccagcccgggcgacagagtgagaccctgtctcaaaaaaaaaaaaaacaccaaaccttagaggggcgaaaaaaaattttatagtggaaatacagtaacgagttggcctagcctcgcctccgttacaacggcctacggtgctggaggatccttctgcgcacgcgcacagcctccggccggctatttccgcgagcgcgttccatcctctaccgagcgcgcgcgaagactacggaggtcgactcgggagcgcgcacgcagctccgccccgcgtccgacccgcggatcccgcggcgtccggcccgggtggtctggatcgcggagggaatgccccggagggcggagaactgggacgaggccgaggtaggcgcggaggaggcaggcgtcgaagagtacggccctgaagaagacggcggggaggagtcgggcgccgaggagtccggcccggaagagtccggcccggaggaactgggcgccgaggaggagatggaggccgggcggccgcggcccgtgctgcgctcggtgaactcgcgcgagccctcccaggtcatcttctgcaatcgcagtccgcgcgtcgtgctgcccgtatggctcaacttcgacggcgagccgcagccctacccaacgctgccgcctggcacgggccgccgcatccacagctaccgaggtcacctttggctcttcagagatgcagggacacacgatgggcttctggttaaccaaactgaattatttgtgccatctctcaatgttgacggacagcctatttttgccaatatcacactgccagtgtatactctgaaagagcgatgcctccaggttgtccggagcctagtcaagcctgagaattacaggagactggacatcgtcaggtcgctctacgaagatctggaagaccacccaaatgtgcagaaagacctggagcggctgacacaggagcgcattgcacatcaacggatgggagattgaagatttctgttgaaacttacactgtttcatctcagcttttgatggtactgatgagtcttgatctagatacaggactggttccttccttagtttcaaagtgtctcattctcagagtaaaataggcaccattgcttaaaagaaagttaactgacttcactaggcattgtgatgtttaggggcaaacatcacaaaatgtaatttaatgcctgcccattagagaagtatttatcaggagaaggtggtggcatttttgcttcctagtaagtcaggacagcttgtatgtaaggaggtttgtataagtaattcagtgggaattgcagcatatcgtttaattttaagaaggcattggcatctgcttttaatggatgtataatacatccattctacatccgtagcggttggtgacttgtctgcctcctgctttgggaagactgaggcatccgtgaggcagggacaagtctttctcctctttgagaccccagtgcctgcacatcatgagccttcagtcagggtttgtcagaggaacaaaccaggggacactttgttagaaagtgcttagaggttctgcctctatttttgttggggggtgggagaggggaccttaaaatgtgtacagtgaacaaatgtcttaaagggaatcatttttgtaggaagcattttttataattttctaagtcgtgcactttctcggtccactcttgttgaagtgctgttttattactgtttctaaactaggattgacattctacagttgtgataatagcatttttgtaacttgccatccgcacagaaaatacgagaaaatctgcatgtttgattatagtattaatggacaaataagtttttgctaaatgtgagtatttctgttcctttttgtaaatatgtgacattcctgattgatttgggtttttttgttgttgttgttttgttttgttttgtttttttgagatggagtctcactcttgtcacccaggctggagtgcagtggcgccatctcggctcactgcaacctctgcctcctgggttcacgtaatcctcctgagtagctgggattacaggcgcctgccaccacgctggccaatttttgtacttttagtagagacagtgtttcgtcatgttggccaggctggtttcaaactcctgacctcaggtgatccgcccacctcagcctcccaaaatggtgggattacaggtgtgtgggccaccgtgcctggctgattcagcattttttatcaggcaggaccaggtggcacttccacctccagcctctggtcctaccaatggattcatggagtagcctggactgtttcatagttttctaaatgtacaaattcttataggctagacttagattcattaactcaaattcaatgcttctatcagactcagttttttgtaactaatagatttttttttccacttttgttctactccttccctaatagctttttaaaaaaatctccccagtagagaaacatttggaaaagacagaaaactaaaaaggaagaaaaaagatccctattagatacacttcttaaatacaatcacattaacattttgagctatttccttccagcctttttagggcagattttggttggtttttacatagttgagattgtactgttcatacagttttataccctttttcatttaactttataacttaaatattgctctatgttagtataagcttttcacaaacattagtatagtctcccttttataattaatgtttgtgggtatttcttggcatgcatctttaattccttatcctagcctttgggcacaattcctgtgctcaaaaatgagagtgacggctggcatggtggctcccgcctgtaatcccagtactttggaaagccaaggtaagaggattgcttgagcccagaacttcaagatgagcctgggctcatagtgagaacccatctatacaaaaaatttttaaaaattagcatggcggcacacatctgtaatcctagctacttggcaggctgaggtgagaagatcattggagtttaggaattggaggctgcagtgagccatgagtatgccactgcactccagcctgggggacagagcaagaccctgcctcaaaaaaaaaaaaaaaaaaaaaatcaggccgggcatggtggctcacgcctgtaatcccagcactttgggaggtcgaggtgggcagatcacctgaggtcaggagttcgagaccagcctggccaacatggtaaaaccccatttctactaaaaaatacaagaat

SEQ ID NO: 12439 - DNA, 1143 bp, Artificial Sequence
  derived and/or modified sequence
ggatcccgcggcgtccggcccgggtggtctggatcgcggagggaatgccccggagggcggagaactgggacgaggccgaggtaggcgcggaggaggcaggcgtcgaagagtacggccctgaagaagacagctaccgaggtcacctttggctcttcagagatgcagggacacacgatgggcttctggttaaccaaactgaattatttgtgccatctctcaatgttgacggacagcctatttttgccaatatcacactgccagtgtatactctgaaagagcgatgcctccaggttgtccggagcctagtcaagcctgagaattacaggagactggacatcgtcaggtcgctctacgaagatctggaagaccacccaaatgtgcagaaagacctggagcggctgacacaggagcgcattgcacatcaacggatgggagattgaagatttctgttgaaacttacactgtttcatctcagcttttgatggtactgatgagtcttgatctagatacaggactggttccttccttagtttcaaagtgtctcattctcagagtaaaataggcaccattgcttaaaagaaagttaactgacttcactaggcattgtgatgtttaggggcaaacatcacaaaatgtaatttaatgcctgcccattagagaagtatttatcaggagaaggtggtggcatttttgcttcctagtaagtcaggacagcttgtatgtaaggaggtttgtataagtaattcagtgggaattgcagcatatcgtttaattttaagaaggcattggcatctgcttttaatggatgtataatacatccattctacatccgtagcggttggtgacttgtctgcctcctgctttgggaagactgaggcatccgtgaggcagggacaagtctttctcctctttgagaccccagtgcctgcacatcatgagccttcagtcagggtttgtcagaggaacaaaccaggggacactttgttagaaagtgcttagaggttctgcctctatttttgttggggggtgggagaggggaccttaaaatgtgtacagtgaacaaatgtcttaaagggaatcatttttgtaggaagcattttttataattttctaagtcgtgcactttctcggtccactcttgtt

SEQ ID NO: 12440 - protein, 253 aa, Artificial Sequence
  derived and/or modified sequence
MDLLKRELAPILPAAWDLIDHEATRVLKLHLAGRKVVDFRGPFGWEVAAVNTGRLRAIERKEGPAVSAGVRLVRPLVEFRAPIRLELAELDAVGRGAQEPNIEDVVRAAEHAARFEDGAIFNGLAAAGIEGILEVAPHKPVVIPAPEAWPRAVAEAREVLRAAGVDGPYALALGPKAYDELAAAAEDGYPLRKHIEGQLIDGPIVWAPALEGGVLLSTRGGDFELTVGEDLSIGYDGHDRQVVELFLTESFTF

SEQ ID NO: 12441 - protein, 65 aa, Artificial Sequence
  derived and/or modified sequence
QRGSRGQRCGPGEVFNQCGSACPRVCGRPPAQACTLQCVSGCFCRRGYIRTQRGGCIPERQCHQR

SEQ ID NO: 12442 - protein, 2813 aa, Artificial Sequence
  derived and/or modified sequence
MIPARFAGVLLALALILPGTLCAEGTRGRSSTARCSLFGSDFVNTFDGSMYSFAGYCSYLLAGGCQKRSFSIIGDFQNGKRVSLSVYLGEFFDIHLFVNGTVTQGDQRVSMPYASKGLYLETEAGYYKLSGEAYGFVARIDGSGNFQVLLSDRYFNKTCGLCGNFNIFAEDDFMTQEGTLTSDPYDFANSWALSSGEQWCERASPPSSSCNISSGEMQKGLWEQCQLLKSTSVFARCHPLVDPEPFVALCEKTLCECAGGLECACPALLEYARTCAQEGMVLYGWTDHSACSPVCPAGMEYRQCVSPCARTCQSLHINEMCQERCVDGCSCPEGQLLDEGLCVESTECPCVHSGKRYPPGTSLSRDCNTCICRNSQWICSNEECPGECLVTGQSHFKSFDNRYFTFSGICQYLLARDCQDHSFSIVIETVQCADDRDAVCTRSVTVRLPGLHNSLVKLKHGAGVAMDGQDVQLPLLKGDLRIQHTVTASVRLSYGEDLQMDWDGRGRLLVKLSPVYAGKTCGLCGNYNGNQGDDFLTPSGLAEPRVEDFGNAWKLHGDCQDLQKQHSDPCALNPRMTRFSEEACAVLTSPTFEACHRAVSPLPYLRNCRYDVCSCSDGRECLCGALASYAAACAGRGVRVAWREPGRCELNCPKGQVYLQCGTPCNLTCRSLSYPDEECNEACLEGCFCPPGLYMDERGDCVPKAQCPCYYDGEIFQPEDIFSDHHTMCYCEDGFMHCTMSGVPGSLLPDAVLSSPLSHRSKRSLSCRPPMVKLVCPADNLRAEGLECTKTCQNYDLECMSMGCVSGCLCPPGMVRHENRCVALERCPCFHQGKEYAPGETVKIGCNTCVCQDRKWNCTDHVCDATCSTIGMAHYLTFDGLKYLFPGECQYVLVQDYCGSNPGTFRILVGNKGCSHPSVKCKKRVTILVEGGEIELFDGEVNVKRPMKDETHFEVVESGRYIILLLGKALSVVWDRHLSISVVLKQTYQEKVCGLCGNFDGIQNNDLTSSNLQVEEDPVDFGNSWKVSSQCADTRKVPLDSSPATCHNNIMKQTMVDSSCRILTSDVFQDCNKLVDPEPYLDVCIYDTCSCESIGDCACFCDTIAAYAHVCAQHGKVVTWRTATLCPQSCEERNLRENGYECEWRYNSCAPACQVTCQHPEPLACPVQCVEGCHAHCPPGKILDELLQTCVDPEDCPVCEVAGRRFASGKKVTLNPSDPEHCQICHCDVVNLTCEACQEPGGLVVPPTDAPVSPTTLYVEDISEPPLHDFYCSRLLDLVFLLDGSSRLSEAEFEVLKAFVVDMMERLRISQKWVRVAVVEYHDGSHAYIGLKDRKRPSELRRIASQVKYAGSQVASTSEVLKYTLFQIFSKIDRPEASRITLLLMASQEPQRMSRNFVRYVQGLKKKKVIVIPVGIGPHANLKQIRLIEKQAPENKAFVLSSVDELEQQRDEIVSYLCDLAPEAPPPTLPPDMAQVTVGPGLLGVSTLGPKRNSMVLDVAFVLEGSDKIGEADFNRSKEFMEEVIQRMDVGQDSIHVTVLQYSYMVTVEYPFSEAQSKGDILQRVREIRYQGGNRTNTGLALRYLSDHSFLVSQGDREQAPNLVYMVTGNPASDEIKRLPGDIQVVPIGVGPNANVQELERIGWPNAPILIQDFETLPREAPDLVLQRCCSGEGLQIPTLSPAPDCSQPLDVILLLDGSSSFPASYFDEMKSFAKAFISKANIGPRLTQVSVLQYGSITTIDVPWNVVPEKAHLLSLVDVMQREGGPSQIGDALGFAVRYLTSEMHGARPGASKAVVILVTDVSVDSVDAAADAARSNRVTVFPIGIGDRYDAAQLRILAGPAGDSNVVKLQRIEDLPTMVTLGNSFLHKLCSGFVRICMDEDGNEKRPGDVWTLPDQCHTVTCQPDGQTLLKSHRVNCDRGLRPSCPNSQSPVKVEETCGCRWTCPCVCTGSSTRHIVTFDGQNFKLTGSCSYVLFQNKEQDLEVILHNGACSPGARQGCMKSIEVKHSALSVELHSDMEVTVNGRLVSVPYVGGNMEVNVYGAIMHEVRFNHLGHIFTFTPQNNEFQLQLSPKTFASKTYGLCGICDENGANDFMLRDGTVTTDWKTLVQEWTVQRPGQTCQPILEEQCLVPDSSHCQVLLLPLFAECHKVLAPATFYAICQQDSCHQEQVCEVIASYAHLCRTNGVCVDWRTPDFCAMSCPPSLVYNHCEHGCPRHCDGNVSSCGDHPSEGCFCPPDKVMLEGSCVPEEACTQCIGEDGVQHQFLEAWVPDHQPCQICTCLSGRKVNCTTQPCPTAKAPTCGLCEVARLRQNADQCCPEYECVCDPVSCDLPPVPHCERGLQPTLTNPGECRPNFTCACRKEECKRVSPPSCPPHRLPTLRKTQCCDEYECACNCVNSTVSCPLGYLASTATNDCGCTTTTCLPDKVCVHRSTIYPVGQFWEEGCDVCTCTDMEDAVMGLRVAQCSQKPCEDSCRSGFTYVLHEGECCGRCLPSACEVVTGSPRGDSQSSWKSVGSQWASPENPCLINECVRVKEEVFIQQRNVSCPQLEVPVCPSGFQLSCKTSACCPSCRCERMEACMLNGTVIGPGKTVMIDVCTTCRCMVQVGVISGFKLECRKTTCNPCPLGYKEENNTGECCGRCLPTACTIQLRGGQIMTLKRDETLQDGCDTHFCKVNERGEYFWEKRVTGCPPFDEHKCLAEGGKIMKIPGTCCDTCEEPECNDITARLQYVKVGSCKSEVEVDIHYCQGKCASKAMYSIDINDVQDQCSCCSPTRTEPMQVALHCTNGSVVYHEVLNAMECKCSPRKCSK

SEQ ID NO: 12443 - DNA, 8833 bp, Artificial Sequence
  derived and/or modified sequence
agctcacagctattgtggtgggaaagggagggtggttggtggatgtcacagcttgggctttatctcccccagcagtggggactccacagcccctgggctacataacagcaagacagtccggagctgtagcagacctgattgagcctttgcagcagctgagagcatggcctagggtgggcggcaccattgtccagcagctgagtttcccagggaccttggagatagccgcagccctcatttgcaggggaagatgattcctgccagatttgccggggtgctgcttgctctggccctcattttgccagggaccctttgtgcagaaggaactcgcggcaggtcatccacggcccgatgcagccttttcggaagtgacttcgtcaacacctttgatgggagcatgtacagctttgcgggatactgcagttacctcctggcagggggctgccagaaacgctccttctcgattattggggacttccagaatggcaagagagtgagcctctccgtgtatcttggggaattttttgacatccatttgtttgtcaatggtaccgtgacacagggggaccaaagagtctccatgccctatgcctccaaagggctgtatctagaaactgaggctgggtactacaagctgtccggtgaggcctatggctttgtggccaggatcgatggcagcggcaactttcaagtcctgctgtcagacagatacttcaacaagacctgcgggctgtgtggcaactttaacatctttgctgaagatgactttatgacccaagaagggaccttgacctcggacccttatgactttgccaactcatgggctctgagcagtggagaacagtggtgtgaacgggcatctcctcccagcagctcatgcaacatctcctctggggaaatgcagaagggcctgtgggagcagtgccagcttctgaagagcacctcggtgtttgcccgctgccaccctctggtggaccccgagccttttgtggccctgtgtgagaagactttgtgtgagtgtgctggggggctggagtgcgcctgccctgccctcctggagtacgcccggacctgtgcccaggagggaatggtgctgtacggctggaccgaccacagcgcgtgcagcccagtgtgccctgctggtatggagtataggcagtgtgtgtccccttgcgccaggacctgccagagcctgcacatcaatgaaatgtgtcaggagcgatgcgtggatggctgcagctgccctgagggacagctcctggatgaaggcctctgcgtggagagcaccgagtgtccctgcgtgcattccggaaagcgctaccctcccggcacctccctctctcgagactgcaacacctgcatttgccgaaacagccagtggatctgcagcaatgaagaatgtccaggggagtgccttgtcacaggtcaatcacacttcaagagctttgacaacagatacttcaccttcagtgggatctgccagtacctgctggcccgggattgccaggaccactccttctccattgtcattgagactgtccagtgtgctgatgaccgcgacgctgtgtgcacccgctccgtcaccgtccggctgcctggcctgcacaacagccttgtgaaactgaagcatggggcaggagttgccatggatggccaggacgtccagctccccctcctgaaaggtgacctccgcatccagcatacagtgacggcctccgtgcgcctcagctacggggaggacctgcagatggactgggatggccgcgggaggctgctggtgaagctgtcccccgtctatgccgggaagacctgcggcctgtgtgggaattacaatggcaaccagggcgacgacttccttaccccctctgggctggcggagccccgggtggaggacttcgggaacgcctggaagctgcacggggactgccaggacctgcagaagcagcacagcgatccctgcgccctcaacccgcgcatgaccaggttctccgaggaggcgtgcgcggtcctgacgtcccccacattcgaggcctgccatcgtgccgtcagcccgctgccctacctgcggaactgccgctacgacgtgtgctcctgctcggacggccgcgagtgcctgtgcggcgccctggccagctatgccgcggcctgcgcggggagaggcgtgcgcgtcgcgtggcgcgagccaggccgctgtgagctgaactgcccgaaaggccaggtgtacctgcagtgcgggaccccctgcaacctgacctgccgctctctctcttacccggatgaggaatgcaatgaggcctgcctggagggctgcttctgccccccagggctctacatggatgagaggggggactgcgtgcccaaggcccagtgcccctgttactatgacggtgagatcttccagccagaagacatcttctcagaccatcacaccatgtgctactgtgaggatggcttcatgcactgtaccatgagtggagtccccggaagcttgctgcctgacgctgtcctcagcagtcccctgtctcatcgcagcaaaaggagcctatcctgtcggccccccatggtcaagctggtgtgtcccgctgacaacctgcgggctgaagggctcgagtgtaccaaaacgtgccagaactatgacctggagtgcatgagcatgggctgtgtctctggctgcctctgccccccgggcatggtccggcatgagaacagatgtgtggccctggaaaggtgtccctgcttccatcagggcaaggagtatgcccctggagaaacagtgaagattggctgcaacacttgtgtctgtcgggaccggaagtggaactgcacagaccatgtgtgtgatgccacgtgctccacgatcggcatggcccactacctcaccttcgacgggctcaaatacctgttccccggggagtgccagtacgttctggtgcaggattactgcggcagtaaccctgggacctttcggatcctagtggggaataagggatgcagccacccctcagtgaaatgcaagaaacgggtcaccatcctggtggagggaggagagattgagctgtttgacggggaggtgaatgtgaagaggcccatgaaggatgagactcactttgaggtggtggagtctggccggtacatcattctgctgctgggcaaagccctctccgtggtctgggaccgccacctgagcatctccgtggtcctgaagcagacataccaggagaaagtgtgtggcctgtgtgggaattttgatggcatccagaacaatgacctcaccagcagcaacctccaagtggaggaagaccctgtggactttgggaactcctggaaagtgagctcgcagtgtgctgacaccagaaaagtgcctctggactcatcccctgccacctgccataacaacatcatgaagcagacgatggtggattcctcctgtagaatccttaccagtgacgtcttccaggactgcaacaagctggtggaccccgagccatatctggatgtctgcatttacgacacctgctcctgtgagtccattggggactgcgcctgcttctgcgacaccattgctgcctatgcccacgtgtgtgcccagcatggcaaggtggtgacctggaggacggccacattgtgcccccagagctgcgaggagaggaatctccgggagaacgggtatgagtgtgagtggcgctataacagctgtgcacctgcctgtcaagtcacgtgtcagcaccctgagccactggcctgccctgtgcagtgtgtggagggctgccatgcccactgccctccagggaaaatcctggatgagcttttgcagacctgcgttgaccctgaagactgtccagtgtgtgaggtggctggccggcgttttgcctcaggaaagaaagtcaccttgaatcccagtgaccctgagcactgccagatttgccactgtgatgttgtcaacctcacctgtgaagcctgccaggagccgggaggcctggtggtgcctcccacagatgccccggtgagccccaccactctgtatgtggaggacatctcggaaccgccgttgcacgatttctactgcagcaggctactggacctggtcttcctgctggatggctcctccaggctgtccgaggctgagtttgaagtgctgaaggcctttgtggtggacatgatggagcggctgcgcatctcccagaagtgggtccgcgtggccgtggtggagtaccacgacggctcccacgcctacatcgggctcaaggaccggaagcgaccgtcagagctgcggcgcattgccagccaggtgaagtatgcgggcagccaggtggcctccaccagcgaggtcttgaaatacacactgttccaaatcttcagcaagatcgaccgccctgaagcctcccgcatcaccctgctcctgatggccagccaggagccccaacggatgtcccggaactttgtccgctacgtccagggcctgaagaagaagaaggtcattgtgatcccggtgggcattgggccccatgccaacctcaagcagatccgcctcatcgagaagcaggcccctgagaacaaggccttcgtgctgagcagtgtggatgagctggagcagcaaagggacgagatcgttagctacctctgtgaccttgcccctgaagcccctcctcctactctgccccccgacatggcacaagtcactgtgggcccggggctcttgggggtttcgaccctggggcccaagaggaactccatggttctggatgtggcgttcgtcctggaaggatcggacaaaattggtgaagccgacttcaacaggagcaaggagttcatggaggaggtgattcagcggatggatgtgggccaggacagcatccacgtcacggtgctgcagtactcctacatggtgactgtggagtaccccttcagcgaggcacagtccaaaggggacatcctgcagcgggtgcgagagatccgctaccagggcggcaacaggaccaacactgggctggccctgcggtacctctctgaccacagcttcttggtcagccagggtgaccgggagcaggcgcccaacctggtctacatggtcaccggaaatcctgcctctgatgagatcaagaggctgcctggagacatccaggtggtgcccattggagtgggccctaatgccaacgtgcaggagctggagaggattggctggcccaatgcccctatcctcatccaggactttgagacgctcccccgagaggctcctgacctggtgctgcagaggtgctgctccggagaggggctgcagatccccaccctctcccctgcacctgactgcagccagcccctggacgtgatccttctcctggatggctcctccagtttcccagcttcttattttgatgaaatgaagagtttcgccaaggctttcatttcaaaagccaatatagggcctcgtctcactcaggtgtcagtgctgcagtatggaagcatcaccaccattgacgtgccatggaacgtggtcccggagaaagcccatttgctgagccttgtggacgtcatgcagcgggagggaggccccagccaaatcggggatgccttgggctttgctgtgcgatacttgacttcagaaatgcatggtgccaggccgggagcctcaaaggcggtggtcatcctggtcacggacgtctctgtggattcagtggatgcagcagctgatgccgccaggtccaacagagtgacagtgttccctattggaattggagatcgctacgatgcagcccagctacggatcttggcaggcccagcaggcgactccaacgtggtgaagctccagcgaatcgaagacctccctaccatggtcaccttgggcaattccttcctccacaaactgtgctctggatttgttaggatttgcatggatgaggatgggaatgagaagaggcccggggacgtctggaccttgccagaccagtgccacaccgtgacttgccagccagatggccagaccttgctgaagagtcatcgggtcaactgtgaccgggggctgaggccttcgtgccctaacagccagtcccctgttaaagtggaagagacctgtggctgccgctggacctgcccctgcgtgtgcacaggcagctccactcggcacatcgtgacctttgatgggcagaatttcaagctgactggcagctgttcttatgtcctatttcaaaacaaggagcaggacctggaggtgattctccataatggtgcctgcagccctggagcaaggcagggctgcatgaaatccatcgaggtgaagcacagtgccctctccgtcgagctgcacagtgacatggaggtgacggtgaatgggagactggtctctgttccttacgtgggtgggaacatggaagtcaacgtttatggtgccatcatgcatgaggtcagattcaatcaccttggtcacatcttcacattcactccacaaaacaatgagttccaactgcagctcagccccaagacttttgcttcaaagacgtatggtctgtgtgggatctgtgatgagaacggagccaatgacttcatgctgagggatggcacagtcaccacagactggaaaacacttgttcaggaatggactgtgcagcggccagggcagacgtgccagcccatcctggaggagcagtgtcttgtccccgacagctcccactgccaggtcctcctcttaccactgtttgctgaatgccacaaggtcctggctccagccacattctatgccatctgccagcaggacagttgccaccaggagcaagtgtgtgaggtgatcgcctcttatgcccacctctgtcggaccaacggggtctgcgttgactggaggacacctgatttctgtgctatgtcatgcccaccatctctggtctacaaccactgtgagcatggctgtccccggcactgtgatggcaacgtgagctcctgtggggaccatccctccgaaggctgtttctgccctccagataaagtcatgttggaaggcagctgtgtccctgaagaggcctgcactcagtgcattggtgaggatggagtccagcaccagttcctggaagcctgggtcccggaccaccagccctgtcagatctgcacatgcctcagcgggcggaaggtcaactgcacaacgcagccctgccccacggccaaagctcccacgtgtggcctgtgtgaagtagcccgcctccgccagaatgcagaccagtgctgccccgagtatgagtgtgtgtgtgacccagtgagctgtgacctgcccccagtgcctcactgtgaacgtggcctccagcccacactgaccaaccctggcgagtgcagacccaacttcacctgcgcctgcaggaaggaggagtgcaaaagagtgtccccaccctcctgccccccgcaccgtttgcccacccttcggaagacccagtgctgtgatgagtatgagtgtgcctgcaactgtgtcaactccacagtgagctgtccccttgggtacttggcctcaactgccaccaatgactgtggctgtaccacaaccacctgccttcccgacaaggtgtgtgtccaccgaagcaccatctaccctgtgggccagttctgggaggagggctgcgatgtgtgcacctgcaccgacatggaggatgccgtgatgggcctccgcgtggcccagtgctcccagaagccctgtgaggacagctgtcggtcgggcttcacttacgttctgcatgaaggcgagtgctgtggaaggtgcctgccatctgcctgtgaggtggtgactggctcaccgcggggggactcccagtcttcctggaagagtgtcggctcccagtgggcctccccggagaacccctgcctcatcaatgagtgtgtccgagtgaaggaggaggtctttatacaacaaaggaacgtctcctgcccccagctggaggtccctgtctgcccctcgggctttcagctgagctgtaagacctcagcgtgctgcccaagctgtcgctgtgagcgcatggaggcctgcatgctcaatggcactgtcattgggcccgggaagactgtgatgatcgatgtgtgcacgacctgccgctgcatggtgcaggtgggggtcatctctggattcaagctggagtgcaggaagaccacctgcaacccctgccccctgggttacaaggaagaaaataacacaggtgaatgttgtgggagatgtttgcctacggcttgcaccattcagctaagaggaggacagatcatgacactgaagcgtgatgagacgctccaggatggctgtgatactcacttctgcaaggtcaatgagagaggagagtacttctgggagaagagggtcacaggctgcccaccctttgatgaacacaagtgtctggctgagggaggtaaaattatgaaaattccaggcacctgctgtgacacatgtgaggagcctgagtgcaacgacatcactgccaggctgcagtatgtcaaggtgggaagctgtaagtctgaagtagaggtggatatccactactgccagggcaaatgtgccagcaaagccatgtactccattgacatcaacgatgtgcaggaccagtgctcctgctgctctccgacacggacggagcccatgcaggtggccctgcactgcaccaatggctctgttgtgtaccatgaggttctcaatgccatggagtgcaaatgctcccccaggaagtgcagcaagtgaggctgctgcagctgcatgggtgcctgctgctgcctgccttggcctgatggccaggccagagtgctgccagtcctctgcatgttctgctcttgtgcccttctgagcccacaataaaggctgagctcttatcttgcaaaaggc

SEQ ID NO: 12444 - DNA, 8439 bp, Artificial Sequence
  derived and/or modified sequence
atgatccccgcccgcttcgccggcgtgctgctggccctggccctgatcctgcccggcaccctgtgcgccgagggcacccgcggccgcagcagcaccgcccgctgcagcctgttcggcagcgacttcgtgaacaccttcgacggcagcatgtacagcttcgccggctactgcagctacctgctggccggcggctgccagaagcgcagcttcagcatcatcggcgacttccagaacggcaagcgcgtgagcctgagcgtgtacctgggcgagttcttcgacatccacctgttcgtgaacggcaccgtgacccagggcgaccagcgcgtgagcatgccctacgccagcaagggcctgtacctggagaccgaggccggctactacaagctgagcggcgaggcctacggcttcgtggcccgcatcgacggcagcggcaacttccaggtgctgctgagcgaccgctacttcaacaagacctgcggcctgtgcggcaacttcaacatcttcgccgaggacgacttcatgacccaggagggcaccctgaccagcgacccctacgacttcgccaacagctgggccctgagcagcggcgagcagtggtgcgagcgcgccagcccccccagcagcagctgcaacatcagcagcggcgagatgcagaagggcctgtgggagcagtgccagctgctgaagagcaccagcgtgttcgcccgctgccaccccctggtggaccccgagcccttcgtggccctgtgcgagaagaccctgtgcgagtgcgccggcggcctggagtgcgcctgccccgccctgctggagtacgcccgcacctgcgcccaggagggcatggtgctgtacggctggaccgaccacagcgcctgcagccccgtgtgccccgccggcatggagtaccgccagtgcgtgagcccctgcgcccgcacctgccagagcctgcacatcaacgagatgtgccaggagcgctgcgtggacggctgcagctgccccgagggccagctgctggacgagggcctgtgcgtggagagcaccgagtgcccctgcgtgcacagcggcaagcgctacccccccggcaccagcctgagccgcgactgcaacacctgcatctgccgcaacagccagtggatctgcagcaacgaggagtgccccggcgagtgcctggtgaccggccagagccacttcaagagcttcgacaaccgctacttcaccttcagcggcatctgccagtacctgctggcccgcgactgccaggaccacagcttcagcatcgtgatcgagaccgtgcagtgcgccgacgaccgcgacgccgtgtgcacccgcagcgtgaccgtgcgcctgcccggcctgcacaacagcctggtgaagctgaagcacggcgccggcgtggccatggacggccaggacgtgcagctgcccctgctgaagggcgacctgcgcatccagcacaccgtgaccgccagcgtgcgcctgagctacggcgaggacctgcagatggactgggacggccgcggccgcctgctggtgaagctgagccccgtgtacgccggcaagacctgcggcctgtgcggcaactacaacggcaaccagggcgacgacttcctgacccccagcggcctggccgagccccgcgtggaggacttcggcaacgcctggaagctgcacggcgactgccaggacctgcagaagcagcacagcgacccctgcgccctgaacccccgcatgacccgcttcagcgaggaggcctgcgccgtgctgaccagccccaccttcgaggcctgccaccgcgccgtgagccccctgccctacctgcgcaactgccgctacgacgtgtgcagctgcagcgacggccgcgagtgcctgtgcggcgccctggccagctacgccgccgcctgcgccggccgcggcgtgcgcgtggcctggcgcgagcccggccgctgcgagctgaactgccccaagggccaggtgtacctgcagtgcggcaccccctgcaacctgacctgccgcagcctgagctaccccgacgaggagtgcaacgaggcctgcctggagggctgcttctgcccccccggcctgtacatggacgagcgcggcgactgcgtgcccaaggcccagtgcccctgctactacgacggcgagatcttccagcccgaggacatcttcagcgaccaccacaccatgtgctactgcgaggacggcttcatgcactgcaccatgagcggcgtgcccggcagcctgctgcccgacgccgtgctgagcagccccctgagccaccgcagcaagcgcagcctgagctgccgcccccccatggtgaagctggtgtgccccgccgacaacctgcgcgccgagggcctggagtgcaccaagacctgccagaactacgacctggagtgcatgagcatgggctgcgtgagcggctgcctgtgcccccccggcatggtgcgccacgagaaccgctgcgtggccctggagcgctgcccctgcttccaccagggcaaggagtacgcccccggcgagaccgtgaagatcggctgcaacacctgcgtgtgccaggaccgcaagtggaactgcaccgaccacgtgtgcgacgccacctgcagcaccatcggcatggcccactacctgaccttcgacggcctgaagtacctgttccccggcgagtgccagtacgtgctggtgcaggactactgcggcagcaaccccggcaccttccgcatcctggtgggcaacaagggctgcagccaccccagcgtgaagtgcaagaagcgcgtgaccatcctggtggagggcggcgagatcgagctgttcgacggcgaggtgaacgtgaagcgccccatgaaggacgagacccacttcgaggtggtggagagcggccgctacatcatcctgctgctgggcaaggccctgagcgtggtgtgggaccgccacctgagcatcagcgtggtgctgaagcagacctaccaggagaaggtgtgcggcctgtgcggcaacttcgacggcatccagaacaacgacctgaccagcagcaacctgcaggtggaggaggaccccgtggacttcggcaacagctggaaggtgagcagccagtgcgccgacacccgcaaggtgcccctggacagcagccccgccacctgccacaacaacatcatgaagcagaccatggtggacagcagctgccgcatcctgaccagcgacgtgttccaggactgcaacaagctggtggaccccgagccctacctggacgtgtgcatctacgacacctgcagctgcgagagcatcggcgactgcgcctgcttctgcgacaccatcgccgcctacgcccacgtgtgcgcccagcacggcaaggtggtgacctggcgcaccgccaccctgtgcccccagagctgcgaggagcgcaacctgcgcgagaacggctacgagtgcgagtggcgctacaacagctgcgcccccgcctgccaggtgacctgccagcaccccgagcccctggcctgccccgtgcagtgcgtggagggctgccacgcccactgcccccccggcaagatcctggacgagctgctgcagacctgcgtggaccccgaggactgccccgtgtgcgaggtggccggccgccgcttcgccagcggcaagaaggtgaccctgaaccccagcgaccccgagcactgccagatctgccactgcgacgtggtgaacctgacctgcgaggcctgccaggagcccggcggcctggtggtgccccccaccgacgcccccgtgagccccaccaccctgtacgtggaggacatcagcgagccccccctgcacgacttctactgcagccgcctgctggacctggtgttcctgctggacggcagcagccgcctgagcgaggccgagttcgaggtgctgaaggccttcgtggtggacatgatggagcgcctgcgcatcagccagaagtgggtgcgcgtggccgtggtggagtaccacgacggcagccacgcctacatcggcctgaaggaccgcaagcgccccagcgagctgcgccgcatcgccagccaggtgaagtacgccggcagccaggtggccagcaccagcgaggtgctgaagtacaccctgttccagatcttcagcaagatcgaccgccccgaggccagccgcatcaccctgctgctgatggccagccaggagccccagcgcatgagccgcaacttcgtgcgctacgtgcagggcctgaagaagaagaaggtgatcgtgatccccgtgggcatcggcccccacgccaacctgaagcagatccgcctgatcgagaagcaggcccccgagaacaaggccttcgtgctgagcagcgtggacgagctggagcagcagcgcgacgagatcgtgagctacctgtgcgacctggcccccgaggcccccccccccaccctgccccccgacatggcccaggtgaccgtgggccccggcctgctgggcgtgagcaccctgggccccaagcgcaacagcatggtgctggacgtggccttcgtgctggagggcagcgacaagatcggcgaggccgacttcaaccgcagcaaggagttcatggaggaggtgatccagcgcatggacgtgggccaggacagcatccacgtgaccgtgctgcagtacagctacatggtgaccgtggagtaccccttcagcgaggcccagagcaagggcgacatcctgcagcgcgtgcgcgagatccgctaccagggcggcaaccgcaccaacaccggcctggccctgcgctacctgagcgaccacagcttcctggtgagccagggcgaccgcgagcaggcccccaacctggtgtacatggtgaccggcaaccccgccagcgacgagatcaagcgcctgcccggcgacatccaggtggtgcccatcggcgtgggccccaacgccaacgtgcaggagctggagcgcatcggctggcccaacgcccccatcctgatccaggacttcgagaccctgccccgcgaggcccccgacctggtgctgcagcgctgctgcagcggcgagggcctgcagatccccaccctgagccccgcccccgactgcagccagcccctggacgtgatcctgctgctggacggcagcagcagcttccccgccagctacttcgacgagatgaagagcttcgccaaggccttcatcagcaaggccaacatcggcccccgcctgacccaggtgagcgtgctgcagtacggcagcatcaccaccatcgacgtgccctggaacgtggtgcccgagaaggcccacctgctgagcctggtggacgtgatgcagcgcgagggcggccccagccagatcggcgacgccctgggcttcgccgtgcgctacctgaccagcgagatgcacggcgcccgccccggcgccagcaaggccgtggtgatcctggtgaccgacgtgagcgtggacagcgtggacgccgccgccgacgccgcccgcagcaaccgcgtgaccgtgttccccatcggcatcggcgaccgctacgacgccgcccagctgcgcatcctggccggccccgccggcgacagcaacgtggtgaagctgcagcgcatcgaggacctgcccaccatggtgaccctgggcaacagcttcctgcacaagctgtgcagcggcttcgtgcgcatctgcatggacgaggacggcaacgagaagcgccccggcgacgtgtggaccctgcccgaccagtgccacaccgtgacctgccagcccgacggccagaccctgctgaagagccaccgcgtgaactgcgaccgcggcctgcgccccagctgccccaacagccagagccccgtgaaggtggaggagacctgcggctgccgctggacctgcccctgcgtgtgcaccggcagcagcacccgccacatcgtgaccttcgacggccagaacttcaagctgaccggcagctgcagctacgtgctgttccagaacaaggagcaggacctggaggtgatcctgcacaacggcgcctgcagccccggcgcccgccagggctgcatgaagagcatcgaggtgaagcacagcgccctgagcgtggagctgcacagcgacatggaggtgaccgtgaacggccgcctggtgagcgtgccctacgtgggcggcaacatggaggtgaacgtgtacggcgccatcatgcacgaggtgcgcttcaaccacctgggccacatcttcaccttcaccccccagaacaacgagttccagctgcagctgagccccaagaccttcgccagcaagacctacggcctgtgcggcatctgcgacgagaacggcgccaacgacttcatgctgcgcgacggcaccgtgaccaccgactggaagaccctggtgcaggagtggaccgtgcagcgccccggccagacctgccagcccatcctggaggagcagtgcctggtgcccgacagcagccactgccaggtgctgctgctgcccctgttcgccgagtgccacaaggtgctggcccccgccaccttctacgccatctgccagcaggacagctgccaccaggagcaggtgtgcgaggtgatcgccagctacgcccacctgtgccgcaccaacggcgtgtgcgtggactggcgcacccccgacttctgcgccatgagctgcccccccagcctggtgtacaaccactgcgagcacggctgcccccgccactgcgacggcaacgtgagcagctgcggcgaccaccccagcgagggctgcttctgcccccccgacaaggtgatgctggagggcagctgcgtgcccgaggaggcctgcacccagtgcatcggcgaggacggcgtgcagcaccagttcctggaggcctgggtgcccgaccaccagccctgccagatctgcacctgcctgagcggccgcaaggtgaactgcaccacccagccctgccccaccgccaaggcccccacctgcggcctgtgcgaggtggcccgcctgcgccagaacgccgaccagtgctgccccgagtacgagtgcgtgtgcgaccccgtgagctgcgacctgccccccgtgccccactgcgagcgcggcctgcagcccaccctgaccaaccccggcgagtgccgccccaacttcacctgcgcctgccgcaaggaggagtgcaagcgcgtgagcccccccagctgccccccccaccgcctgcccaccctgcgcaagacccagtgctgcgacgagtacgagtgcgcctgcaactgcgtgaacagcaccgtgagctgccccctgggctacctggccagcaccgccaccaacgactgcggctgcaccaccaccacctgcctgcccgacaaggtgtgcgtgcaccgcagcaccatctaccccgtgggccagttctgggaggagggctgcgacgtgtgcacctgcaccgacatggaggacgccgtgatgggcctgcgcgtggcccagtgcagccagaagccctgcgaggacagctgccgcagcggcttcacctacgtgctgcacgagggcgagtgctgcggccgctgcctgcccagcgcctgcgaggtggtgaccggcagcccccgcggcgacagccagagcagctggaagagcgtgggcagccagtgggccagccccgagaacccctgcctgatcaacgagtgcgtgcgcgtgaaggaggaggtgttcatccagcagcgcaacgtgagctgcccccagctggaggtgcccgtgtgccccagcggcttccagctgagctgcaagaccagcgcctgctgccccagctgccgctgcgagcgcatggaggcctgcatgctgaacggcaccgtgatcggccccggcaagaccgtgatgatcgacgtgtgcaccacctgccgctgcatggtgcaggtgggcgtgatcagcggcttcaagctggagtgccgcaagaccacctgcaacccctgccccctgggctacaaggaggagaacaacaccggcgagtgctgcggccgctgcctgcccaccgcctgcaccatccagctgcgcggcggccagatcatgaccctgaagcgcgacgagaccctgcaggacggctgcgacacccacttctgcaaggtgaacgagcgcggcgagtacttctgggagaagcgcgtgaccggctgcccccccttcgacgagcacaagtgcctggccgagggcggcaagatcatgaagatccccggcacctgctgcgacacctgcgaggagcccgagtgcaacgacatcaccgcccgcctgcagtacgtgaaggtgggcagctgcaagagcgaggtggaggtggacatccactactgccagggcaagtgcgccagcaaggccatgtacagcatcgacatcaacgacgtgcaggaccagtgcagctgctgcagccccacccgcaccgagcccatgcaggtggccctgcactgcaccaacggcagcgtggtgtaccacgaggtgctgaacgccatggagtgcaagtgcagcccccgcaagtgcagcaag

SEQ ID NO: 12445 - DNA, 8439 bp, Artificial Sequence
  derived and/or modified sequence
atgattccggcccggtttgctggcgttcttctagcactggctctgattctgcctggcacattatgtgctgagggcacaagaggacgatcgtccacagcgagatgctctttattcgggtctgattttgtgaacacgtttgatggcagtatgtatagctttgccggatactgtagctatctgctagccggcggatgccaaaaacgctcattttcaattatcggagattttcagaacggaaaacgagtctcgttgtctgtgtatcttggcgaattttttgatattcatctatttgttaacggcaccgtcactcagggagatcaacgtgtgtcaatgccatatgcgtccaaaggtctgtatctggagacggaggcgggatactacaagcttagtggggaagcctacggattcgtagccagaatcgatggaagcgggaatttccaagttttgttatctgaccgatatttcaataaaacgtgcggcctgtgtggaaattttaatatctttgcggaggacgattttatgacgcaagaagggacattgaccagtgatccctatgatttcgcaaattcttgggcgctttcgagcggagaacaatggtgcgaacgcgcctcccctccgtcgagcagttgcaatatcagttcaggtgaaatgcagaagggactttgggaacaatgccagctccttaaatcaacttcggtttttgcgcgctgtcatcctttagtcgatccggagccgtttgtcgctttatgtgagaaaacgctgtgtgagtgcgccggggggttggaatgcgcctgcccagcgctgcttgaatacgcgcgtacgtgtgcacaggaaggtatggttctttatggttggacggaccacagcgcatgctctccggtttgcccggctggtatggagtaccggcagtgcgtaagcccgtgcgcaaggacatgtcaatctcttcatatcaatgaaatgtgccaggaacgttgcgtcgacggttgttcatgtcctgagggccaactgcttgacgaaggactttgcgtagaatctaccgaatgcccgtgtgtccattctggcaaacggtaccctcccggcacatcactgtcaagagattgtaacacatgtatttgtcgtaattcacagtggatttgtagcaacgaagagtgtccaggagaatgcttggttacgggccaatcacatttcaagtcttttgataaccgctatttcactttctcggggatatgccagtatcttctggcgagagattgccaggaccatagcttttcaattgttattgagacggttcagtgtgctgatgatcgtgatgctgtttgcacgagatctgtcactgtgagactcccaggtcttcataacagcttggtcaaattaaaacatggtgctggagtagcaatggacggacaggacgttcagttgccgttgttgaaaggggatttgcgcattcaacatacagttacagcaagcgtgcggttgtcctatggagaagatcttcagatggactgggatggacgggggcgtctgctggtaaaattgtctccggtctacgctggcaaaacgtgcgggctctgcgggaattataatggcaatcagggcgatgattttctaacgccgtcgggcctggctgagccgagagtggaagactttggtaatgcatggaaactccacggcgactgccaagatctgcagaagcaacatagcgacccatgtgcgttaaatccccgcatgacgcgcttctcagaagaagcctgcgcagttctgacaagcccgacattcgaagcgtgtcatcgggccgtcagtccgcttccgtaccttagaaattgcaggtacgatgtgtgctcatgttcagatggtcgcgaatgcctctgtggcgctttagcttcatacgctgcggcatgtgccggaaggggcgttagagttgcgtggcgagaaccaggacgctgtgaactcaactgcccgaaagggcaggtgtacctacagtgtggtaccccgtgcaacttaacatgcagatcgcttagttacccggacgaggagtgtaacgaagcttgcttggagggatgcttttgtccgccaggcctgtatatggacgaacgtggagattgtgtaccaaaagctcaatgtccgtgttactatgacggggagatctttcaaccagaggacatttttagcgaccatcatacgatgtgttactgcgaagatggattcatgcactgtacaatgtcgggagtgccggggtctcttctccctgatgctgttctttcaagcccactgagccatcgttctaaacgatctctgtcttgtcgtccgcctatggtgaaattagtttgcccggcggataatttgagagcagaaggcttggaatgtactaaaacatgccaaaattatgatcttgaatgcatgtctatgggttgcgtgagtgggtgtctgtgcccaccgggcatggtccgtcatgagaacagatgcgtagcgttagaacgctgcccatgtttccatcagggaaaagaatacgcccctggcgaaacagtgaagattggatgcaatacctgtgtttgccaggatcgcaagtggaactgtacggatcatgtctgtgacgctacttgtagcacaattggaatggcacattacctgacttttgacggacttaaatatctgttcccgggcgaatgtcaatatgtacttgtacaagattattgtggctcaaatccgggcacatttagaatcctagttggtaataaaggatgctcccacccgagtgtaaaatgcaaaaaaagagtcactatcttggtcgaagggggagaaatcgaattatttgatggtgaggtgaacgttaaacggccgatgaaagatgaaacacatttcgaagttgttgagagcggcagatacatcattctccttctgggcaaggcactgtctgtggtttgggataggcatctatctatcagcgtcgttcttaagcagacgtatcaagaaaaggtctgcggtttatgcggcaattttgatggaatccagaacaatgacctgacctcaagcaacctgcaggttgaagaggatccggttgatttcgggaactcgtggaaagtttctagccaatgcgctgacacaagaaaagtacctctggattcgtcaccggctacctgtcataataacattatgaagcagactatggttgattcgtcgtgccgaattcttacatcagacgtctttcaggattgtaacaagcttgtagatccggaaccttacctcgatgtatgcatttatgatacatgctcatgtgaatctattggtgattgtgcttgcttttgcgatacgattgcggcctacgcgcatgtctgtgcccaacatggcaaggtagttacatggagaacagctacactgtgtccacaatcatgcgaagaaagaaaccttcgagagaatggttacgaatgcgaatggaggtataatagctgtgccccggcatgccaggtcacatgccaacacccagaaccgcttgcatgtcctgtgcaatgcgtcgaaggctgccatgcgcattgtccgcctggaaaaatcctggacgaacttttacaaacatgcgtcgacccggaagattgccccgtttgtgaagttgcgggccgccggtttgcgagcggcaaaaaagtcacattgaacccgtcagatcctgagcattgtcagatctgtcattgtgacgtggttaatttaacttgtgaggcttgccaggaaccaggcgggcttgttgtcccccctaccgatgcgcctgtaagcccgacaacactttatgtagaagacatttccgaacctccacttcacgatttctactgctcccggctgctagatttagtatttttactagatggatcatctagactctctgaggcggagtttgaagtcctgaaggcgtttgttgtagacatgatggagcgtcttcggataagccaaaaatgggttcgggtggctgtagtcgaatatcatgatggctctcatgcctatatcggcctgaaagaccgcaaaagaccatccgagctgcggcgaatcgcatctcaggttaaatatgcgggctcccaagtcgcgtccacgtcggaggtgctgaagtatacgctttttcagattttttccaaaatagatcggccggaggcaagtcggatcacacttcttctgatggcctcacaagagcctcaaagaatgagtcgtaattttgtgcgatatgttcaaggcttgaaaaaaaaaaaggtaatcgttattccagtgggcatcggacctcatgcgaatcttaagcagatccggctgatcgaaaaacaagctcctgaaaataaagccttcgttttgagctctgtggacgaacttgaacaacagcgtgacgaaattgtcagctatctttgcgatctcgctccggaggcaccgcctccgacgcttccgccggatatggctcaagtgacagttgggccaggacttttaggagtcagtacactgggtcccaaacggaattctatggtcctagatgtggccttcgtactggaaggatcggataagattggagaggcggattttaatcgctcaaaagaatttatggaggaggtgatccagcgaatggacgtcggccaagattccatacatgtaacggtattgcaatattcttatatggttactgttgagtatccttttagtgaggctcagtcaaagggcgacatcttgcagcgggttcgggaaattcgataccaagggggtaatagaacgaacacgggactcgctctgcgctatttaagcgaccattcattcctggtgtcccagggggatcgtgaacaagcaccgaacttggtatatatggtgactggaaatccggcatcagatgagatcaaacgcctgccgggcgatatccaagtagtacctatcggtgtcggacccaacgccaacgtgcaggaattggaacgtattggttggcctaacgcgccgatattgatccaggactttgagactctccctagggaggcgccggaccttgtgctccagagatgttgcagcggagaaggacttcaaataccgacacttagtcccgcaccagactgttcacagccgttagacgtcattctgcttcttgatggctcctcttcttttcctgctagctatttcgatgagatgaagtctttcgctaaagcgtttatctctaaagcaaacattggccctcggttaacacaggtttcggtcttacagtatggaagtattacgactatcgatgtcccctggaatgtggtgcctgagaaagcgcacttattgtcactggtggatgttatgcagcgcgaaggcggaccgagccagattggcgatgcacttggctttgccgtgagatacctgaccagcgaaatgcatggagcgaggccaggagcatcaaaggcagtcgttatccttgtaacagacgtgtccgtagattcagtggatgccgcggccgatgccgctaggagcaatagagtaaccgtcttcccaatcggcatcggcgatcgttatgacgccgcccaattacgcattcttgcaggcccggcgggtgattcaaatgttgtcaaattgcagcggatcgaagaccttccgactatggtcacacttggcaactcatttttacacaagctttgctccggctttgtcaggatttgcatggatgaagatggtaacgaaaaacgtcctggtgacgtatggacgctcccggatcagtgccatacagtgacgtgccaacccgatggccagacactgttgaaaagccaccgcgttaactgcgaccgtggactgcgacctagctgcccgaactctcaatctcctgtcaaggtggaggagacatgtggatgcaggtggacttgtccttgcgtgtgtaccggatccagcacacgccacatcgtgacttttgacggacaaaatttcaaacttaccggttcttgctcttacgtcttgtttcaaaacaaagaacaagatctcgaagtaattctccataatggcgcttgctctccgggtgcgaggcaaggatgtatgaagagcatcgaagtaaaacattccgcgctgtcggttgaacttcactcagatatggaagtcacagtgaatggaagactggtaagcgtgccttacgtcgggggaaatatggaggttaatgtatatggggctattatgcatgaagtgcgctttaaccacctgggtcacatttttacgttcacaccgcaaaacaacgaatttcagcttcaactctctcctaagacatttgcctcgaaaacttatggcctttgtggtatctgcgatgaaaatggcgcgaacgattttatgttgagagacggtactgtcactacggattggaaaacccttgttcaggagtggacggtccagaggccaggacaaacgtgtcagcctattctggaagaacagtgcttagtacctgatagctcacactgccaggttcttttattaccgttgttcgcggagtgtcataaagttttggctccggctacattttatgctatttgccagcaggattcatgccaccaggaacaggtctgtgaagttattgccagctatgcacacttatgtagaaccaacggcgtttgcgtggattggcgtacaccggatttttgcgccatgagctgtccgccttcccttgtctataaccattgtgaacatggctgtcctagacactgcgatggtaacgtttcgtcttgtggggatcaccctagcgaaggatgcttctgtccgcctgataaagtgatgttagaaggatcatgcgttccggaggaagcctgcacacaatgtattggagaagacggagtccagcatcaattccttgaagcctgggttccagaccaccagccgtgccaaatttgtacgtgtctgagtggccgaaaagttaattgcacaacccagccttgcccaacagccaaggctccgacttgcggactgtgtgaagtcgctcgcctgagacagaatgcagatcagtgttgccccgaatatgaatgtgtttgcgacccggtctcgtgcgaccttccgccggtcccgcactgtgaaagaggtttacagccgacgctgacgaacccgggagaatgtagaccgaactttacatgtgcatgccgcaaagaggaatgcaaaagagtaagcccgccgtcctgccctccgcaccgcttacccacacttagaaagacgcagtgttgcgatgagtacgagtgcgcgtgcaattgtgttaactctactgtgagctgccccttaggctacctggcatcgacagctactaatgactgcggctgtacaactactacatgtctgccggacaaagtttgcgttcacagaagcactatctatcccgtcgggcagttttgggaagagggatgtgatgtctgcacttgcacggatatggaagatgctgttatgggactgcgcgtcgcgcaatgtagtcagaagccttgcgaagattcatgtaggtcagggtttacatatgtcctgcatgaaggggagtgttgtgggcgttgtctgccgtctgcgtgtgaagtcgttacaggatcaccgcgcggggattcccagagttcctggaagagcgtaggctctcaatgggcgtcaccggagaacccatgcctaatcaatgaatgcgttagagtaaaggaagaagtctttatccaacagcgcaacgtctcgtgtccacagttagaggttccagtatgccccagcgggtttcaactttcatgtaagacatcggcttgttgtccttcttgtcgctgcgaacgtatggaggcatgtatgttgaatggaacagttatcggaccgggcaaaacagttatgattgatgtttgtacgacatgtaggtgcatggtccaagtcggcgtgatctctggttttaagttggaatgtcgtaagacgacatgtaacccgtgcccgttgggctataaagaagaaaacaatacaggcgagtgttgcggaagatgtttacccacggcatgcaccatccagttacgtgggggccaaataatgacacttaaacgcgatgagaccttgcaagatggctgcgatacacacttttgcaaagtcaacgaaagaggggagtacttttgggaaaaaagggttaccggatgcccgccgtttgacgaacacaaatgcctggcagaaggtggcaaaattatgaaaataccgggcacttgctgtgatacatgcgaagaaccggaatgcaacgatattacggcacgactgcaatatgtgaaagtcggctcgtgcaaatcagaagttgaggttgatatccattattgtcaaggtaaatgcgcgtctaaagccatgtacagtatagatattaatgacgttcaggaccagtgctcgtgctgctcgccaacccgtacagaaccgatgcaagtcgcattacattgcaccaacggctcagtagtttaccatgaggtcttgaacgcaatggaatgcaaatgttccccgcgcaaatgctctaaa

SEQ ID NO: 12446 - DNA, 8439 bp, Artificial Sequence
  derived and/or modified sequence
atgattccggcaaggttcgccggagttctgctggctctggctctcatcctccccgggactctgtgcgcagagggcactagaggcagatctagcaccgccagatgttcattgttcgggtctgacttcgtcaacacctttgacggcagcatgtactcatttgcaggatattgttcttacctgcttgcgggagggtgtcaaaagcgctcctttagcatcataggcgacttccaaaacgggaagagggtgtcactgagcgtatacctgggcgaattctttgatatccatctctttgtcaatggcacagtaacccagggcgatcagagagtttcaatgccctacgcttctaagggtctctatctggaaaccgaagccgggtactataagttgagtggggaggcgtacgggtttgtggctagaattgacggcagcggaaatttccaggtgctgctgagcgatagatacttcaataaaacctgcggattgtgcggcaattttaatatcttcgctgaggatgatttcatgacccaggagggtaccctaactagtgacccgtatgattttgccaattcatgggctctcagctctggtgagcagtggtgcgaaagggcctctcccccgtcgtcttcttgtaacatctcgtcgggggagatgcaaaagggcctttgggagcagtgtcaactgcttaaaagtacaagcgtgtttgccagatgccacccacttgtggatcctgagcctttcgttgccctctgtgagaagaccttatgtgagtgcgctggaggacttgagtgcgcatgccccgctctcctcgagtacgcccggacctgtgctcaggaaggaatggtgctgtacggttggaccgatcactcagcctgttcccccgtgtgtcccgcgggtatggagtatcgtcagtgtgtatcaccttgtgctagaacatgtcagtcactgcacattaacgagatgtgccaggagcggtgcgtggatggttgttcatgtcccgaggggcagctgctggatgaaggcctctgtgtggagtctacagagtgcccatgtgtgcactccggtaagaggtatccccccggaacctcgcttagtcgcgattgtaacacttgtatatgcagaaactcacagtggatttgttccaacgaggagtgcccaggagaatgcttggtcaccgggcaaagccattttaagtctttcgacaatcgatacttcacattcagcggtatctgccagtatctcctggctagggactgtcaggaccattccttctccatcgtgatcgaaacagtgcagtgcgcagatgatcgggatgctgtctgcaccagatcagttacagtgaggttaccagggttgcacaactcactggtgaaattgaagcatggagccggagtagctatggacgggcaggatgtgcaactgccattgctaaagggagacctgcgaattcaacatactgtgaccgctagtgtaaggctgtcttacggtgaagatctccagatggattgggatgggagagggagactgttggtgaagctctcgccagtctacgccggaaagacctgcgggctttgcggtaattacaatggcaaccagggagatgattttctgactccatctggtctcgccgagcccagggtggaagacttcggtaatgcatggaaacttcatggagactgtcaggacctccaaaaacagcattcagatccgtgcgcactaaatcctaggatgactcggttttccgaggaggcttgcgctgtgttaacatctcccactttcgaggcgtgccatcgcgcagtgtccccgttgccctatctgaggaactgtcgatatgacgtctgttcctgctcggacggaagagagtgcctgtgcggtgcacttgcttcctacgccgctgcctgcgccggccgtggcgtcagggtggcttggcgggaacccggaaggtgcgaactgaactgtcccaaggggcaggtgtatctccagtgcggtacaccatgcaacctgacctgtcgctctctttcctacccagacgaagaatgtaacgaagcctgcctggagggctgtttttgcccacctgggctgtacatggatgagcgcggcgattgtgtcccaaaggcgcagtgtccctgttactatgacggagagatctttcagccagaggacatttttagcgaccaccacacaatgtgctactgcgaggacggtttcatgcactgtaccatgtctggagtaccaggatccctgttgcccgatgccgtgctgagcagtccactgtcgcaccgttcaaaacgcagtctttcctgtagacctccgatggtgaagctggtgtgccccgcagataatttaagagctgagggcttagaatgtacgaaaacctgccagaactatgatctggaatgtatgagcatgggttgtgtcagtgggtgcctgtgcccgcccggcatggtgcgacatgaaaatcgatgtgtcgccctagagcggtgcccttgcttccatcagggaaaggagtacgcacccggggagactgttaagatagggtgcaatacttgtgtgtgtcaggaccgaaagtggaattgcaccgaccacgtttgcgacgctacctgttccactataggcatggcacattacttgaccttcgacggccttaagtatctcttccccggcgagtgtcagtacgttctcgttcaggactactgcgggtctaatcctggaaccttcagaattttagtaggcaacaaggggtgttcacacccatccgtcaagtgcaagaaaagagtaacaatactggttgagggaggagagattgagctgttcgacggggaagtgaacgtaaagcgtcccatgaaggacgaaactcacttcgaggtggtagagtccgggagatatatcattcttctcctaggtaaagccctgtccgtggtctgggacaggcatctctctatcagtgtggtgttaaagcagacttatcaagaaaaggtgtgcgggctgtgtgggaactttgatgggattcagaacaatgacctgacaagctcaaatttgcaggttgaggaggatcccgttgattttggcaattcatggaaagtgtctagccagtgtgctgatacaaggaaagtcccacttgacagctccccagcaacctgccacaacaatattatgaaacagactatggttgacagcagttgcaggatcctcacatctgatgtgtttcaggattgtaataaactggtggatccagagccgtatctagatgtctgtatttacgacacatgctcgtgtgagtcaataggcgattgcgcatgtttctgtgacaccatagcagcttacgcccacgtgtgcgcgcaacacggtaaggtggtgacgtggaggacggcaacattatgtccccagtcatgtgaagagaggaatttgcgcgaaaacgggtatgaatgcgagtggcgttacaacagttgtgctccagcatgtcaggtgacttgtcagcaccctgagccactggcttgtcccgtgcaatgtgtggaaggctgtcatgcccactgcccacctgggaaaattcttgacgagctgctgcagacctgtgtggaccccgaggactgccctgtgtgtgaagtggccggtcggaggttcgcgtcaggaaaaaaggtgacattgaaccccagtgatcccgagcactgtcagatctgtcactgtgacgtggtgaatctcacttgcgaagcctgtcaagagccaggaggcctagtcgtcccgcccaccgacgctccagtgtctccaactactctttacgtagaagatatctccgaacccccactccatgatttttattgctcacgcctcctcgatctcgtgtttttactggacgggtccagccgactgtcagaagccgagtttgaagttctgaaggcgttcgtggtcgatatgatggaaagacttcgcatatcacagaaatgggttcgcgtggcagttgtggagtaccatgatgggtcccatgcctacataggccttaaggatagaaagcgcccatcagaactcaggcgtattgcctctcaggtaaagtatgccggctcccaggtggcctctacctctgaggtcctgaaatacacactttttcagattttctccaagattgataggcccgaggcatcccggatcaccctgctgttgatggcttcacaggagccgcagaggatgagtaggaacttcgttcgatatgtacagggcctgaaaaagaaaaaggtgatcgtcattccagtgggaataggcccccacgcaaatttaaagcagatccggctgattgagaaacaggctccagagaataaggcgtttgtactatcttctgtggatgagctagaacagcaacgagatgagatcgtctcgtatctgtgcgaccttgcgcctgaagcccccccccctaccctgcccccagatatggcccaggtaaccgtggggccaggcttactgggggtgtcaactcttggtccgaagaggaactctatggtcttggatgtggccttcgtgctcgagggatcagacaaaattggtgaggcggactttaaccggtccaaggaatttatggaggaagtgatccaaaggatggatgtcggccaggactccattcatgttaccgttttacaatactcctacatggtcacagtggagtacccttttagcgaagcccagtctaaaggcgatatcttgcagagggtgagagagatcagatatcagggcggaaatcggaccaatactgggctggccttgcgttatctttctgatcattcatttctcgtgagccagggcgatcgtgagcaggcacctaatctagtgtatatggttacaggaaatcccgcatccgacgagattaagaggttgccgggagatatccaagtcgtccccatcggcgtggggcccaacgccaatgtgcaggaactggagcggatcggctggcccaatgcgccgatcctcattcaggatttcgagactcttccccgggaagctcccgatctggttttgcagcgttgctgcagcggggaaggcctgcagatccctacgctgtctcctgcgcctgactgttcccagcccctcgatgtgattttattattggacggctccagcagttttccagcaagctactttgacgaaatgaagtctttcgctaaagcctttatctctaaggccaatatcggcccacgcctcacccaggtcagtgtactccagtacgggagcatcactacgatcgatgtgccatggaacgttgtaccagagaaggcacatctcctgagcttggtggatgtgatgcagagggagggggggccgagccagataggggacgcactgggattcgctgtcagatacctgacaagcgaaatgcatggtgctcggccgggagctagcaaggccgtcgtaattctggtcacggacgtctcagtggacagcgtggatgccgctgcggatgccgcacggagcaaccgggtgaccgtgtttccaattggcatcggtgaccgatacgacgccgcacagttgcggattctcgctgggccggctggcgactccaatgtcgtgaagttacagcgcattgaagatctgcccacaatggtaactttgggtaattcgttcttgcacaaactgtgtagtgggtttgtgaggatctgcatggatgaggacggcaatgaaaagcgccccggcgacgtctggaccctccccgaccagtgccatacggtaacctgtcagccagatggccagacactgctgaaatcccaccgggtaaattgtgatcggggactccgcccctcgtgtcctaatagccagagcccggtcaaggtcgaagaaacatgtgggtgcagatggacctgcccatgcgtgtgcaccggtagctctaccagacacatcgttacatttgatggccagaattttaaactaactgggtcatgctcctatgtgctgtttcagaataaggagcaagaccttgaggtgatcctgcacaatggggcgtgctcacctggcgcccgacaggggtgcatgaaatccatcgaagtgaagcattcagctctctccgtagagttgcacagcgacatggaggtgaccgtcaacggtagacttgtgtccgtcccctatgttggtggcaacatggaggtgaatgtttatggcgctattatgcacgaggtgcggttcaatcacttgggtcacatattcacattcactccccagaacaacgaatttcaactccaattgagccctaagacatttgcttctaagacgtatggcttatgtggaatttgtgacgagaacggggcaaatgacttcatgctgagagacggcacggtgactacagattggaaaactttagttcaggagtggaccgtgcagcgacccggccagacttgtcagcccatcctagaagagcagtgcctagtgccggactcaagccattgtcaagtcctgttactgcccttgttcgccgaatgccacaaagtactggcgcctgcgacattttatgccatttgccagcaggattcctgccatcaggagcaggtttgcgaggttatcgcatcatatgcgcacctttgcagaactaacggcgtgtgtgtggactggcgtacacctgacttctgcgctatgtcctgtccacctagcctcgtgtataatcattgcgagcatgggtgcccccggcactgtgatggaaacgtttcttcctgtggggaccatccatcagaaggttgtttttgcccccccgacaaggtcatgttggaggggtcctgcgtccctgaagaggcatgtactcaatgtataggagaagatggcgttcagcatcagtttttggaggcgtgggttcccgaccatcaaccttgccaaatctgtacctgcttgagcgggcgcaaggtgaattgtacgacgcagccctgcccaacagcaaaagcccctacttgtggcctgtgtgaagtggccaggctacggcagaacgccgatcagtgctgcccggaatatgagtgcgtttgcgacccagtttcatgcgacttaccgcccgtgcctcattgtgaacgtggtctacaaccaactttgactaatcccggagagtgcagaccgaattttacctgcgcatgccggaaggaagaatgtaaacgggtttcaccacccagctgtccgccccacaggctgcccaccctgcggaagacacagtgttgcgatgaatatgagtgtgcctgtaattgtgttaattccacagtgagttgtcctctcggctatctggcgagtacggccacaaacgactgtggatgcacaactactacatgtcttccggacaaagtgtgtgtgcacagatccacgatctaccctgtcggccagttctgggaggagggctgcgacgtgtgtacctgcaccgatatggaggacgccgtaatgggcctgcgcgtggcccaatgctcccagaagccgtgcgaagatagctgtcgatcaggctttacttacgttctgcacgaaggcgagtgctgcggtcgatgcctgccaagcgcatgtgaggtagtcacaggctctccacgaggtgacagccagtcatcatggaagtcagtcgggagtcagtgggcctcaccagagaacccatgcctgatcaatgagtgtgtaagggtgaaagaggaagtgttcattcagcagcggaacgtttcttgtcctcagctagaggtgccagtctgtcctagcgggtttcagctgagctgcaaaaccagcgcctgttgtccttcgtgtagatgcgagagaatggaagcatgtatgctgaatggcactgtcatcggcccggggaagaccgtgatgattgacgtgtgtaccacttgccgctgtatggtgcaggtgggcgtaattagtgggtttaaactggagtgtcggaaaaccacatgtaatccgtgtccactgggctacaaagaggaaaacaatactggtgagtgttgtggaaggtgcttaccaacagcctgcacgattcagttacgtggcggccaaatcatgacacttaagagagacgagaccctgcaggatgggtgcgacacccacttctgcaaagtcaatgagcggggtgagtacttctgggagaaacgcgtcaccggttgccccccatttgacgagcacaaatgcctagctgaaggcggaaaaatcatgaagatacctggaacctgttgcgatacctgcgaggagcctgaatgcaacgacattacggccaggctgcaatatgtgaaggtgggttcctgcaagtccgaagtggaggtggacatccattattgccagggcaagtgcgcctcgaaggccatgtactcgattgatattaatgacgtgcaggatcagtgctcctgctgctcgcctaccagaacggaacctatgcaagtggctctgcactgtactaatggatccgtggtgtaccacgaggtcctgaacgcaatggagtgcaagtgctccccacgcaagtgtagcaag

SEQ ID NO: 12447 - DNA, 8439 bp, Artificial Sequence
  derived and/or modified sequence
atgattcctgcacggtttgctggagtgctactagcattagcactcattttgccggggaccctttgtgctgaagggacacgcggccggtcttctacagccaggtgctcgctgtttggctcagatttcgttaacacctttgacggaagcatgtactcattcgccggatactgctcctatctcctcgcagggggctgccagaagaggtctttcagcattattggggatttccagaacggcaagcgtgtgagcctgtcagtgtatctcggtgagttcttcgacattcatctattcgttaatgggaccgtgacacagggggaccagcgggtatccatgccctacgcatccaagggcctctacctggaaacagaggcaggctactataaactgagcggggaagcatatggattcgtggctcgtattgacggctctggcaattttcaagtgttgctgtccgatcggtattttaacaaaacgtgcgggctttgtgggaacttcaacatcttcgctgaggatgattttatgactcaggagggcaccctgacttccgacccctatgattttgcaaactcatgggctctctcctctggagagcagtggtgtgaaagagccagccccccgtcaagtagctgtaatattagtagtggcgaaatgcagaagggtctatgggagcagtgccagcttctcaaatccacaagtgtgttcgcccgctgccacccacttgtcgaccctgagccttttgtggctctctgcgagaaaacactctgcgagtgtgcagggggcctagagtgtgcctgtccggccttgctggagtacgctaggacctgcgcgcaggagggtatggtgttatatggctggacagatcatagcgcatgttcccccgtgtgtcctgctggcatggagtatcgtcagtgtgtttcaccctgcgcaagaacgtgccagtccctccacattaatgagatgtgccaagagcggtgcgttgatggctgctcctgtcccgaggggcaactgcttgatgagggcctttgtgtggaatccaccgagtgcccatgcgtgcactcgggaaaacgatatcccccgggcacgagccttagccgcgactgcaatacatgcatttgccgtaactcacaatggatctgctcaaatgaggaatgccccggggagtgtttggtaactggccagtcacattttaagagttttgacaaccggtacttcactttctctggaatctgtcagtatttgctggccagagactgtcaggaccactccttcagtattgtgatcgagacagtgcagtgcgctgatgatcgtgacgccgtatgcacccgatctgtcaccgtccgactgcccggccttcacaattcgctggtgaaattaaaacacggggcaggcgtcgccatggacgggcaggatgtacaactgcccctgctcaagggggacttacgaattcagcacaccgtgaccgcctctgtacggctaagctacggcgaggacctgcagatggactgggacggccgtggacggctcctggtgaaactgagcccggtgtatgctgggaaaacctgtgggctctgcgggaattataatggcaaccagggggatgatttcttgacaccttcaggcctcgctgagccacgggttgaagactttgggaatgcctggaagttgcacggtgactgccaggatttacagaaacagcactccgatccctgcgctttgaaccctagaatgactaggttctcagaagaagcatgcgcagtcctgacctcacccacattcgaagcctgccacagggccgtgtctccacttccataccttcgaaattgcaggtatgacgtttgctcttgcagcgacgggcgggaatgcctgtgtggtgcattggcgtcatatgccgctgcgtgtgcagggcgcggcgtgcgggttgcctggagagagccagggagatgtgagctgaattgtccaaaggggcaggtgtatttgcagtgtggcactccgtgcaatctcacatgtcgcagcttatcttaccccgatgaggagtgcaacgaggcttgcttggaaggatgtttctgcccacctggtctgtacatggacgaacggggggactgcgtacccaaggctcagtgtccttgctattatgatggtgagatctttcaaccagaggatatattctcagaccatcacacaatgtgctattgtgaggacgggtttatgcactgtacgatgtcgggtgtgcccggatctcttttgcccgatgctgttctttcttctcctctgtcccatcgttccaagagaagcttaagctgccggccaccaatggttaagctcgtgtgtcctgcggacaacttacgggcggaggggctagaatgcacaaaaacatgccaaaactacgacctggagtgcatgagtatgggctgcgtgtctggatgcttgtgtccccctgggatggtgaggcatgagaacagatgcgttgcgctcgagaggtgtccctgtttccatcaaggcaaggagtacgctcccggcgaaacagtcaagatagggtgcaacacgtgcgtgtgtcaggaccggaaatggaattgtactgaccatgtttgtgatgccacatgtagcacgatcggtatggctcactatctgactttcgatgggctcaagtatctctttccgggtgagtgtcagtacgtcttggtgcaggactactgcggctccaacccagggaccttccggattcttgttggtaacaagggttgcagccacccatccgtaaaatgcaagaaaagggtaaccatcctagtggaaggtggggaaatagaactgtttgacggtgaagtaaacgtcaagagacctatgaaggatgaaacccacttcgaagttgtggagagtggcaggtatattattctcttgttaggaaaagccctatctgttgtgtgggacaggcatctctccatatctgtggtgctgaagcagacctatcaggagaaggtctgcggcctctgcgggaattttgatggtatccagaacaacgacctgacctcatccaatttgcaggtggaagaggatcccgtggatttcgggaactcctggaaggtttcgtcccagtgtgccgacacacgaaaggtaccactcgatagtagtcccgccacctgtcacaacaacattatgaaacagaccatggttgatagcagctgcagaattttgacgagcgatgtttttcaagactgtaataagttggtggaccccgagccctacttagacgtatgtatctacgacacctgcagttgcgagtccatcggcgactgcgcctgtttctgcgacaccattgctgcatatgcccacgtgtgcgctcagcatggaaaagtggtgacatggcgaactgccacactctgtcctcagagctgtgaggaacggaacctcagggaaaacgggtatgagtgcgagtggagatacaacagctgtgcacctgcatgtcaggtcacttgccagcacccggagcctctcgcctgtccggtccagtgcgtggagggctgtcatgcccattgcccaccaggtaagatcttggacgaactgctgcagacctgtgtggacccagaagactgccctgtgtgtgaagtggccggcaggagattcgcctctggcaagaaagtcactctaaacccttccgaccctgaacactgccagatttgccactgtgatgttgtgaatcttacgtgcgaggcatgtcaggaaccgggcggacttgtcgttcctccgacagacgcccctgtgagcccaaccacattatacgtggaagatatttcggagcctccattacacgatttttattgttctcgactattagaccttgtctttcttctggatggatccagccgcttatctgaagcggagttcgaagtcctgaaggcattcgtggtggatatgatggaaaggcttaggatctctcagaaatgggttcgagtggccgtagtcgaatatcacgacgggagccacgcttacattggattgaaagaccgcaagcgcccatctgagctgagacgaatcgccagccaggtgaaatatgctggatctcaggtagcatccacctctgaagtcttgaagtatacactctttcaaatcttctctaaaatcgaccgcccagaggcatctagaattacgctcctcctgatggctagtcaggagccgcagcgaatgtccagaaatttcgtgaggtacgtacagggcctgaagaaaaagaaggtaattgtgattcccgtgggtatcggtcctcacgccaatttgaagcaaattcggcttatagagaagcaggcaccggagaataaagcgtttgtgctgagcagcgtggatgagcttgagcagcagcgggacgaaattgtcagctatttatgcgacctcgccccagaggctccacctccgaccctaccccccgacatggcccaggttacagttgggccaggtctactgggagtgtcaacgctggggcctaagcgtaattcgatggttttggacgtggcttttgttttagagggtagtgacaaaatcggagaggcagatttcaaccgctctaaggaattcatggaggaagttatacagaggatggacgtgggccaggactccatacacgtgaccgtgctacagtatagctacatggttactgtggagtaccccttttccgaagcgcagagtaagggcgatattctccagcgcgtcagagaaatcagataccagggtgggaataggacaaatacaggattagctcttcgctatctgtctgatcactctttcctggtcagccaaggcgacagagaacaggcgccaaatctcgtctacatggtgacaggaaacccagcttctgacgaaattaagagactgccaggggacatccaggttgtaccgatcggggtgggacctaacgctaacgtccaggagttagagcgaataggatggccaaatgctcccatattgatccaggatttcgaaacactgccacgagaggcccctgatctggtactacaaaggtgctgttctggggagggcctgcagatcccaacgctgagtcccgctcctgattgcagtcagcccctcgatgttatcttgttgttggacggctcgagcagtttccccgcgtcctattttgacgaaatgaagtcattcgccaaggcgttcatctccaaggcgaatatagggccacgtctgactcaggtgtcagtgctacagtacgggtcaatcacgaccatagacgtgccctggaatgtcgttcctgagaaggctcatctgctttccctagttgacgtgatgcagcgagagggaggtccaagtcagatcggtgatgctctgggcttcgccgtcaggtatctgactagtgagatgcacggggcaaggccaggggcaagtaaggccgtggtgatcctggtgacagatgtttcagtcgactccgtagatgccgcggccgacgccgctagatctaatagggtgactgtctttcctatagggattggggaccggtatgacgccgcccagctgaggatcctagcaggtccagcaggcgattcgaatgtcgtaaagttgcagagaattgaggacttgcccacaatggttactctggggaactctttccttcacaagctctgctctggctttgtcaggatctgtatggacgaggatgggaacgaaaagaggccaggcgacgtgtggactttacccgatcagtgtcataccgtgacttgtcagccagacggacaaacgctcctgaaatcccaccgagtcaactgtgacaggggactgcgcccaagctgccccaatagccagtcccccgttaaagtcgaagaaacctgcgggtgtcgctggacctgtccatgtgtctgcactggaagctctacacggcacatcgtcaccttcgacggccaaaattttaagcttacaggaagctgttcctacgttctgttccagaataaagagcaggatctggaggtgattctgcataatggagcttgttctccaggtgctaggcaaggatgcatgaaatccattgaggttaaacactcagctctttccgtggagctgcattcggatatggaggtaaccgtgaatggccgtctagtgtccgtgccctacgtaggagggaacatggaggttaatgtgtacggggccattatgcatgaagttaggtttaatcacctgggtcacatcttcactttcacccctcagaacaacgagttccagctccagctgagtcctaaaacttttgcctccaagacttacggattgtgcggaatctgtgacgagaacggtgccaacgattttatgctgcgggatgggactgtgaccacagattggaaaacccttgttcaagagtggacagttcaacgtccagggcaaacgtgccagccaatcctggaggagcagtgtctcgtccctgattcatcccactgccaggtcctgctgttgcccctgtttgctgaatgccacaaagtgctggctccagcaactttctacgccatctgccagcaggatagctgccatcaggagcaggtatgcgaggttatcgctagctatgcccatctctgccgcactaacggcgtgtgcgtggattggcgcacacccgacttctgcgccatgtcatgccccccctctctggtatataatcattgtgagcacggttgccctcggcattgcgatggcaacgtgtctagttgcggggaccacccatctgagggctgcttttgcccacccgacaaggtgatgctggagggaagttgcgttcctgaggaggcttgcacccagtgcatcggggaagatggcgtccagcatcagtttttggaagcatgggttcctgaccatcagccatgccagatctgtacatgcctctctggtagaaaggtgaactgtaccactcagccctgtcccacagccaaggctcccacctgtggattatgcgaggttgctagactgcgccagaatgccgaccaatgctgccccgaatacgagtgcgtgtgtgatcccgtatcatgtgatttacccccagtccctcactgcgagcggggactgcaaccgactctgacaaacccgggcgaatgtcgcccaaacttcacatgtgcctgtaggaaggaagagtgcaagagagtgagtccgcctagctgtcccccccaccggctgcctacacttagaaaaacacagtgttgcgacgagtacgagtgtgcctgtaactgcgtaaactctactgtgagctgtccgctgggctacttggcttcgacagctacaaacgactgtggctgtaccaccaccacttgcttgccggacaaagtgtgcgtccatcggagcacaatataccccgtcggacaattctgggaggaaggttgcgacgtgtgcacctgtactgatatggaggatgctgtcatgggcctgcgagttgcccaatgtagtcaaaagccctgcgaggattcctgcagaagtggcttcacatacgtgcttcacgagggcgagtgctgtggccgttgcctgcccagcgcttgcgaagtcgtaaccggaagccctagaggggactctcagtccagctggaagtcagtgggctcacagtgggcctctcctgaaaatccatgtttgattaacgaatgtgttagggtcaaggaggaggtgtttattcagcagaggaatgtgtcttgtccgcagctcgaggtgccagtttgcccctccggttttcaattgagttgcaagactagcgcgtgctgcccatcctgcagatgcgagcgcatggaggcttgcatgctgaatggcacagtcattggccctggaaagactgttatgatcgacgtttgtacaacctgccggtgtatggtacaagtgggggtaatctctggtttcaagcttgagtgtcgcaagactacatgtaatccttgtccgctggggtacaaagaggagaataatacaggagagtgttgcggccgatgtctacccaccgcctgcaccatccagctaaggggtggccaaattatgactcttaaaagggatgagactctacaagatgggtgcgatacacatttttgtaaggttaatgaacgaggagaatacttttgggagaagagggttaccggctgccccccgttcgacgaacacaaatgtctggcagaggggggtaaaatcatgaagatcccgggcacctgctgcgacacctgtgaagaaccagagtgcaacgacattaccgctaggctccagtacgtcaaagtgggctcctgtaagtcggaggttgaagtggatatacattactgtcagggcaagtgcgcgtctaaggccatgtacagcatcgatatcaacgatgtgcaagaccaatgtagttgttgttctcctacacgcactgaaccaatgcaggtcgccctccactgcaccaacgggtcagtggtttatcatgaggtgctgaatgccatggagtgcaagtgttccccgcggaaatgcagtaag

SEQ ID NO: 12448 - DNA, 8439 bp, Artificial Sequence
  derived and/or modified sequence
atgattccagcacgatttgcaggcgttcttcttgcactggccctgattctgcccggtaccctgtgcgcagaaggaacccggggaagaagctctaccgcaagatgttcactgttcggttccgattttgtgaacacctttgatggatcgatgtacagctttgcagggtactgttcctaccttctggctggaggatgtcagaagagatcgttcagcattattggtgatttccagaacggcaagcgggtgtctctgtcagtgtacttgggtgaattcttcgatattcatctttttgttaacggaacggtgacccaaggggaccagcgcgtctcgatgccttacgcatccaagggactgtacctggaaaccgaagcaggttactacaaactgtcgggtgaggcatacgggtttgtcgcgcgcatcgacggtagcggaaacttccaagtgctgctctccgaccgatactttaacaaaacgtgcggtctttgtggtaacttcaatatcttcgccgaagatgatttcatgactcaagaaggcaccttgacctccgatccctacgatttcgcaaattcctgggcgcttagctccggtgaacaatggtgcgaacgcgcaagccctccatcatcgagctgtaacattagctcgggtgaaatgcaaaaaggcctttgggagcaatgccagctcctgaagtccacttcagtctttgcacgttgtcatcccctggtcgacccagagccctttgtggcactgtgtgaaaaaactctgtgtgaatgtgcaggcgggctcgaatgtgcgtgtccagcactgctggagtacgcgcgaacgtgtgcacaagagggcatggtgctttacggatggacggatcactcagcatgcagccctgtgtgtcccgcaggtatggaatacagacaatgtgtgtcaccatgtgcacgtacgtgtcaatccttgcacatcaacgagatgtgccaagagcgatgtgtggacggttgtagctgtcctgaaggccaactgcttgatgagggactttgcgtggaatccactgagtgcccatgtgtccattccggtaagcgttacccgcccggcacctcactgtcccgagactgtaatacctgtatctgcaggaactcacaatggatctgcagcaacgaggagtgtcccggagaatgcctcgtgaccggtcaatcccacttcaagagctttgataacagatacttcacctttagcggtatttgtcaataccttctggcacgggattgccaggaccattccttttcgattgtcattgaaacggtgcagtgtgcagatgacagagatgcggtgtgtaccaggagcgtgaccgtgcgcctgcccggtttgcataattcgcttgtcaaactgaaacatggcgctggagtggccatggacggtcaagacgtccaattgccactgcttaagggggatctgcggattcagcacactgtgaccgcgtcagtgagactcagctacggagaagatctgcaaatggactgggatggaagaggccgccttctggtcaagctctcaccggtgtacgctggaaagacgtgcggactttgcggaaactacaatggtaatcagggggatgattttctgactccatcgggcctggccgaacctcgggtcgaggactttggaaacgcttggaagctccatggagattgtcaagaccttcaaaagcaacactccgacccctgcgctcttaaccccagaatgaccagattttcggaagaagcatgtgctgtgctcacctcccctaccttcgaggcatgtcatagagcagtgtctcctctgccgtacttgagaaactgtagatacgacgtctgctcgtgttccgacggccgggagtgcctttgtggagccctcgcatcatacgcggccgcatgcgcgggacgaggcgtgcgagtggcatggcgggaacctggaagatgcgaactgaactgtccaaagggacaggtctatttgcaatgtgggactccatgcaaccttacttgcagatctcttagctacccggacgaagaatgcaacgaagcctgtctcgagggatgtttttgtcctccagggctttacatggacgaacgtggtgactgtgtgccaaaggcacaatgtccgtgttactatgatggagagatttttcaaccagaggacattttctccgatcatcacaccatgtgttactgtgaagatggcttcatgcactgtactatgtcaggagtgcccggatcccttctcccagatgcagtgctctccagccccctttcacatcgatccaaaagatcgctgtcatgccggccccctatggtcaagctggtgtgccccgcagataatcttagggcagaaggcctggaatgcaccaagacttgtcaaaactacgatctcgaatgtatgtccatgggatgtgtctcaggatgtctctgccctccagggatggtccggcatgaaaatagatgcgtggcgttggagaggtgcccctgtttccaccagggtaaggagtacgctccaggcgaaactgtgaagattggttgcaatacttgcgtgtgccaagatcgtaaatggaactgtaccgatcacgtgtgtgatgcgacctgttcgaccatcggtatggcccattaccttacttttgacggtctgaaataccttttccctggggaatgtcagtacgtcctcgtgcaagattactgtgggagcaatccgggtactttcagaatcttggtgggaaacaagggttgttcacatcctagcgtgaagtgtaaaaagcgtgtgactattctggtggagggaggagaaattgagctttttgacggagaagtgaatgtgaagaggcctatgaaggacgaaacccattttgaggtcgtggaatctggtcggtacatcattcttcttctcggcaaggcactctccgtggtctgggatcgccatctctccatttccgtcgtccttaaacaaacctaccaggaaaaggtgtgcgggctttgcggtaactttgatggcatccaaaacaacgaccttacgagctcaaacctccaggtggaggaagatccagtggactttggcaactcttggaaggtgagctcccaatgcgcagatacgcgaaaagtcccactggattcgtcccccgctacttgtcacaacaacatcatgaagcaaacgatggtcgactcgtcgtgtagaattctcacttccgacgtgtttcaggattgtaacaaacttgtggaccctgaaccttaccttgatgtgtgtatctacgacacctgcagctgcgaatcaatcggggactgcgcctgcttttgtgacaccatcgccgcatatgcacatgtctgtgcacagcacgggaaggtggtcacttggcggaccgcaaccctctgtccacaaagctgtgaagaaagaaacctgcgcgaaaatggttacgaatgtgaatggcggtacaattcctgtgcacccgcctgtcaggtgacctgtcaacatcccgaacctctcgcctgcccagtccaatgtgtcgagggatgccacgcccattgtcctcctggcaagatccttgacgagttgcttcagacctgcgtcgatcctgaagattgtccggtctgtgaagtcgccggcagacgctttgcgtccgggaagaaagtgactctgaacccgtcagacccagaacattgccagatttgtcattgtgacgtcgtgaacctcacttgtgaagcctgccaagagccaggcggtcttgtggtgccaccaaccgacgcgccagtgtcgccgaccactctgtatgtggaggatatttcggagcctcctcttcacgacttttactgttcacgcctgcttgacttggtctttctgttggatggttcaagccggctctccgaggcagaatttgaagtgttgaaggcctttgtggtcgatatgatggagcgacttagaatttcgcaaaagtgggtgcgcgttgcggtggtggagtaccacgatggttcgcatgcctatatcggactgaaagatcgaaaacgcccttcggaacttcgccgtattgcatcacaagtgaaatacgcaggcagccaggtggcaagcaccagcgaagtccttaagtacaccctgtttcaaatcttttcaaagatcgacagacctgaagcctctcgtattactctgcttctcatggcctcccaggaaccgcaaaggatgtcccgtaactttgtgaggtacgtgcaggggctgaaaaagaagaaggtgatcgtgatcccagtgggtattggtcctcatgcaaacctgaaacagattaggcttattgaaaaacaagcacctgagaacaaagcctttgtgctgtcctccgtggatgagcttgaacagcaacgggatgaaatcgtgtcatacctctgcgatcttgcaccggaagcaccgccaccaacccttcctccagacatggcccaagtgactgtgggaccaggactgttgggtgtgtcaactcttggaccaaagcgcaactctatggtgctggacgtggcgtttgtgcttgaagggagtgacaaaattggtgaggcagactttaacaggtccaaggaattcatggaagaagtgattcaacggatggatgtgggacaagacagcattcatgtcaccgtccttcaatacagctacatggtgaccgtggaataccccttcagcgaagctcagtcgaagggtgatattctccagcgggtcagggaaattagataccaaggggggaaccgcactaacactggccttgccctgcgctacctgagcgaccatagctttcttgtgagccagggggatcgggaacaggctcctaacctggtgtacatggtgacgggaaatcccgcatccgacgagattaagagactccctggtgatatccaggttgtgcccataggggtgggacctaacgcaaacgttcaagagcttgaaaggattggatggcccaacgcacctatccttatccaagactttgaaaccctgcctcgagaggcacctgatcttgtcttgcaacgctgttgttccggagaaggactgcaaattcctaccctgtcgccagctccagattgctcacaaccactcgatgtcatactcctgctcgatggatcatctagctttcctgcatcgtattttgatgagatgaaatcgtttgcgaaggcattcatttcgaaggctaacattggtcctaggctcacgcaagtgtcagtcctgcaatacggatccattaccaccatcgatgtgccctggaacgtggtgcctgaaaaggcccatcttctgtccctcgtcgatgtgatgcagcgggaaggaggtccttcacagataggggatgcgcttggttttgcagtgcgctacctcacctcggagatgcacggcgcacggccgggtgcatcgaaggccgtcgtgatcctggttaccgatgtttccgttgactcggtggacgccgcagcagatgcagccaggtccaaccgtgtcactgtgttcccaataggtattggtgaccggtacgatgcagcacaacttcgaatccttgcaggtcctgccggggatagcaacgtcgtgaaacttcagcgtattgaagatctgcctaccatggtcacccttgggaactcctttttgcataagttgtgttcaggatttgtgcggatatgtatggatgaggatggaaacgaaaaaagacccggtgatgtgtggactctgcccgaccagtgtcataccgttacttgtcagcccgacggccaaacccttcttaaatcgcatcgggtgaactgtgaccgggggctgcgaccctcatgtccgaactcacaatcacctgtgaaagtagaagagacttgtgggtgcagatggacctgcccatgtgtgtgtacgggatcctcgaccagacacattgtcaccttcgatggacaaaacttcaagctcaccggatcctgctcgtacgtgctgtttcaaaacaaagaacaggatctggaggtaatacttcacaatggcgcatgttcgcctggcgccagacaaggctgtatgaaatccattgaggtgaaacattcggctctttccgtcgaactgcattccgatatggaagtgaccgtgaatggtcggctcgtgagcgtgccttacgtggggggtaatatggaggtcaatgtctacggcgcaatcatgcacgaagtcagatttaaccaccttggacacatattcacttttaccccgcagaacaacgaatttcaacttcaactctcgccaaagacctttgcatctaagacctacggattgtgcggtatttgtgatgagaacggtgcaaatgatttcatgctgcgcgacggaaccgtgactaccgactggaaaactttggtgcaggaatggacggtgcagcgccctggccaaacgtgccaacccatcttggaagaacaatgcctcgtgcctgattccagccactgccaggtgctgcttctgcccctttttgcagaatgccataaagtgcttgcacctgccaccttctacgcaatatgtcagcaagactcatgtcaccaagaacaggtgtgtgaggtgatagcctcatacgcacacctttgcagaacgaacggagtctgtgtggactggagaaccccggatttttgtgcaatgtcctgtcctccttcccttgtgtacaaccattgtgagcatggttgtccaaggcattgtgatggaaatgtctcttcatgtggcgaccacccctccgaaggatgtttttgcccaccggataaggtgatgttggagggctcatgtgtgcccgaggaggcttgcacgcagtgcattggggaagatggggtgcagcaccagtttctggaagcctgggttcctgaccatcagccatgtcagatttgtacttgcctgtcgggacgcaaggtcaactgtactacccaaccatgtcctactgcaaaggcaccaacctgtggcctttgcgaagtggcaagactgagacaaaacgcagatcagtgttgccctgaatacgaatgtgtgtgcgatcctgtatcctgcgacctccccccagtgcctcactgtgagcgtggactccaacctactctcactaaccccggagaatgtcgaccaaacttcacttgtgcctgtagaaaggaagagtgcaagcgtgtgagcccgccttcttgtcctccacatcggcttcctactcttcggaaaactcagtgttgtgatgaatacgagtgtgcctgtaactgtgtcaactccaccgtctcgtgtccactgggatacctcgcatcgaccgcgaccaacgattgcggctgtaccactactacctgcctgcctgacaaggtgtgtgtgcatcgtagcaccatttacccggtgggccaattctgggaggaagggtgtgatgtgtgtacttgtactgatatggaagatgccgttatgggacttcgggtggctcagtgcagccagaaaccctgtgaagattcgtgtagatcgggatttacctacgtcctccatgaaggggaatgttgtggacgctgccttccctccgcctgcgaagtggtgaccggctcacctcgtggtgatagccagtcctcctggaagtccgtcgggtcccagtgggcgtcacctgaaaatccatgcctgattaatgagtgtgtgcgggtgaaagaggaagtgttcatccagcaaaggaacgtgtcgtgtccccaacttgaagtgcctgtgtgcccctcgggtttccaactgtcgtgtaaaacgtcggcatgttgtccttcgtgtcgttgcgagaggatggaagcctgcatgcttaacggaactgtcatcggtcccgggaaaaccgtgatgatagacgtgtgcactacctgccggtgtatggtccaggtgggagtgatctcgggattcaaacttgaatgtaggaaaactacttgtaacccgtgtccccttggctacaaggaagaaaacaataccggagaatgctgcggaaggtgtctgccaaccgcatgtaccatccagcttaggggcgggcaaatcatgacccttaaaagggacgaaaccttgcaggacgggtgcgacactcacttctgtaaggtcaacgaaagaggtgagtacttctgggagaaaagagtcactggatgcccaccatttgatgaacacaaatgcctcgcagagggtgggaagatcatgaagataccaggcacctgttgtgatacttgcgaggaaccggaatgcaacgatattactgcgaggctccaatacgtgaaggtcggctcctgtaagtcagaagtcgaagtcgatatccattactgccaaggaaagtgtgcatccaaggcaatgtactcgattgacataaacgatgtgcaggatcagtgttcgtgctgctcgcctactcgcaccgaaccgatgcaagtggcccttcactgtaccaatggctccgtcgtctaccatgaagtccttaacgcgatggaatgcaagtgctccccaaggaaatgttcgaag

SEQ ID NO: 12449 - DNA, 8439 bp, Artificial Sequence
  derived and/or modified sequence
atgattccagcacgttttgccggtgtgcttttggcgctcgccctgatattgcccgggactctgtgtgccgaaggtacgaggggccgcagctcaaccgctagatgctcgctgtttggatcggactttgtgaatacctttgacggatctatgtactcgttcgcgggatactgctcctacctcctcgctggcggatgtcaaaagagatccttttccattatcggagattttcaaaatggtaagagggtgtccctctcggtctacctcggagagtttttcgatattcatctgttcgtgaacggtactgtgactcagggcgatcaaagggtgtcaatgccttacgccagcaagggcttgtaccttgaaaccgaagccggctactacaagctgagcggcgaagcatacggattcgtggcgagaatcgatggttcgggaaatttccaagtcctgctgtcagatcggtactttaacaagacgtgcgggttgtgtggtaatttcaacatttttgccgaggacgactttatgactcaagaaggaactcttacttcagatccctacgacttcgccaattcgtgggcactgagctccggtgagcagtggtgcgagcgagcgtccccaccatcgtcctcatgcaacatcagcagcggagaaatgcagaagggactgtgggaacagtgtcaacttcttaagtccacttctgtgttcgcgcgttgtcatccgctggtcgatccggaaccctttgttgcactttgtgaaaaaactctttgtgaatgtgcaggcggtcttgagtgtgcatgtccagcactcctggaatatgccagaacctgcgcacaagaaggaatggtgctgtacggatggaccgatcactccgcatgcagcccggtctgtcccgcgggcatggaatacaggcagtgcgtgagcccttgtgcccggacctgtcaatcactccacattaacgagatgtgtcaggaaagatgcgtggacggctgtagctgtcccgaaggacaacttctggacgaaggattgtgtgtggaatccactgagtgtccttgcgtgcattcaggtaagagataccctcctggcacctcgctctcgcgcgactgtaacacctgtatttgtaggaactcccagtggatttgttcgaacgaggaatgtccaggcgaatgtctcgttactggacaatcgcatttcaagtcatttgacaatagatacttcaccttctccggaatttgccagtacctgcttgcacgggattgtcaagatcattcgttctcaattgtgattgagactgttcagtgcgccgacgatagggacgcagtttgtacgagatcagtcactgtgcggttgccaggcctgcataacagccttgtgaaacttaaacacggtgccggtgtggctatggatggacaagatgtgcaactgcctctgctgaagggagacttgcgcatccaacacactgtgaccgcaagcgtgaggctttcatacggagaagatcttcaaatggattgggacggcagaggacgcctgcttgtgaagctctcgccagtgtacgcaggcaagacgtgtggactgtgcggaaattacaacgggaaccaaggggacgattttcttactcccagcggacttgccgaaccacgggtggaggattttggtaatgcttggaagctgcatggagactgccaagaccttcagaagcagcattcggatccgtgtgcgcttaatcctcgcatgaccagattttcggaggaagcatgtgcagtgctcaccagccctacctttgaggcatgtcatagagcagtctcgcccctgccttacctgcgtaactgtcggtacgacgtctgttcatgctcggacggacgggagtgcctttgcggtgcacttgcatcgtacgcagcggcatgcgctggtagaggagtgcgggtcgcatggagagagcctggacgatgcgaactcaactgtccgaaaggccaagtgtacttgcagtgcggaaccccctgcaatctgacgtgcaggtccctttcgtatcccgacgaagagtgtaacgaggcttgtctggagggttgcttttgcccgcccggcctgtacatggatgagagaggggactgtgtccctaaggcacagtgtccatgctactacgacggtgagatcttccagccagaagatatcttttctgaccatcacacgatgtgttactgcgaggatggttttatgcactgtaccatgtcaggcgtgcccgggtcgctgctccctgatgccgttctttcatcccctctttcccataggtccaagcggtcactctcctgtcggcctccaatggtgaagttggtgtgtcccgccgataacttgcgcgcagaagggctggagtgcaccaaaacctgccaaaactacgatctcgaatgtatgtcaatgggctgtgtctcagggtgcttgtgtcctcctggtatggttcgtcatgagaatcgctgcgtcgccctggaacgatgcccatgtttccatcagggtaaggaatacgctcccggtgagactgtgaagattggttgtaacacttgcgtgtgtcaggatagaaagtggaattgcactgatcatgtgtgtgacgcaacttgttccactatcggaatggcacattacctgacttttgacggccttaagtacctgttccccggagaatgtcaatacgtcttggtccaagattactgtggatcgaaccctgggaccttccgcatactcgtcggtaacaaggggtgttcccatccctcagtcaaatgtaagaagcgcgttactattcttgtcgaagggggtgagattgagctttttgacggagaggtgaacgtgaaacgccctatgaaggacgagactcacttcgaggtggtcgaaagcggccgatacatcattctgctgctcgggaaggcactgtccgttgtctgggaccggcacctgagcatttcggtggtgctcaaacaaacctatcaggagaaagtgtgcggcctctgcggaaactttgatggtattcagaataacgatcttacctcatccaatcttcaagtggaagaggatccagtggactttggaaactcttggaaggtgtcctcccaatgcgcggacactcggaaggtgccccttgatagcagcccagcaacctgccacaataacattatgaagcagactatggtcgacagcagctgccgaatcctgacctccgacgtgtttcaggattgcaacaagctcgtggatcctgagccttaccttgatgtgtgcatttatgacacttgttcgtgcgaatccataggagattgcgcctgcttttgtgataccattgcagcctacgcacatgtgtgtgcccagcatggtaaggtggtgacctggcgaacggcaacgctgtgcccgcaatcgtgtgaagagagaaatctccgcgagaatggttacgaatgtgagtggcggtacaacagctgtgcacccgcttgtcaagtgacttgtcaacacccagagcctcttgcctgtcctgttcagtgtgtcgagggttgtcatgcccattgcccacccggtaaaatccttgatgaacttttgcaaacctgtgtggatccagaggactgccccgtctgtgaggtggcaggaagaagattcgcctctgggaagaaggtcacgcttaacccttccgatccagaacactgtcagatctgccattgtgatgtggtcaaccttacgtgcgaagcatgccaagaaccaggcgggttggtggtccctccaactgacgccccggtgtcccccaccaccctgtacgtcgaggacatttcggaaccaccgctccatgacttttactgctcgcgcctgctggatctggtgttcctgctcgatggatcctccagacttagcgaagcggaattcgaagtgctcaaggcatttgtcgtggatatgatggagcgccttcgaatatcgcaaaagtgggtgagagtcgctgtggttgaataccatgatggatctcatgcatacataggacttaaagatagaaagcgcccttcggagctgaggcggatagcatcccaagtgaagtacgcaggatcgcaggtggcatcgacctcggaggtgctgaagtacacgctttttcagattttcagcaaaattgatagaccggaagcctccagaattactctcctcttgatggcatcccaggaaccccaacgcatgagccggaattttgtgcgctacgtccaaggactcaagaaaaagaaggtgatagtgatcccagtgggaatcggccctcacgcaaaccttaaacaaatccggctgattgagaaacaggctccagaaaacaaagcattcgtgctgtcgtcagtcgacgaactggagcagcagcgagatgaaattgtttcgtacctgtgcgatctggccccagaagccccgcctccaacccttccaccagatatggcccaggtgactgtgggtcctggtttgttgggggtgtctacgctgggtcctaagcgtaactcaatggtgctggatgtcgcgtttgtcttggagggtagcgataagatcggtgaagctgacttcaatagatccaaggaattcatggaagaagtgatacaaagaatggatgtcggccaggatagcattcatgtgactgttcttcagtactcctatatggtcactgtggaatacccattttccgaagcacaatcgaagggagacattctccagcgtgtgcgcgaaatccgctaccagggtggtaatcggaccaataccggacttgctcttaggtacctttcggatcactcctttctcgtgtcacaaggcgacagagaacaggccccaaatctggtgtacatggtgacgggaaaccccgcgagcgatgaaatcaagcgcctcccgggagatattcaagtggtgcccatcggggtcggacctaacgctaacgtgcaggagctcgaaaggattggctggccgaatgcgccaatccttatccaagattttgaaactctgcctagagaagcgcctgatctcgtgcttcagcggtgttgttccggcgaaggtctgcaaatacctaccctttcacccgcccctgactgtagccaacccctggatgtgatactgttgctcgatgggtcctctagctttccggcatcatactttgatgagatgaaatcgtttgccaaggccttcatctccaaggcaaacatcggcccacgccttacccaagtcagcgtgcttcaatacggctcaataaccaccatcgacgtgccttggaatgtggtgccagaaaaggcacacctgctgtcattggtggatgtgatgcagcgagagggcggacctagccaaattggcgatgcactgggttttgcagtccggtaccttaccagcgagatgcatggcgcgcgcccaggggcatcaaaagcagtcgtgattcttgtcaccgatgtgtcggtggattccgtcgatgccgcagcagatgcggcacgttcgaaccgggtcactgtgtttcctattggtatcggggaccgttacgacgcggcacagctgagaatcctcgcgggacctgctggcgatagcaatgtcgtcaagctccaacgtatcgaggaccttcccactatggtgacgctgggaaactcatttcttcataaactgtgttcaggatttgtgcgaatttgcatggatgaagatggcaacgaaaaacggccgggggatgtgtggacccttcctgatcaatgccataccgtcacttgccagcctgatggtcagactctgttgaagtcgcaccgcgtgaactgtgatagagggttgcgtccttcatgcccaaactcccaatctcctgttaaggtcgaagaaacctgtggctgtagatggacttgtccgtgtgtgtgcactggatcatcgactcggcatatcgtgacttttgatggtcaaaactttaagttgaccggttcctgcagctacgttcttttccaaaacaaagaacaagatcttgaagtcattctgcataatggggcatgtagcccaggcgcgagacaagggtgtatgaaatcaattgaggtgaagcattccgccctgtctgtggaacttcatagcgatatggaagtgactgtgaacggacggcttgtctcggtgccatacgtgggtggaaacatggaagtcaacgtgtacggggcaattatgcatgaggtgagattcaatcatctggggcacattttcacttttaccccacagaacaacgaatttcagctgcaactcagccccaagacctttgcctcgaaaacctacggattgtgtgggatctgtgacgagaacggggcgaacgatttcatgctccgagatgggactgtcaccactgattggaaaaccctggtgcaggaatggactgtgcaaagaccaggacaaacttgccagccgatcttggaagagcaatgcctcgtgccggattcatcccactgtcaagttctcctgttgcctttgtttgcagaatgtcacaaagtgcttgcacctgcaactttctacgctatatgtcagcaggatagctgccaccaagagcaagtctgtgaagtcattgcttcgtacgcccacctctgcagaactaatggagtttgtgtcgactggcgaacccccgacttttgcgcaatgtcgtgtccaccatcgttggtctacaatcactgtgaacatggttgtcctcgtcactgcgatggaaacgtgagctcatgtggggaccatccatcggagggctgtttctgccccccggacaaagtcatgcttgaagggtcatgtgttcccgaggaagcatgcactcagtgcattggggaagatggagtccagcatcagtttcttgaagcatgggtgcctgatcaccagccatgtcagatttgcacctgcctgtccggtcgtaaagtcaactgcactacgcagccttgccctactgcgaaggcccctacttgtggactgtgtgaagtggcaagactgaggcagaacgcagaccagtgttgtccagaatatgaatgtgtctgtgatccagtgtcatgtgatctgcctcccgtgcctcattgcgaaagagggctgcagccaaccctgaccaatcccggtgaatgccggcctaatttcacctgtgcatgccgcaaggaggagtgtaagcgtgtgagccctccttcctgcccaccacatagacttccaaccctgcgtaagacgcaatgttgcgacgagtacgaatgcgcctgtaattgcgtcaactccaccgtgtcctgtcctctgggatacctggcatccaccgcaacgaatgactgtggatgtaccacgaccacgtgtctgccagacaaggtgtgcgtccaccgatcaaccatttatcctgtcggacaattttgggaggaaggttgtgacgtctgcacctgtaccgatatggaagatgcagtgatggggctccgggtcgcacaatgctcgcagaagccgtgtgaggactcttgcagatccggtttcacctacgtgctgcacgagggagaatgctgtggtcggtgtttgccctcggcttgtgaggtggtgactggatctcctcgtggcgactcacaatcctcgtggaagtccgtcggtagccaatgggcaagccccgagaacccctgtcttatcaacgaatgtgtcagagtgaaagaagaagtgtttatccagcagcggaacgtctcctgccctcagcttgaggtgcctgtgtgcccttcgggattccaacttagctgcaagaccagcgcgtgttgtccttcgtgtaggtgtgaacgtatggaggcatgtatgctcaacggaactgtcattggaccaggaaaaacggttatgatagacgtgtgtaccacctgtcgctgtatggttcaagtgggcgtcatttcgggctttaaactggaatgtagaaagactacctgtaatccctgtccgcttggttacaaggaagagaacaacactggcgaatgttgtggacgctgccttcctactgcatgtacgatacaactgagaggaggtcaaatcatgactttgaaaagagacgaaaccttgcaagacggttgtgacactcacttttgtaaggtgaacgagaggggggaatacttttgggaaaagcgggtgaccggatgtccaccttttgatgaacataagtgtttggcagaaggaggcaagattatgaagatcccaggcacctgttgcgacacttgtgaagaacctgaatgcaatgatatcaccgctcggttgcaatatgtgaaggtggggtcttgtaagtccgaagtggaagtggatattcactattgtcaaggaaagtgtgcatcaaaggccatgtactcgatcgatatcaacgacgtgcaggatcagtgttcgtgttgttcaccaacccgcaccgaacccatgcaggtggcattgcattgcaccaatgggtcggtggtgtaccatgaggtgctgaacgcgatggagtgcaaatgctcgcctcgcaaatgttcaaag

SEQ ID NO: 12450 - DNA, 8439 bp, Artificial Sequence
  derived and/or modified sequence
atgatcccagcaagattcgccggggtccttttggccctcgccctgatccttccaggaactctgtgcgccgaaggtactagaggacgctcctcaactgcaagatgcagcctgttcggcagcgacttcgtcaacactttcgacggaagtatgtactcattcgccggatactgctcctacctcctggcaggaggctgccagaaaaggtccttctccatcatcggcgactttcagaatggaaagcgcgtgtccctgtcggtctacctcggagagttctttgatatccacctctttgtgaacggaaccgtgacccagggtgatcagagagtctcgatgccttacgcaagtaaagggctctacctggagactgaagccgggtactacaagctgtcgggagaagcctacggtttcgttgcgaggatagacggctccggcaatttccaggttctgttgtcggaccgctacttcaataagacctgcggcttgtgcggaaacttcaacattttcgcggaagatgactttatgactcaggagggcacgctgacctcagacccttacgacttcgctaattcatgggcactctcgtcgggagagcagtggtgtgaaagggccagccctccctcgagctcgtgcaacatctcgtcaggcgagatgcagaaaggcctctgggaacaatgccagctcctgaagtccacttcagttttcgcgaggtgccatccactggtcgacccggagccattcgtcgcactctgtgaaaagactctctgcgaatgtgctgggggtttggaatgcgcgtgcccggcattgctggagtacgccaggacttgtgcgcaggaaggcatggtcctgtacggatggaccgaccactcggcctgcagcccggtgtgcccggccggaatggaataccgccagtgtgtgtcgccgtgtgcacggacttgccagtcactccacatcaatgagatgtgccaagaacgctgcgttgatggatgctcatgcccggaagggcaactcctcgacgaagggctctgcgtggagtcgaccgaatgtccatgcgtgcattcgggcaagcgctacccgccaggcactagcctgtcacgggactgcaacacttgcatctgccggaactcgcagtggatctgctccaatgaggaatgcccgggcgaatgtttggtgacgggtcaaagccacttcaaatcgttcgacaacagatacttcaccttctctggaatatgccagtacttgctggcgcgtgattgtcaggaccactcattttcaatcgtgatcgagactgtgcagtgtgcggacgatcgcgatgccgtctgcactaggagcgtcaccgtcaggctgccaggactgcacaattcgctggtcaaactcaagcacggagcaggagtggctatggatggtcaagatgtgcagctgcctctgctgaagggtgacctgcggatccaacacaccgtgaccgcgtcggtgcgcctgtcatatggagaggacctgcagatggactgggacggacgcggtagactgttggtcaagctgagcccggtttacgcaggcaagacttgcggtctttgtggaaactataacggaaaccagggcgatgactttctgaccccatccggactggccgaaccgagagtggaggactttggaaacgcctggaaactgcatggagactgtcaagatttgcaaaagcaacacagtgacccgtgtgccttgaacccgcgcatgactaggttctcagaagaggcgtgcgcggtgctcacgtccccaacgttcgaggcctgccatagagccgtgagccctctgccttacctgcgaaactgccggtacgatgtctgttcctgttccgatggaagagaatgcctgtgcggagcgcttgcatcgtacgcggccgcctgcgccggtcggggggtgcgagttgcctggcgcgaaccaggcagatgcgagctgaactgcccgaaggggcaagtgtacctgcagtgtggaaccccgtgcaacctgacttgtcggtccctgagctacccggatgaggagtgcaacgaagcctgcctcgaaggatgcttctgcccgccgggactgtacatggatgaaaggggagattgcgtgccgaaggcacaatgcccgtgctactacgacggtgagattttccagccagaggacatcttctccgaccaccacaccatgtgctactgtgaggatggtttcatgcattgcactatgagcggggtccctggaagccttctgccagacgccgtgctctcgagccccctctcgcatagatcaaaaaggtccctcagttgccggccgcctatggtcaaactggtctgtccggctgataatctccgggccgaaggacttgaatgtactaagacctgccagaactatgatctggaatgtatgtccatgggttgcgtgagtggctgtctgtgtccgccgggaatggtgcggcacgagaaccggtgcgtggcgctcgaacggtgcccatgctttcatcagggaaaggagtacgccccgggtgaaactgtcaaaatcggatgcaacacctgcgtgtgccaggaccgcaaatggaactgcacggaccacgtctgcgacgctacctgttcgaccattgggatggctcactacctcacgttcgatggcctcaagtacctgttcccgggggaatgccaatatgtcctggtgcaagactactgtggctctaatccaggcacttttagaatcctggtgggaaacaaaggatgttcccatccaagcgtcaagtgcaagaaaagagtcacgatcctggtggaaggaggcgaaatagaactgtttgacggagaggtgaacgtcaagcggcctatgaaagacgaaactcacttcgaggtggtcgagtccggccggtatatcatcctgctcctcggaaaggccctgtctgtggtctgggaccggcatctgtctatcagtgtcgtcctcaagcaaacttaccaagaaaaagtctgtggcctttgcggcaacttcgatgggatccagaacaatgacttgaccagttccaacctccaggtcgaggaagatccggtggatttcggtaactcgtggaaggtgtcctctcagtgtgctgatacccgaaaggtgcctctcgatagcagcccggcgacctgccacaataacattatgaagcagaccatggtggactcgtcgtgtagaatccttacctccgacgtgttccaggactgcaataagctggtggatccggaaccataccttgacgtgtgtatctacgatacctgctcttgcgaatcgatcggtgactgcgcttgcttctgcgacactattgccgcttacgctcacgtttgtgcacagcacggaaaagtggtgacctggcggactgccactctctgcccccaaagttgtgaggaacgcaacctgcgcgagaatggatacgaatgcgaatggcggtacaacagctgcgccccagcgtgtcaggtgacttgccaacatcccgaaccgctggcatgcccggtccagtgcgtggagggatgccatgctcactgtcctccgggaaagatcctggatgaactcctgcagacttgcgtcgatccagaggactgtccggtctgcgaagttgcgggacggagattcgcctcgggaaagaaagtgaccctcaatccatcggacccggagcactgccaaatttgccactgcgacgtggtgaaccttacctgtgaggcttgccaagagccaggcggacttgtggtgcctccgaccgacgccccagtcagtcccaccaccctttacgtggaggacatcagcgaaccgcccctgcatgacttctactgctcccggctgctcgacctggtgtttctcctggacggatccagtcggctgtccgaggcggaattcgaagtgctcaaggcctttgtggtggacatgatggaacgcctgaggatcagccaaaagtgggtgcgcgtggccgtcgtcgagtaccacgacggatcccacgcatacatcggtctgaaggacagaaagaggccgtcagaacttagacggatcgcttcacaggtgaagtatgccgggtcgcaggtggccagcacctcagaggtgctgaagtacactctttttcagattttcagcaagatcgaccggcccgaggcatcacgaattactctgctccttatggcctcgcaggaacctcagcgcatgtcccgcaatttcgtgaggtacgtccaagggctgaaaaagaagaaggtcatcgtgatcccagtcggaatcggcccccacgccaacctcaaacaaatccggttgattgagaagcaggcgccggaaaacaaggcatttgtgctttcctcagtggacgaattggaacagcaacgggacgaaattgtgtcctatctctgcgatctggccccagaagcgcctccaccaactctgcccccagacatggcccaagttaccgtgggaccgggcctcctgggcgtgtccactctgggacccaagaggaattcaatggtgctggacgtggcattcgtcctggaaggttcggataagatcggcgaagcggatttcaacaggagcaaggagttcatggaagaggtgatccagagaatggacgtgggacaagatagcatccatgtgaccgtgcttcagtactcctacatggtgacggtggaatacccattttctgaagcacagagcaagggtgacatcttgcagcgggtccgggagatccgctaccaggggggaaaccgcactaacaccggcctcgccctcagatacctgtcggaccatagcttcctggtgtcgcagggggaccgggagcaggctcccaacctcgtctatatggttactgggaatccagcctccgatgagatcaagcggctgcctggagatattcaagtggtgccgatcggggtcggacctaacgcaaatgtacaagagctcgagcgaatcggttggccgaacgctccgatcctcatccaggacttcgagactctccctcgggaggccccggacctcgtgctgcagcggtgttgttccggagaaggactgcagataccaaccctgtcgccggcgccggattgcagccaacctctggacgtgatcctgctgctcgacgggtcctcatcctttccagcctcctattttgacgagatgaagtcgtttgcaaaggcattcatctcgaaagctaacattggaccccgcctcactcaagtgagcgtgctccagtacggctctatcactaccatcgatgtcccatggaatgttgtgccggaaaaagcgcacctgctgtcgcttgtggacgtgatgcagcgcgagggaggcccgtcccaaatcggagacgcactgggatttgctgtccggtacctgacgtccgaaatgcacggagcaagaccgggagcttccaaggcggtcgtgattttggtgactgacgtgagcgtcgactcggtggatgccgcggcagatgctgcacgctcgaatcgggtgactgtgtttcccattggtatcggtgatcgctacgatgccgctcagctccggatcctcgccggaccggccggggattccaacgtcgtgaagctgcaacggattgaggacctcccaaccatggtgaccctgggcaattcattcttgcataagctgtgcagcgggttcgtgcgcatctgcatggatgaagatggaaatgaaaaaagacctggcgatgtgtggaccctgccagatcagtgccacaccgtgacttgtcagccggatggacaaactttgctgaagtcacaccgcgtgaattgtgaccgaggactgcgcccgagctgcccgaactcccagtcccctgtgaaggtcgaagaaacctgcggatgccgctggacctgtccgtgcgtgtgtactggatcaagcactagacatatcgtcacttttgacggccagaacttcaagttgacgggctcgtgcagctacgtgctctttcagaacaaggagcaagatctggaagttatcctccataacggtgcctgctcgccgggagcgcgccagggatgtatgaagagcattgaggtcaagcatagcgcgctgtcagtggaactccactccgacatggaagtgaccgtcaatgggcgcttggtgagcgtgccatacgtcggaggaaatatggaggtgaacgtgtacggcgcgatcatgcacgaagtgaggttcaaccacctcgggcacatattcactttcactccacagaacaacgagttccaattgcaactctcgccaaaaactttcgcgtcgaaaacgtacggcctgtgcggaatctgcgacgaaaatggagccaatgacttcatgctccgggatgggacggtgactaccgattggaaaaccctggtgcaggagtggactgtgcaaaggccgggccagacctgccagcccatcctggaggaacagtgtttggtgcctgactcgagccactgccaagtgcttttgcttccgttgttcgctgagtgtcataaggtcctggcgccagctacgttctacgcgatctgccaacaggattcctgccaccaagagcaggtctgcgaggtgatcgcttcctacgcgcatctctgtcgcaccaatggggtgtgtgtggattggcggaccccagacttctgcgctatgtcatgtccgccgtcgttggtctacaatcactgcgaacacggatgcccccgccattgcgatgggaatgtgagctcgtgcggagatcacccgtcagaaggatgtttttgtccgccggacaaggttatgctggaggggtcgtgtgtcccggaggaggcttgcacccagtgcatcggagaggacggagttcagcatcaattcctggaggcttgggtgccggatcaccagccgtgccaaatctgtacctgtttgtcgggacgtaaggtcaattgcacgacccaaccctgcccgacggcaaaagcaccgacctgtggtttgtgcgaggttgccagacttcggcagaacgcggatcagtgttgccctgagtacgaatgcgtgtgcgacccagtttcctgcgacctgccgccagtgccgcattgcgaacgcggtctgcagccaaccctgaccaaccccggagaatgcagaccgaacttcacctgcgcgtgcagaaaggaagagtgcaaacgcgtgagccccccgtcctgcccaccgcatcggctgccgacgttgaggaaaacccagtgctgcgacgaatacgaatgcgcctgtaattgcgtaaactcgactgtgtcgtgccccctgggctaccttgcatccaccgcaaccaatgattgtggatgcaccactactacgtgcctgccggataaagtttgtgttcaccggtccactatctaccccgtaggccagttctgggaagagggatgcgacgtgtgcacctgcacggacatggaggacgccgtgatgggacttagagtggcacaatgcagccaaaagccttgcgaggactcatgccgcagcgggttcacttacgtgctccatgaaggagaatgctgcggacgatgcctgccctcagcctgcgaagtggtgactggatcgccgcgtggcgactcccaaagctcctggaaatccgtcgggtcccaatgggcctcgccagagaacccctgtttgatcaacgagtgcgtccgcgtgaaggaagaagtgttcatccaacaacgaaacgtatcctgtccgcagcttgaggtgcctgtttgcccttcaggctttcaactgagctgcaagacgtcagcatgctgcccttcatgccgttgcgaacggatggaggcgtgcatgcttaatggcaccgttatcggccctggaaagaccgtcatgatcgacgtctgcaccacctgccgctgcatggtgcaggtgggggtgatctcagggttcaagctggaatgccggaaaactacctgcaacccttgtccgctcgggtacaaggaagagaacaataccggcgaatgctgtgggcgctgcctgcctactgcttgcaccatccagctgcgcggcggacagatcatgaccctgaagcgcgacgaaactcttcaggatggctgcgatacccatttttgcaaggtgaatgaacgaggcgagtacttctgggaaaagagagtgactggctgcccgcctttcgacgaacataaatgcctggcggagggaggaaagatcatgaagatccccggtacctgctgcgatacttgcgaggaacctgaatgtaatgacattactgcccgcttgcagtacgtcaaggtcgggtcttgcaagtcagaggtggaagtagacatccactactgccagggcaaatgcgcctcaaaggcgatgtacagcatcgacattaacgatgttcaggatcagtgctcatgctgttcgccgactcggacggagcctatgcaggtcgccctgcactgtaccaacggatcggtagtgtaccacgaggtcctgaacgccatggaatgtaaatgctccccgagaaagtgctccaaa

SEQ ID NO: 12451 - DNA, 8439 bp, Artificial Sequence
  derived and/or modified sequence
atgattcctgcccgcttcgcaggagtgttgttagcccttgctttgatacttccgggaactttatgtgctgagggtacccgcggtcgaagctctacggcacgttgctctctcttcggttcggatttcgttaatacattcgacggtagtatgtacagctttgccggttactgctcttatctgctggctgggggttgccaaaagagatcattctctattattggggatttccaaaacggaaagagggttagtctgagtgtgtatctcggtgaattttttgatattcatttgttcgttaatggcactgttacacagggagatcaaagagtgagtatgccttatgccagcaagggattgtaccttgagacagaagccggttactataagctctctggggaggcttacggttttgtcgcgagaattgatggatctggcaacttccaagtgttgttgtccgacagatacttcaacaagacttgcggactatgcgggaactttaatatctttgcagaggatgattttatgactcaagagggaactttgacaagcgatccttacgatttcgctaattcgtgggctttgtcctcaggagaacagtggtgcgaaagggcatcgcctccatcatccagctgcaatatttcaagtggagagatgcaaaaggggctgtgggagcaatgccaattactgaagtcgacatccgtgttcgctagatgtcatcctttagttgaccctgagcctttcgttgccctttgcgagaagactctttgtgaatgcgctggaggattggagtgtgcttgccctgctttgctcgaatatgctaggacatgcgctcaagagggcatggtgctatatgggtggactgatcactcggcatgctctcctgtgtgccctgcaggtatggaatatagacagtgtgtgtcaccctgcgcgaggacctgtcaaagcctccatattaacgagatgtgccaggaaagatgcgttgatggttgctcttgtcctgaaggccagttactggacgagggcctctgtgttgaatccactgaatgcccttgtgttcactcaggtaaacgttatccgccgggtactagcttgtctcgggattgcaatacttgcatctgtaggaattctcaatggatctgctctaacgaagagtgccctggagagtgtctggtcactgggcaatctcatttcaagtcttttgataaccgctactttaccttttctgggatttgtcaataccttttagctagagattgtcaagaccactccttcagtatagttattgagaccgttcagtgcgccgacgatagagatgctgtctgcacccgcagcgttactgttcggctgccaggtcttcacaattctttggtgaaattgaagcatggcgctggtgttgctatggatggtcaggacgtccagctgccattgctgaagggggatttgaggatacaacatactgtaacagcaagtgtgcgtcttagctacggcgaggatttgcagatggattgggacggtaggggacgtctgctagttaagttgtctcctgtatatgctggtaagacatgcgggctttgcggaaattataatggtaaccagggagatgatttcctcactccatcaggactcgcagagccacgtgtggaggactttggtaacgcttggaagcttcatggggattgccaggaccttcaaaagcagcattccgatccttgtgcacttaaccctagaatgactcgattcagtgaggaggcatgtgcagtgttaactagccctactttcgaagcatgccacagagctgttagcccacttccatatctccgaaactgcagatatgatgtttgttcctgttcggacggccgcgagtgtctctgtggcgctcttgctagttacgcggcggcttgtgcaggtaggggcgtgagggttgcctggagggaaccaggtcggtgcgaattaaattgtcctaaagggcaagtttatcttcaatgtggcacgccctgtaatcttacctgtcgtagtttgtcctatcccgacgaggaatgtaatgaggcttgcctcgagggatgcttctgtcctcccgggctttacatggacgaaaggggagactgtgtgcctaaggctcagtgcccgtgttactatgacggtgagatttttcaaccagaagacatattttctgatcatcatacaatgtgctactgtgaagatggtttcatgcactgtactatgagtggagttccgggatctttgttgcccgatgcagtgttaagttcccccctttctcaccgatcgaaaaggtctttgtcctgtagaccccctatggtgaaacttgtatgccctgctgataaccttcgagctgaggggttggaatgcacaaagacatgccagaactatgaccttgagtgcatgtccatgggctgtgtgtcaggatgtttgtgcccgccaggtatggttaggcacgaaaatcgttgcgttgcattggaaaggtgtccatgtttccatcagggtaaagaatatgcacctggtgagactgtcaagataggatgcaatacttgtgtatgccaggacagaaagtggaactgcactgatcatgtctgtgatgcaacttgttcaacaataggtatggctcactaccttactttcgatggtcttaagtatctatttccaggggagtgtcaatacgtgctcgtgcaggattattgcgggtcgaatccaggcacatttaggatccttgtgggtaataaaggatgttcccacccatctgtgaagtgtaaaaaaagagtcacaatacttgtggaggggggtgaaatagaattatttgacggtgaggtcaacgttaaaagacctatgaaggatgaaacacatttcgaggttgttgaatcaggtagatatatcattcttttattgggcaaggcactatcagtcgtttgggatcgccatttgtcgatcagtgtcgtgcttaagcagacataccaagagaaggtttgcgggttgtgtggaaacttcgatggtatacaaaataatgaccttacgtcaagtaaccttcaggtagaagaagatcccgttgattttggaaattcgtggaaggtttcatcacaatgtgctgacactagaaaggttccccttgattcatctccggccacttgccataacaatatcatgaaacaaaccatggtggattcctcctgtagaattcttacatctgacgtcttccaggactgtaataaacttgtcgacccagaaccatatcttgatgtttgtatctacgacacatgttcctgtgaaagcatcggagattgtgcgtgcttttgtgatactattgccgcatatgcacatgtctgtgcgcagcatggaaaggttgtaacatggagaactgccacactctgcccacaatcttgtgaagaacgtaatctaagagagaacggttatgaatgcgaatggagatataattcgtgcgctcctgcttgtcaggtgacttgtcaacatccggagcctttggcttgtcctgtgcagtgcgttgaggggtgtcatgcacattgccctcctggtaagattttggatgaacttcttcaaacctgcgttgacccagaagactgccctgtgtgtgaagtggctggtaggcgctttgctagcgggaagaaagtcactttaaacccttccgaccccgagcattgccagatatgtcactgcgatgtggtaaatctcacatgtgaagcatgtcaagaaccaggaggtctcgttgtgcctccgacggatgcgcctgtgtctccgactactctctatgttgaagatatttccgaacctcctttgcatgacttctattgttccaggttgttagatctagtcttcttattggatggaagtagcagactatcggaggccgaatttgaagtgctcaaggcttttgtggttgatatgatggagcgtttgagaatttctcaaaaatgggttcgtgtggctgttgtggagtaccatgatgggtcacacgcctacatcggtcttaaagatcgtaaacggccttcagagttgcgtcgaatagcatcacaagttaagtatgctggaagccaggttgcctcgacttcggaggtcttaaagtacaccttatttcagatattctccaagatcgatcggccagaggcttcgcgtataacacttcttttgatggccagccaagaaccgcagcgaatgagtaggaactttgtccgttacgtgcaaggattgaaaaagaaaaaggtgattgtgatacccgtcgggattgggccacacgctaaccttaaacaaatccgtcttatcgaaaaacaagctccagaaaacaaagcattcgtgctctccagtgttgacgaacttgagcagcaaagagatgagattgtttcgtatctttgtgatcttgctcctgaagcacctccgccaactctacctccagatatggcgcaagtgacagtcggacctgggcttctgggcgtttccactctcgggccaaagaggaactcaatggttttggacgtggcttttgtgcttgaaggctctgataaaataggagaagccgactttaacagatctaaggaattcatggaggaagttatccaaaggatggatgtcggacaggacagcattcacgttaccgtcttgcaatactcatatatggtgacagtggaataccccttctctgaggcacagtctaagggtgatatccttcaaagagtgagagagattaggtaccagggcggtaacaggacaaatactggccttgctttgcgatatctgtccgaccatagcttcctggtatctcagggcgatcgggagcaagcccctaacttggtgtacatggttacgggcaatccagcatcagatgaaataaagagattgccaggagacatacaagtggtaccgatcggcgtgggtcccaacgccaatgttcaagaattggaacgaatcgggtggccgaatgccccaatccttatacaagattttgaaactcttccaagagaagcgcctgatctggttttgcaaagatgttgctcgggtgagggccttcaaatacctaccctgtccccggcacctgattgctcccagccactagacgtgatcctgttgctcgacggatcatcatcatttcctgcttcatatttcgatgagatgaagagcttcgcaaaggcattcatttctaaggcgaatataggtcctagacttacacaggtgagcgtgcttcagtacggctctatcactaccatagacgtaccttggaatgttgtacctgaaaaggcccacttactgtctcttgttgatgttatgcagcgcgaaggagggccatctcaaattggagacgctcttggttttgctgttagataccttactagcgaaatgcatggggctcgaccgggggccagtaaggctgtggtgattctcgttactgatgtgagcgtcgatagtgttgatgcggccgcagacgctgctcggtctaatagggtaacagtctttccaatcggaatcggggaccgatacgatgcagctcaacttcgaatcttggctggacccgccggcgattctaatgtagttaaactccaaagaatcgaagacttgcctactatggttaccctgggaaatagctttctccacaagctttgctctggtttcgttcgtatttgtatggatgaggacggtaatgagaaacgtccgggagacgtttggacgcttcctgatcaatgtcacactgtgacatgccagccagatggtcaaacccttcttaaatcgcatagagttaattgcgataggggattgaggccaagctgcccaaatagccagagtcctgtcaaagtcgaagaaacgtgtggctgtcgatggacatgtccatgtgtgtgcaccggatcgtccacccgtcacattgttacgttcgatggacaaaacttcaagcttactgggagctgctcgtatgttctcttccaaaataaggagcaagatttggaagttattcttcacaacggcgcttgtagcccgggagctcgtcagggatgcatgaaatctattgaggttaagcatagtgctctcagcgttgagcttcacagtgacatggaagttacagttaatggaaggttggtgagcgtgccttatgtcggagggaatatggaagttaatgtatatggtgctattatgcatgaagttagatttaaccacttgggtcatatttttactttcactcctcaaaacaatgaatttcagctccaacttagcccgaaaactttcgcaagtaagacgtatggattgtgtggtatttgtgatgagaatggagctaatgatttcatgcttcgggacggaaccgttacaactgattggaagactcttgttcaagaatggaccgtccagcgtcctgggcagacgtgccaacctatccttgaagaacaatgcttggttcctgactcctctcattgtcaggtccttttgcttcccttgttcgcagaatgccataaagtactcgccccagccactttctacgccatatgtcagcaggatagctgtcatcaggaacaggtctgtgaggttatcgctagctacgcccacctttgcaggactaacggtgtatgtgtagattggcgtactcctgacttttgcgctatgagctgcccaccgtcgttggtgtacaatcattgcgagcatgggtgcccccgacattgcgacggcaacgtttcttcatgtggcgatcatccttccgagggttgcttttgccctcccgataaagttatgttggaaggatcttgtgtacctgaggaagcttgcacacaatgtattggagaagatggtgtgcaacatcagttcttggaggcctgggttccggatcatcaaccgtgccaaatttgtacgtgcctgtccgggagaaaggtcaattgcactacgcaaccatgccctactgcaaaggcacctacttgcggtctctgtgaggtggcacggttgcgtcaaaatgcagaccagtgctgccctgaatatgaatgcgtctgtgatccagtgtcttgtgatctgccccccgtgccccattgcgagcgaggcttacaacctacccttactaacccaggcgaatgcaggcctaattttacctgcgcctgccgaaaggaggagtgcaagcgagtgtcccccccttcctgcccaccccataggttgcctacacttcgaaagacccagtgttgtgatgaatacgagtgcgcttgcaattgtgtgaattccacagtctcttgtccacttgggtatttagctagtacagcaacaaacgactgcggatgtacaaccactacttgtcttccagataaagtatgtgttcacaggtcaaccatctacccagtgggacaattttgggaggagggatgcgacgtatgcacttgtactgacatggaggatgctgttatgggcttgagggtcgctcaatgttcgcagaagccttgtgaagattcttgcagatccggattcacctacgttttacatgagggggagtgttgtggaagatgtcttcctagtgcatgtgaggtggtcaccgggagcccgagaggcgacagtcaaagctcgtggaagtccgtgggttcccaatgggcttcccccgaaaacccatgcctcattaacgaatgtgtgcgagtcaaagaagaggttttcattcaacaacgcaatgtttcatgtcctcaacttgaagtacccgtatgcccatcgggctttcagctgagctgtaagacaagtgcttgttgcccatcgtgtaggtgcgagagaatggaggcttgcatgttgaacggaactgtaataggacctggtaaaaccgttatgattgatgtctgtaccacatgcaggtgtatggtacaagtgggagttattagcggtttcaagcttgagtgtcgcaaaactacctgtaacccatgtcctctggggtacaaagaagaaaataatactggtgagtgttgcggtaggtgcctaccgactgcatgtactattcagttgcggggtggacagatcatgaccttgaagcgggatgagaccctccaggacggatgtgacactcatttttgcaaggtgaacgaacggggcgaatatttctgggagaagagggtgaccggctgccctcctttcgatgaacataagtgtcttgctgaggggggtaagataatgaagattccaggcacctgctgcgatacatgcgaagaacctgagtgcaacgacatcaccgcccgactgcagtatgttaaggtgggttcatgcaaatctgaagttgaggtggatatccactattgccaggggaagtgcgcatcaaaagctatgtactccattgatattaacgacgttcaagatcaatgttcttgctgctcccccacgaggacagagccaatgcaagtggcactccactgcacaaacggttctgttgtttaccatgaggtcctcaatgctatggaatgcaaatgttctccccgcaagtgtagtaaa

SEQ ID NO: 12452 - DNA, 8439 bp, Artificial Sequence
  derived and/or modified sequence
atgattcccgccagattcgccggtgtgctcctcgcactggcactcattctgccgggaaccctgtgtgcggaaggaacgcgcggccgctccagcactgcaagatgtagcctgttcggatcagatttcgtcaataccttcgatgggtccatgtactccttcgccggttactgctcgtacctcctggcgggaggatgccagaaacgctctttttctatcatcggcgattttcagaacggaaagagagtgtctctgtcggtctatctcggcgagttctttgacatacatctgttcgtcaacggtaccgtgacccagggcgatcaacgggtgagcatgccgtacgccagcaaaggcttgtacctcgagacggaagccggctactacaagctgtccggcgaagcatacggattcgtggcccgcatcgacggaagtggtaacttccaggtcttgctgtccgaccggtacttcaacaaaacgtgtggactttgtggtaactttaacatcttcgcagaagatgatttcatgactcaagaaggaaccctgacctccgacccttacgactttgcaaactcttgggcgctgagctccggagagcaatggtgcgagagggcgtcaccgccatcttcatcctgcaatatctcgagtggcgagatgcagaagggcctctgggaacaatgccagctcctgaagtcaacctcagtgtttgctagatgtcacccactcgtggatcctgagcctttcgtggccctctgcgagaaaaccctgtgcgagtgcgccggcggacttgagtgtgcgtgccctgcgcttctggaatacgcaagaacctgcgctcaagaaggcatggttctgtacggatggactgaccactcggcgtgcagcccggtgtgtccagcgggtatggaataccgccaatgcgtcagcccgtgtgctcgcacttgccagtccttgcatatcaatgagatgtgccaagagagatgtgtggacggatgctcctgcccggaggggcaactcctggatgaagggctctgcgtggagtcaactgaatgcccgtgcgtccattcgggcaagcgttacccgccgggaacgagccttagccgtgattgtaacacctgcatctgccgcaattcgcagtggatctgctcgaatgaggagtgcccaggagaatgtctcgtgactggacagagccactttaagtcgttcgacaacagatactttaccttcagcgggatctgccagtacttgctggcgcgggattgtcaggaccactcgttttcgatcgtaatcgaaaccgttcaatgcgccgatgaccgagacgccgtctgtactagatccgtgaccgtgcggctcccgggtctgcacaattctctggtgaagctgaagcacggagccggcgtcgcaatggacggacaggatgtgcaacttccgctcctgaaaggagatctccgcatccagcacactgtgactgcctcagtccgcctgtcgtacggagaggacttgcagatggactgggatggtcggggcaggcttctggttaagctgtccccggtatacgccggcaagacctgcggcctgtgtggcaactacaatggaaaccaaggagacgatttcctgaccccctcaggcctcgccgagccacgcgtggaggacttcggaaatgcctggaaactccatggggactgccaggatctgcaaaaacaacacagcgatccgtgtgcgctgaacccgagaatgacccgcttctctgaggaggcatgcgccgtgctgacttcgccgacctttgaggcctgccaccgggccgtgtcgccactgccatacctgagaaactgtcgttacgacgtgtgttcgtgtagcgacggccgcgaatgcctgtgtggggctctcgcgtcatacgcggcggcctgcgcgggaagaggcgtgcgcgtggcatggcgagaaccaggaagatgcgagctgaactgcccaaagggacaggtctatctccaatgcggaaccccgtgcaaccttacctgccgtagcctcagctaccccgatgaagaatgcaacgaggcctgccttgaaggatgcttttgcccgccaggtctgtacatggacgagagaggagactgcgtgcctaaagcccagtgcccatgctactacgatggagagatctttcagccagaagatatcttttccgaccaccacaccatgtgctattgcgaggacggatttatgcattgcaccatgtcgggagtgccgggatcgctgctgcctgatgcggtgctgtcgtcaccgctctcgcataggtcaaagcgatccctcagctgtaggccgccgatggtgaaacttgtgtgtccggcggacaatcttagggccgaagggctggagtgcactaagacttgccagaattacgacctcgagtgcatgagcatggggtgtgtgagcggctgcctgtgtccgcctggaatggtgcggcatgagaaccggtgcgtcgctctggaacggtgtccgtgctttcaccaaggaaaggaatacgcccctggagaaactgtgaaaatcggctgcaatacgtgcgtgtgccaagaccggaagtggaattgtactgatcatgtgtgtgacgccacttgttcgaccatcggcatggcccactacctgactttcgatgggctgaagtacctgtttcctggagaatgtcagtacgtgctggtgcaggattactgcgggagcaacccgggtaccttcagaatccttgtgggaaacaagggctgttctcacccttcggtgaagtgtaagaaaagagtgaccattctggtagaaggcggcgaaatcgagctgtttgacggcgaagtcaacgtgaagaggccgatgaaagatgaaactcatttcgaagtggtggagagcggacggtacatcatccttctgctgggaaaggcgctctcagtggtttgggaccgccacctgtcaatctccgtggtcctgaagcagacctaccaggaaaaagtctgcggcttgtgcggcaacttcgacggtatccagaacaacgacctgacctcgtcgaatctgcaggtggaggaagatcccgtcgattttggaaatagctggaaagtctcctcccagtgcgcggatacgcggaaggtgccattggattcgagccccgctacttgtcataacaacatcatgaagcaaactatggtcgatagctcatgtaggatcctcacgagcgacgtctttcaagactgcaataaactggtcgacccggaaccgtaccttgatgtctgcatctacgacacctgttcgtgcgagtcaatcggtgactgcgcctgtttctgcgacactatcgccgcgtacgctcatgtgtgcgcacaacacggcaaggtagtcacctggagaaccgcgactctctgcccgcagtcctgcgaggagcgcaacctcagggaaaacggctacgaatgcgaatggcggtataacagttgcgcaccggcatgccaggtgacctgccagcacccggaacccctggcgtgccctgtccagtgcgtagaggggtgccacgcacactgtccgccagggaaaatccttgacgaactgcttcagacctgcgtggatcccgaagattgcccggtgtgcgaagtcgccggccgccgattcgcgtcgggaaagaaggtcacgctgaatccttcagaccctgagcactgtcagatttgccactgcgatgtggtgaatctgacctgcgaagcgtgccaggagccgggaggcctggtggtgccacctactgacgccccagtgtcgcctaccaccctgtacgtggaagatatctccgaaccgccactgcacgacttctactgttcacgcctccttgaccttgtgttcctcttggatggctcctcccggctgtcggaagcagagttcgaagtgttgaaggctttcgtcgtagacatgatggaacggctgcggatctcccagaagtgggtgcgggtggcagtggtggagtaccatgacggctcgcacgcctatattggactcaaagatcgtaagcggccctcggaactccgccggatcgcaagccaagtaaagtatgccgggagccaggtggcttcgacctcagaagtgctgaagtacactctcttccagatcttttcgaagattgacagaccggaggccagccgcatcaccctgctgctcatggcatcgcaggagccgcagcggatgtcgcgcaattttgtgagatacgtccagggcttgaagaaaaagaaggtcatcgtaatcccggtgggtatcgggccccacgcaaacctgaaacagattcgcttgatcgagaagcaggcacctgagaacaaagcattcgtcctcagcagcgtcgatgaacttgaacaacagagggatgagattgtctcctacctctgcgacctggcgccggaggcacccccaccaactctgccgccggacatggcccaagtgacggtgggcccgggactgctgggcgtgtcgactctcgggcctaaacgcaattcgatggttctggacgtggcgttcgtcctggagggtagcgataagatcggagaggcggacttcaatcggtccaaagagttcatggaagaggtcatccagcggatggacgtcggccaggactccatccacgtcaccgtgctccaatactcatacatggtgacggtcgaataccccttctctgaagctcagagcaaaggagacatcctgcaacgggtgcgcgagatccggtaccagggagggaaccgaaccaataccggattggccctgcggtatctgtcggatcattcgttcctcgtgtcgcagggtgaccgggaacaggcaccaaatctcgtgtatatggtgaccggaaaccctgcctcggacgaaatcaagcgcctccctggtgacatccaagtggtgcctataggagtgggtccgaacgctaatgtgcaggaattggagagaattggttggcctaatgccccgattctgatccaggacttcgaaaccctcccgcgcgaagcgccggatctggtgctgcagagatgctgctcaggcgagggactgcagattcctactctctcaccggcaccggattgctctcagccgctcgacgtgatccttctcctggatggaagctccagcttcccagcctcctacttcgacgaaatgaagtcatttgccaaagcctttatctcgaaagctaacatcggaccccgcctgactcaggtcagcgtcctgcagtacggatctatcactaccatcgacgtgccttggaacgtcgtgccggaaaaggcccacctgctgtcattggtggacgtcatgcaacgcgaaggcggacctagccaaatcggggacgccctgggcttcgctgtgcgctacctcacctcagagatgcacggggccagaccgggagccagcaaggccgtcgtcatattggtgactgatgtgtccgtggattcggttgacgctgccgcggatgcggcccgctcgaatcgcgtgactgtgttccctattgggatcggtgacagatacgacgctgcacaactccgcattttggcgggtcccgcgggtgattcgaacgtggtaaaactgcaacgcatcgaagatcttccgacgatggtcaccctgggcaactcgttcctgcataaactctgttcaggtttcgtgcggatctgcatggatgaggacggcaatgagaaaaggcctggagacgtctggaccctgcccgatcagtgccacactgtgacctgtcaacccgatggacagaccctcctgaagtcgcatcgcgtgaattgtgaccggggtttgcgcccaagctgcccaaactctcaatcacccgtgaaggtggaggaaacctgcggatgccgctggacttgcccatgcgtgtgtactgggtcgtcgacccgtcacatcgtgaccttcgacgggcagaacttcaagctgaccggcagctgctcgtacgtcctgttccagaacaaagaacaagaccttgaggttatcctgcataacggagcgtgctcgccaggggccagacagggctgcatgaagtccattgaagtgaagcattcagctctgtcggtcgaacttcacagcgacatggaggtgactgtgaatgggcggctggtgtcggttccctacgtgggaggcaacatggaagtgaacgtgtacggggccatcatgcacgaagtgcgcttcaaccatctcggacatatcttcactttcactccgcagaataacgaatttcagcttcaactgtcaccaaagacgttcgcctccaagacttatggactgtgcgggatctgcgacgagaatggcgccaacgatttcatgttgagagacgggaccgtcactactgactggaaaactctcgtgcaggaatggaccgtgcaacgcccggggcaaacttgccagccaattctggaggaacaatgcttggtgcctgactcctcccactgccaagtcctcctcctcccgctcttcgccgaatgccataaggtgctcgctcctgctaccttctacgcaatatgccagcaggacagctgccatcaggaacaggtgtgcgaggtcatcgcgtcctacgcacatctttgcagaactaacggagtctgtgtggattggcgcactcccgacttctgcgccatgtcttgcccaccgtccctggtgtacaaccactgcgagcacggatgtccacgccactgcgacggaaacgtgtcctcctgcggagatcatccgtccgagggctgcttctgcccaccagataaggtgatgctggaaggatcatgcgtgccagaggaagcctgtactcagtgtatcggagaggacggtgtgcaacaccagttcttggaggcatgggtcccagaccaccagccatgccagatctgtacttgcctgtccggaaggaaggtgaattgcaccactcaaccatgccctactgcgaaggcacctacttgcggcctgtgcgaagttgcacgccttcggcagaacgctgatcaatgctgcccagaatatgaatgcgtctgtgacccggtgagctgtgacctcccaccggtgccgcactgcgagcgcggtttgcaaccgaccctgactaacccgggtgagtgtagaccgaactttacgtgcgcctgtaggaaggaagaatgcaagcgtgtgtccccaccgagctgtccaccacacagattgccaactctgcgcaaaacgcaatgctgtgatgaatatgagtgcgcgtgtaactgtgtgaatagcaccgtctcctgcccgttgggctaccttgcatcaaccgccacgaacgactgcggatgcacgactaccacttgccttccagacaaggtgtgcgtccatcgctccaccatctacccagtgggacaattctgggaggaaggttgcgatgtgtgtacctgcaccgacatggaggatgccgtcatgggactgagagtcgcgcaatgctcccagaagccttgcgaagattcctgcaggtcaggcttcacctacgtgctgcacgagggggaatgctgcggccgctgtttgccatccgcttgtgaagtcgtcaccggttccccgaggggtgattcgcagtcctcgtggaagtccgtgggatcgcagtgggcctcaccggaaaatccgtgtctgatcaatgaatgtgtgcgggttaaggaagaagtgtttattcagcagaggaatgtgagctgccctcaactcgaagtccccgtttgcccgtccggattccagctgagctgcaagaccagcgcgtgctgcccatcctgtcgctgcgagagaatggaagcatgcatgttgaacggaactgtgattgggcccggaaagactgtcatgatcgatgtctgcactacctgccgatgcatggtccaggtcggggtgatttcgggcttcaaactggagtgtaggaaaaccacctgcaacccatgtcctttgggatacaaggaggaaaacaatacgggagagtgttgtggccggtgtctccccactgcttgtaccatccagctgcgcggcggacagatcatgaccctgaagcgggacgaaactctccaggatggatgcgacacccatttctgtaaggtgaatgaacggggagaatacttctgggaaaaacgcgtcactgggtgccctcccttcgacgaacataagtgtctggccgaagggggaaagatcatgaagatacctggcacctgctgcgacacgtgcgaggagccggagtgtaacgacatcaccgcacggctccaatacgtgaaggtgggatcgtgcaagtccgaggtggaagtcgacatccactactgccagggcaagtgcgctagcaaggccatgtactccattgatatcaacgacgtccaagaccagtgtagctgttgctccccgactcgaactgaaccaatgcaagtggccctccattgtactaacgggagtgtggtgtatcatgaagtgcttaacgctatggagtgcaagtgctcgccgaggaagtgctcgaaa

SEQ ID NO: 12453 - DNA, 8439 bp, Artificial Sequence
  derived and/or modified sequence
atgatacctgccaggttcgcaggggtcctgctggcactcgcgctgatacttcccggcactctctgtgcggaagggacccggggaagatcgtccaccgcacggtgcagccttttcggaagcgactttgtcaacacctttgatggttcgatgtactcctttgcgggatactgtagttatctcttggctggaggctgccaaaagaggagcttttccattatcggggactttcaaaacggaaagcgtgtgtccctgagcgtctacttgggagagtttttcgatatccatctttttgttaacggtaccgtcacgcagggagatcaacgggtgtccatgccctacgcaagcaaaggactgtacctggagacggaagcaggttactacaaactttcaggcgaggcctacggattcgtcgcaagaatagatggatcggggaattttcaagtgctcctcagcgatagatacttcaataagacttgtggtttgtgcggcaacttcaacattttcgccgaagatgactttatgacccaagaggggaccctgacctctgacccatacgattttgcaaactcatgggcactgtcctccggtgaacagtggtgtgaacgcgcatcgccaccatcgtcgtcttgtaacatttcgtcaggcgaaatgcaaaagggactgtgggaacagtgtcagcttcttaaaagcactagcgtgtttgcaaggtgtcacccgctggtggatcctgaaccatttgtggccctttgtgaaaagaccctttgtgagtgtgctggcggccttgagtgtgcctgccccgctctgctggaatacgcaagaacttgtgctcaggaaggaatggtgctgtacggttggactgatcattccgcatgcagccctgtgtgtcctgcaggtatggaatacagacaatgcgtgtcaccttgtgccagaacctgccaatccctccacattaatgagatgtgtcaagagcggtgtgtcgatggatgctcctgtccggaaggtcaattgctcgatgaggggctttgcgtggaaagcactgaatgtccttgtgtgcattcgggcaagagatacccacctggcacctccttgagccgagattgtaacacttgcatctgtcgcaactcgcaatggatttgcagtaacgaggaatgccctggagaatgcctggtgacgggacagtcccatttcaaatcgtttgacaacaggtactttacgttttctggcatttgccaataccttctcgcacgggactgtcaggaccattcgttctcgatcgtgattgagacggtacagtgtgctgacgaccgagatgcggtgtgcactcgctcggtcaccgtgaggcttcccgggcttcacaactcccttgtgaagctgaagcatggcgccggtgtggcaatggacggccaggatgtgcaattgccactgctgaagggcgaccttcgcatccaacacaccgtcaccgcctccgtgcgcctttcatatggggaggatcttcagatggattgggacggacgtgggagattgctggtcaagctctcaccagtgtacgcaggtaaaacctgcggcctctgcggtaactacaacggtaatcagggagatgatttcctgactccatcgggtttggcagaaccgagggtggaagatttcggtaacgcatggaaactgcatggagattgtcaagatcttcaaaaacagcattctgatccatgcgctttgaatccgcgcatgaccaggttcagcgaggaggcctgcgcggtgctgacgagcccgacctttgaagcatgtcatcgtgcagtgagccccctgccataccttcggaattgccgttacgacgtctgcagctgtagcgatggccgtgagtgtctttgtggagcacttgcctcgtacgcggcagcttgcgcaggacgtggggtgcgggtcgcgtggagagaaccaggtcggtgtgaacttaattgccccaagggacaagtgtacctccagtgcggaactccgtgcaaccttacgtgtaggtccttgtcgtacccagatgaggaatgtaatgaggcatgtctggaaggatgtttctgtccacctggtctttacatggacgaaaggggcgattgtgtgcctaaagcccagtgtccttgctactacgatggagagatttttcagcctgaggacattttcagcgaccaccataccatgtgctactgtgaggatggtttcatgcactgtaccatgtcgggtgtccctgggtcgttgctccccgatgcagtcctttcatcgcctttgtcgcatagaagcaaaagatcgctttcgtgtagaccaccaatggtgaagctggtatgccctgcagacaatctgagggccgaaggcttggaatgcactaagacctgccagaattatgaccttgagtgtatgtcaatgggatgtgtgtccggatgtttgtgccctcctggcatggtgagacatgaaaatcgttgcgtggcccttgaacggtgtccatgctttcatcaaggaaaggaatacgcccctggcgaaaccgtcaagatcggttgtaatacttgcgtgtgccaagacagaaaatggaactgcactgatcatgtgtgcgatgcaacctgcagcactatcggaatggcccactacctgactttcgatggactgaaatacctttttcctggggaatgtcaatacgtcttggtccaagactactgcggatcgaacccgggcaccttcaggatacttgtggggaacaagggatgttcccacccttctgtcaagtgcaaaaagagggtgaccattctggtggaaggaggtgaaattgaactgttcgatggtgaggtcaacgtgaagcgcccgatgaaggacgaaacgcactttgaagtcgtcgagtcggggaggtacattattcttctgttgggtaaggccctcagcgtagtgtgggaccggcatctgtcgatttccgtggtgctgaaacaaacgtaccaagaaaaagtctgtgggctgtgtggaaacttcgacggaatccaaaacaacgatctgacctcatcaaacttgcaagtggaggaggaccctgtggactttggcaactcctggaaggtgagctcacagtgtgcagacacccggaaggtgcctcttgattcctcgcctgcaacttgccataacaacattatgaaacagacgatggtcgattcaagttgccgaatccttacttccgacgtgtttcaggactgtaacaagctggtcgatcctgaaccctacttggacgtgtgtatttacgacacctgttcctgcgaatccatcggagattgtgcatgcttttgtgacaccattgcagcctacgcacatgtgtgcgcacagcacggcaaggtggtgacgtggaggaccgcgaccctgtgcccccagagctgcgaagaaagaaacctgcgggaaaatggatacgaatgcgagtggcggtataactcgtgcgcacctgcatgtcaggtgacctgccagcacccagagcccctggcatgtccagtgcagtgtgtggaaggttgccatgcacattgtccccctggtaagattctggatgagctgcttcagacttgtgtcgatccagaagattgtccggtgtgtgaggtcgcaggtaggaggtttgcttccggtaagaaggtgactctgaacccctcagatcccgaacattgtcaaatctgccactgtgatgtggtaaatcttacgtgtgaggcatgtcaagaaccgggagggttggtggtgcctccaactgacgcacccgttagcccgaccactttgtatgtggaagatatctccgaacctcccctgcacgacttctactgcagcaggctcctcgatcttgtctttcttcttgacggatcatcacgactgagcgaagcagaattcgaagtgcttaaagcctttgtcgtggatatgatggaaagactgcggatatcgcagaagtgggtcagagtcgccgtggtggaataccatgacggatcgcacgcatacataggactcaaggaccggaaaagacccagcgaactgaggagaattgcttcccaagtgaagtacgccgggtcccaagtggcgtccacctcggaggtcctgaaatacaccctgtttcagatcttttcgaagatcgatcgccccgaggcatcccggattaccctgctcctgatggcatcgcaagaacctcaaagaatgagccgcaattttgtgcgttacgttcaaggccttaagaaaaagaaggtcattgttatcccagtcgggattggacctcatgcgaatcttaaacagatacggctcatcgagaagcaggcaccagagaacaaggcattcgtgctttcttcagtggatgagctcgagcaacagagagacgaaattgtgtcctacctgtgtgatcttgcccctgaagcaccaccccccacgttgcctcccgacatggcgcaggtgactgtgggaccaggcctgcttggagtgtcaacccttggtcctaagaggaattcgatggtgctcgatgtcgccttcgttctggaggggtcagacaagattggggaagccgatttcaacagatcgaaggaattcatggaagaagtgatccaacgtatggacgtcgggcaggattcaatacacgtgaccgtccttcaatactcgtatatggttaccgtggagtacccattttcagaagcacaatccaagggcgatattcttcagagagtgagagagatccgttaccagggaggtaacaggacgaatactggccttgctctgcgctacctcagcgaccattcatttttggtgagccaaggggatagagagcaagcacctaacttggtgtatatggtgaccggtaaccccgcatccgatgaaatcaagcgcctgccaggagatattcaagtggtgcccattggggtgggacctaacgcaaatgtgcaggaactggaacgcatcgggtggcctaacgcgccgatattgatccaggatttcgagactctccctagagaggcgcccgatcttgtccttcaacggtgctgctcaggagaaggactgcagattccaactctgtctccagcgcctgactgttcccaaccacttgatgtgattcttctgcttgacgggagttcttcgtttcctgcttcatacttcgacgaaatgaagagctttgcaaaagcgttcatatcaaaggccaacattggcccacgattgacccaagtctcggttcttcagtatgggagcataaccacgatagacgtcccctggaacgtggtgccagaaaaggcccatctgctgtcgctcgtggacgtgatgcaaagagaaggcggaccttctcaaatcggagatgccctgggttttgcagtcaggtatcttaccagcgaaatgcatggcgccagaccaggagccagtaaggcagtcgtcattctcgtcactgatgtgtccgtggattccgttgatgctgccgcagacgccgcacgcagcaaccgggtgaccgtctttcctattggaataggagatcgttacgatgccgcccaacttcgaatcttggccggacccgcaggcgattctaacgtggtgaaacttcaaagaattgaggatctgcctactatggtaactctgggtaattcctttcttcacaaactttgtagcggattcgtgcggatttgcatggatgaagatggtaacgagaaaagacctggcgatgtgtggactctgcccgaccaatgtcatactgttacctgtcaacccgacggccagactcttctgaaatcccatcgagtgaactgtgatagaggacttcgaccatcgtgtcctaattcacagtcccctgtgaaggtggaagaaacctgtggatgccgatggacttgcccttgtgtgtgcacggggtcgtcaactaggcacatcgtgacgtttgatgggcaaaactttaagctgaccggatcatgttcttacgtcctttttcagaataaggaacaggatcttgaagtcattctgcataacggagcatgttcgcctggcgccagacagggttgcatgaagtccattgaggtgaagcactcagcgctgtcggttgaactgcacagtgatatggaagttactgtgaacggacgccttgtttcggttccatacgtcggcgggaacatggaagtgaacgtctacggagcaatcatgcatgaggtgcgatttaaccatcttggacacattttcacgtttactccccagaataatgaatttcaattgcaactgagccctaagacctttgcatcaaaaacctacggactttgtggcatttgtgatgagaatggcgcaaatgacttcatgctgcgagatgggaccgtgaccactgattggaaaacgctggtgcaggagtggaccgtccaacgacctggacagacttgtcaaccgattcttgaggaacagtgtctcgttccagatagctcgcactgtcaagtcctgcttctgcctctttttgcggaatgtcataaagtccttgctccagcaactttctacgcgatatgtcagcaggactcctgtcatcaggaacaggtctgcgaagtgatcgcatcctacgcccatctctgtcgtaccaacggagtgtgtgtggattggagaacccctgatttctgtgcaatgtcatgtcctccttcccttgtgtacaatcattgtgaacatggttgtcccagacactgtgacggaaacgtgtcaagctgtggcgaccatccgtcagaaggttgtttttgtcctcctgataaagtgatgctcgaaggttcctgtgtgcctgaagaagcatgcacccagtgcatcggcgaggacggggtgcaacaccagtttctggaggcatgggtgcctgatcaccagccttgccaaatatgcacttgtcttagcggcagaaaagtcaattgtaccactcaaccttgtcctacggccaaggctcccacgtgtggactgtgtgaagtggcgaggcttcgtcagaatgcggatcaatgttgcccagaatatgaatgtgtgtgcgaccctgtgtcctgcgatctcccgccggttccacattgcgaaagggggctgcaacctactcttactaacccaggagaatgtagaccaaacttcacctgtgcatgtcgcaaggaagagtgcaagagagtgtccccgccgtcgtgtccaccacatcgcctgcccactctccgcaagacccagtgttgtgatgaatacgaatgcgcatgtaattgtgtcaattcaaccgtgagctgccctcttggttacctcgcgtccactgcaaccaacgattgtggttgcactaccacgacttgcctgccagataaagtttgtgtgcatcggtcaaccatctacccagtgggtcaattttgggaggaaggttgtgatgtgtgtacgtgcaccgacatggaagatgccgtgatgggcttgcgtgtggcccaatgctcccaaaagccatgtgaggactcgtgccgctcgggttttacttatgtcctgcacgagggtgagtgttgtggcaggtgccttccgtcggcatgtgaagtggtcactggttcgcctaggggtgattcccagtccagctggaagtcggtgggatcccaatgggcttcgcccgagaacccatgtctcattaacgaatgtgttcgggtgaaggaggaagttttcattcaacaaaggaatgtgtcgtgtccgcagctcgaggtgcccgtgtgcccctccggttttcagctgtcatgtaaaacttccgcgtgttgtccttcatgtagatgtgaaagaatggaagcatgtatgctcaatgggaccgtcatcggaccaggcaagaccgtcatgatcgacgtctgtactacttgtcgctgtatggtgcaagtgggcgtcatctccggtttcaagctggagtgtcgaaagacgacttgcaatccatgtcctctggggtacaaggaggaaaacaacactggtgaatgctgcgggcgctgtctccctaccgcatgcactattcaactccgcggaggacagatcatgacgctgaagcgggatgagacgcttcaagatggatgcgatactcacttttgcaaggtgaacgaaagaggcgagtacttttgggaaaagcgcgtgactgggtgtccaccatttgacgagcacaagtgtcttgccgagggaggcaagattatgaagattccaggcacttgttgtgatacctgtgaagaacccgaatgcaacgatattaccgcacggttgcaatacgtgaaggtgggatcctgtaagtcagaggtcgaagttgatattcattactgtcagggaaagtgtgctagcaaggcaatgtacagcattgacattaatgacgtccaggatcagtgctcatgttgctcgcctacccgaacggaacctatgcaagtagcactccattgcactaatggctcggtggtgtaccatgaagtgctgaacgcgatggagtgtaaatgttcaccccggaaatgttcgaaa

SEQ ID NO: 12454 - DNA, 8439 bp, Artificial Sequence
  derived and/or modified sequence
atgatcccagcccgtttcgcaggagtgcttctagctctagccctgatccttccaggcacgctgtgtgcggagggcacccgagggaggagctccacagctaggtgttccctgttcggaagtgattttgttaataccttcgacggtagtatgtacagctttgccgggtactgcagctacttactggccggaggctgccagaagagaagcttctcaattatcggcgattttcaaaacggaaaacgcgtttcactatcagtgtatctgggtgagttctttgacattcaccttttcgtcaacggtaccgtgacgcagggtgatcagcgcgtcagcatgccctacgcaagcaagggattatatctggagactgaagcgggatattacaaattgagcggcgaggcttacgggttcgtcgcacgcatagatgggtctggaaatttccaggtgctgttgtctgacaggtacttcaacaagacatgtggcttgtgcggtaacttcaacatatttgctgaggacgactttatgacccaggaaggaactttgacaagtgatccatacgacttcgctaactcatgggcgttaagttcgggggagcaatggtgtgagagagcctcccccccctcctcctcttgcaacatcagtagcggcgagatgcagaagggattgtgggagcagtgccagcttttgaagagcacttcagtcttcgcacgatgtcatcctctggttgaccctgagccgttcgtggccctgtgcgagaagacgctgtgtgagtgtgcaggcggactcgagtgtgcatgccccgccctcctcgaatatgcaaggacttgtgcccaggagggtatggtcttatatgggtggaccgaccattccgcttgtagccccgtctgtcccgccgggatggaataccggcagtgcgtcagcccctgcgcccggacctgtcagagtctgcacattaacgaaatgtgtcaggagcgctgcgtggacgggtgttcttgccccgaaggtcaactgctggacgaggggctatgtgtggagtcgacggagtgcccctgtgtgcacagcgggaaaaggtacccgcctggcactagtctttctcgagattgtaatacctgtatctgccgtaactctcaatggatctgttctaatgaggagtgcccaggcgaatgcctggtgactggacaaagccactttaagtctttcgacaacaggtacttcaccttttcaggcatctgtcagtatttgcttgctagagactgccaggatcactccttttccatcgtcattgagaccgtccagtgtgctgacgatcgggacgccgtctgtactaggtccgtcacagtaaggttgccgggcctgcataatagtttggtcaaactgaagcacggcgctggcgtggcgatggacggccaagatgtgcagttgccactcctcaagggcgaccttagaatccagcacacagtgacagcctccgttcggctgtcatacggtgaggatctgcagatggattgggatggcagggggaggcttctagttaaactgtcccctgtctacgccggcaaaacttgcggactgtgtgggaattacaacgggaatcagggcgatgattttctgacaccgagcggcctggcagagcctagggtggaagattttggaaatgcttggaagctgcatggagattgccaggatctgcagaaacagcattcagacccctgcgcccttaatccccgcatgacaaggttcagcgaagaggcatgcgctgtgctgaccagcccaacttttgaggcgtgccacagggccgtgagtccactgccttaccttagaaattgccggtacgacgtgtgctcgtgctccgacgggcgggaatgcctatgcggcgcgctcgcctcttatgctgcggcctgcgctggtcggggtgtgcgggtggcctggcgcgaacccggcagatgcgaactgaattgcccgaagggccaggtttatttgcaatgcgggacaccttgtaacttgacttgcagaagtctgtcctatccagatgaggagtgcaacgaagcatgcctcgagggttgtttttgtccacctggactgtatatggacgagcggggagattgcgtgcctaaggcccagtgtccctgttactacgacggagagatattccaacctgaagacatcttcagtgatcaccacaccatgtgttactgtgaggatgggtttatgcattgcacgatgtcgggggttcctggatcactcctgccagacgccgtgctgagttcccccctaagtcatcgcagcaagcggtccctttcttgtcgaccccctatggttaaactggtctgccccgcagacaatttacgggccgaagggttggaatgcacaaagacatgccagaattatgatttggaatgtatgtcaatgggctgcgttagtgggtgtctgtgtccaccagggatggtgagacacgagaatagatgcgtagcgctagagcggtgtccttgttttcatcaaggcaaggaatacgcgcccggggagacggtgaagattggatgcaatacttgcgtgtgccaagacagaaagtggaattgcacagaccatgtctgcgacgcgacatgttctacaatcgggatggcccattatctaacttttgacggactgaagtatctgttccctggagaatgccagtatgtgttggtgcaggactactgcggcagtaatccaggaacttttagaatcctcgtagggaacaaaggctgctctcatccaagcgtaaaatgcaaaaagcgcgttacgattctcgtggaaggcggcgaaattgaactattcgacggggaggtgaacgtgaaaagacccatgaaagacgaaacacatttcgaagttgtggagagtggaaggtacataatactactattggggaaagcgcttagtgtggtgtgggataggcacctgtccatatctgtcgtccttaagcagacatatcaagaaaaggtttgcggtctgtgtggaaacttcgacggaatacaaaacaacgatctcactagttcaaacttacaggtggaagaggaccctgtggactttggtaacagttggaaggtctcttcccaatgcgccgatacccgaaaagtcccgttagatagtagtccagccacctgccacaataatattatgaagcagactatggtggactcctcttgcaggattcttacttcggacgtgtttcaggactgcaacaagcttgtggaccctgagccatatctggacgtgtgcatttacgacacttgtagttgtgaatcgattggggattgcgcctgtttttgtgataccatcgctgcctatgctcatgtctgtgcccagcacggtaaggtggtaacatggagaacagcaacactttgtcctcagagctgcgaggagagaaatttgcgcgagaacgggtacgagtgtgaatggagatacaattcttgcgcacctgcctgccaggtaacttgccagcatccggaacccctagcctgccccgtgcaatgcgtggaagggtgccatgcacattgcccacccggcaaaatcctcgacgaactcctccaaacctgcgtggacccagaggactgccctgtctgtgaagtggcggggcggcgtttcgcctctggtaaaaaggtgacattaaatccctctgatccggagcactgccagatatgccactgcgacgtcgttaacctgacctgtgaggcttgccaagagcctggcgggctcgtagtgcctcccactgatgcaccggttagtccgaccaccctgtatgtggaagacatctcagaacctcccctccatgacttttattgctcgagattgctggacctggtttttttgctggatggtagcagtcgtctctcggaggcagagttcgaggtgctcaaggcatttgttgtcgatatgatggagcggttaagaatctcccagaaatgggtaagagtcgccgtggttgaatatcatgatggctcacatgcgtatataggtctcaaggatcgaaaacgtcctagcgagctgcgtaggatcgcgtcacaggtgaagtatgcggggtcgcaagtagcctccacatccgaggtcctgaaatataccctgttccagatatttagcaagatcgaccgacccgaagcctcccggatcaccttgttactcatggcctctcaggagccccagcgcatgagcagaaactttgtacgctacgtgcagggtctaaagaaaaagaaggtcatcgtaattcctgtcggaataggtccccacgccaatttgaaacaaataagactgatcgagaagcaggctccagaaaataaagccttcgtcctgtcttccgttgacgagttggaacaacagcgggatgagatagtgtcttacctgtgtgatctggcccctgaagccccccctcccaccctgccaccagacatggctcaggtcacggtggggcctggcttgctgggtgtttctacactcggcccaaagcggaacagtatggttttagacgttgcttttgtgctggagggctctgacaaaattggggaggctgactttaatcggagcaaagaatttatggaagaggtaattcagaggatggacgttgggcaggactcaatccatgtgactgtcctgcagtactcatacatggttacagttgagtatccgttttccgaagcgcagagcaaaggagatatcctgcagcgagttagggagattagataccagggtggtaacaggactaacaccggattagctctgcgctatctgtcagatcattccttcttagtctctcagggggaccgcgaacaggcgccgaaccttgtgtacatggttacagggaaccccgccagtgacgaaatcaagcgtctaccaggcgacatacaggtggtgccgataggagtcggcccaaatgcaaacgtacaggagctggagagaattggttggcctaacgcgcccatcctgattcaggactttgagacgctgccgcgcgaagcccctgacctagttttgcagaggtgctgctcaggtgaaggactgcagattccgaccctgagccctgcgcctgactgcagccagcctctggatgttatcctcttattagacgggagctcaagctttcctgcaagttatttcgatgaaatgaagtcttttgcgaaggcatttatctctaaggcgaacattgggccaagacttactcaggtgagcgtgctccagtatggctctattaccacaattgacgttccatggaacgtcgtgccagagaaggcgcacttgctgtcattggttgacgtgatgcagagagaaggtggaccctcccaaattggggacgccttgggttttgccgtccgatatctgacctccgagatgcatggagccagacccggcgcatcaaaagctgtggtcattctggtcactgacgtgagcgtcgacagcgtggacgcagctgccgatgccgcaaggtcaaatcgggtaactgttttccctatcggaatcggggatagatatgacgccgcccagctgaggatcctggccggtccagcgggcgattcgaatgtcgtgaagctccagcgaattgaagacttgccgactatggtcaccctcggcaactcttttctccacaagctgtgctctggctttgttcgcatatgtatggatgaggacgggaatgagaagcgtcccggagacgtgtggacactaccagaccaatgccataccgtcacatgtcagcctgacggtcagaccctgctcaaatcacacagggtgaactgcgaccggggcctgaggccgagctgtcccaacagccaatccccagtgaaagtggaagaaacctgtggatgcagatggacttgcccttgcgtatgcacaggatcctccacaagacatattgtcacttttgacggccagaattttaagctgactggaagctgttcttatgttctcttccagaacaaggagcaggatttagaggtaatcctgcataacggcgcctgttctccaggagctaggcagggctgcatgaagagcattgaggtgaagcatagtgcgctcagcgttgaactgcacagcgacatggaagtgaccgtcaacggacgattagtctccgtcccttatgtaggagggaatatggaagttaacgtgtatggagctattatgcatgaggtacgatttaaccacctgggccacattttcacttttacaccccagaacaacgaatttcaactgcagctgtcccctaaaacattcgcttcaaagacttatggactctgcgggatctgtgacgaaaatggcgctaacgactttatgttacgggatggcacggtaactacagactggaagactctcgtacaggagtggaccgttcagcgcccggggcagacttgccagcctatattggaagagcagtgtcttgtgcctgactcttctcactgccaggttctcctcctgcctctgttcgcagagtgccataaggtccttgcacccgcaaccttctacgcgatatgccaacaagacagttgccatcaggagcaggtctgcgaggtcatcgctagttacgctcacctctgtcgaaccaatggagtttgtgtggattggaggacccccgacttctgtgcaatgtcttgccccccatcattagtgtacaatcactgcgagcacggttgcccccgccattgcgatggaaacgttagttcttgcggcgatcatccctccgaggggtgtttttgccctcccgataaagttatgctagagggcagctgcgtgccagaggaggcctgcacccagtgtataggtgaagatggggtgcagcaccaatttctggaggcatgggtgcccgaccatcagccctgtcagatttgcacctgtctgtccgggagaaaagtgaactgtaccacccagccgtgccctaccgcaaaggccccaacctgcggactctgtgaagttgctaggttgcggcagaacgccgaccagtgctgtcctgagtacgaatgcgtgtgtgatccagtctcttgtgacctaccccctgtgcctcactgcgagcgtggcctgcagccgaccctgactaatcccggcgagtgtcgccccaacttcacttgtgcctgccgtaaagaagaatgcaagcgggtgtctcccccctcttgccccccacataggcttcccacgctgcggaagacgcagtgttgcgatgaatacgagtgtgcatgcaactgcgtcaattctaccgtatcctgtccattaggatatctcgcttctaccgcaaccaatgactgtggttgtactaccacaacctgtttacctgacaaagtgtgtgtgcatcgatccaccatctacccagttgggcagttctgggaagagggctgtgatgtctgtacctgtactgacatggaggacgccgttatgggcctgcgcgtggcgcagtgttcgcagaagccctgcgaagacagctgtcgcagcggatttacgtatgtccttcacgagggcgagtgctgtggaaggtgtttgccaagcgcctgtgaggtcgttaccggcagccctcggggggactcgcaatcttcatggaagtccgtggggtctcagtgggccagccctgaaaacccctgccttattaacgaatgtgtccgcgtcaaagaagaagttttcatacaacagcgaaacgtttcatgtccacagctggaggttcccgtgtgcccatccggttttcagctgtcctgtaagacttctgcctgctgtccctcttgtcgctgcgagcgaatggaggcctgcatgctcaacggcaccgtcatcggccccggaaagaccgttatgattgatgtttgcactacctgccgctgcatggtgcaggtgggcgtgatctctggatttaagttggaatgcaggaagacaacctgtaatccatgccccctaggttacaaagaagaaaacaatactggcgaatgctgcggcagatgcttacctaccgcatgcaccatccagcttagaggcggccagatcatgaccttgaagagggatgaaacccttcaggatggttgcgacactcacttctgcaaagtcaacgaacggggggaatacttctgggagaaacgcgtgacaggctgccctcccttcgacgaacacaagtgtctggccgaaggggggaagattatgaaaatccctgggacctgctgcgatacatgtgaagaacccgaatgcaatgacatcacggcccggctgcagtatgtgaaggtggggtcatgtaagtcggaggtggaagtggatatccactattgtcagggcaagtgtgcctccaaggctatgtactccatagatataaacgatgtacaagatcagtgctcatgttgctcccctacgagaacagagcccatgcaggtcgctctgcactgcacaaacgggagtgtggtgtaccacgaggttctgaatgccatggagtgcaagtgttcgcctaggaagtgtagtaag

SEQ ID NO: 12455 - DNA, 8439 bp, Artificial Sequence
  derived and/or modified sequence
atgatccccgccagattcgccggcgtgctgcttgccctcgccctgattcttccaggaacactgtgcgcggagggcacccggggtcgatccagcaccgcccggtgctccttattcggcagcgatttcgtcaatacgttcgacggaagcatgtacagtttcgccggttattgctcttatctcctggccggcggatgccagaagcggagctttagtattatcggggattttcaaaacgggaagagagtgtcgctctccgtgtatctgggtgaattctttgatattcatctgttcgtgaatggcacagtgacacagggggatcaacgcgtaagcatgccctacgcaagcaaggggctttatctcgaaactgaggcaggatactacaagctgtcaggggaggcatacggatttgtggctcgtattgatggctcaggtaactttcaagttctactgtccgatcggtattttaacaagacttgcggactgtgcggcaactttaatatcttcgctgaggatgacttcatgactcaagagggtacattgacttctgatccctatgactttgcaaacagttgggctctgtcatctggcgagcagtggtgcgaacgggcgtctccaccaagctcttcttgcaatatttccagcggggagatgcagaaaggcctttgggagcagtgtcagttgttgaagtccacttcagtattcgcacgctgtcaccctctagtggacccggagccctttgtagcactgtgcgaaaaaaccctgtgtgagtgcgccgggggcctggagtgtgcgtgccctgcactgctcgaatacgctcggacctgcgctcaggagggtatggttttgtacggttggaccgaccatagcgcatgttcccccgtctgcccagcgggcatggaataccgccagtgcgttagcccatgtgcacggacttgtcagtccctgcatattaacgagatgtgtcaggagcggtgcgtggacgggtgtagctgtcccgaaggacaactgctggatgagggcctgtgtgtggagtcgaccgagtgcccctgcgtccattccggcaaaagatacccccccggcacctcacttagcagggattgtaatacttgcatttgtcgaaactcacagtggatatgctctaatgaggagtgccctggcgagtgtctggtgactggccagtcgcatttcaaaagtttcgataacagatatttcacattttccggcatctgccagtacttgctggctcgtgactgccaggaccactctttctctattgttatcgagaccgtgcagtgcgcagacgacagggatgccgtgtgtaccagatctgtgacagtaagactccctggcttacacaactctctggtaaagctgaagcacggggctggggtggctatggatggacaggacgtgcagttaccattgttgaagggtgatctgcggattcaacacactgttacagcctctgtgaggttgtcctatggagaagatttacagatggattgggatggtagggggcgcctactggtgaaactaagcccggtgtatgctggaaaaacctgtgggctttgcggtaattacaatggaaatcaaggtgatgactttctgacaccttctggccttgccgagcctcgcgtcgaggattttggcaacgcttggaaactccacggtgactgccaggatttacaaaaacaacatagcgatccttgcgccctgaacccacggatgacccgcttttccgaagaggcctgtgccgttctgacatcaccaaccttcgaagcttgccaccgcgccgtgagtccgctgccataccttagaaattgcaggtatgacgtttgcagttgctctgatggcagagaatgtttatgtggcgctctggccagctatgctgcagcctgcgccgggcgcggagtgcgcgtggcctggcgggagcctgggcgctgtgaactaaactgcccgaagggacaggtttatcttcagtgcgggactccatgtaacctgacatgtcgctctctatcctatccggacgaggagtgtaacgaggcttgtctcgaggggtgcttctgtccgccaggactgtacatggatgagaggggcgattgcgttcctaaagcgcagtgcccttgttattatgacggcgaaatcttccagccggaggatatctttagcgaccaccacaccatgtgttactgtgaggacgggttcatgcactgtactatgagtggagtgccagggtctttactccccgacgcagtgctgtcctctccactgagccatcgctcgaagcgatcattgagttgcaggcctccaatggttaagcttgtgtgcccagccgataatcttcgcgctgagggcctcgagtgcaccaagacctgtcagaattacgatctagagtgtatgagcatgggatgtgtgtctgggtgtctttgccctccggggatggttcggcacgagaaccgctgcgtggcacttgagcgctgtccctgttttcaccagggcaaggagtacgcaccaggcgagactgtaaaaattgggtgtaacacgtgcgtctgtcaggacaggaagtggaactgcacagaccatgtatgcgatgctacttgttctacaatcggaatggctcactatctgacatttgatggtctcaaatatctgttccccggggaatgccagtacgtcctggtccaagattattgcgggagtaacccaggcacatttcggattctggtggggaacaaagggtgtagtcaccctagtgttaagtgcaagaagagggtaacaattttggtggagggaggagaaattgaactcttcgatggggaggtaaacgtgaagcgccccatgaaagacgagacccattttgaagttgtcgaatccggccgctacatcatcctgctgctcggtaaggccctaagcgtggtttgggatagacacctatctattagtgtggtgctgaaacagacctaccaggagaaagtgtgcgggttgtgcggtaattttgatggaatccagaacaacgacctcacatcgagcaacttgcaggtcgaggaggatcccgtggatttcggaaattcttggaaagtgtcatcccagtgcgctgataccagaaaggtcccgttagattctagccccgccacttgtcacaataacatcatgaagcagacaatggttgatagctcttgccggattctgacgtccgacgtgttccaagattgcaataaactcgttgacccagaaccctacctggacgtctgtatttacgatacctgctcatgcgagagcatcggagactgtgcttgcttttgcgataccatcgccgcctatgctcacgtttgcgcgcagcacggaaaggtggttacgtggagaacggctacgctgtgcccccagtcctgtgaggaacgaaatctccgagagaatggctacgagtgcgagtggcgctataattcttgcgctccagcatgccaggtgacctgccagcacccggagccattagcatgtccagtccagtgcgttgaaggatgccacgctcactgtccaccaggcaaaatcctggatgagctgttgcaaacctgtgtggaccctgaagattgtcccgtgtgcgaggtggccgggagacgattcgcctccggcaagaaggtcacattaaatccttccgatccagaacactgtcaaatctgtcattgtgacgttgtcaacctgacatgtgaggcttgtcaggagcccggcggtctggttgtgccaccaactgatgcgcctgtgtccccaaccactctctacgtagaagatatatccgagcctccgctgcatgacttctactgttctagactcctggatctcgtgtttttgctggatggctccagccgcctgagcgaagcggagttcgaagtgctcaaggcattcgtcgtggatatgatggaaagattgagaatttcccagaagtgggtccgggtggccgtggtcgaatatcacgatggctcccacgcctatattggtctgaaggacagaaagcggccgtccgaactgagaagaattgcctctcaggttaagtacgctgggtcccaggtcgctagcacctccgaagttctgaagtatactctgttccagatattctctaagattgaccgcccggaggcaagtcggataacactcctcctgatggcatcacaggaaccccagaggatgtccagaaatttcgttcgatacgtccaaggcctcaagaagaaaaaagtgattgtcattcccgtcggtataggtccccacgcaaatctaaagcagatccgtctgatcgagaaacaggcacctgaaaataaggcgtttgtgctaagtagtgtagacgagctggagcaacaacgagatgagatagtgtcctacctgtgcgacctggcccctgaagctcccccacctacacttcccccagacatggcccaagtcacggtaggaccggggctcctgggggttagcactttggggcctaaacggaacagcatggtcttagacgtcgcctttgttttggaaggatctgacaaaatcggtgaggccgactttaatcgaagtaaagagttcatggaggaagtgattcagcggatggatgtgggccaggactccatacacgtaaccgtcctgcagtactcctatatggttactgtggagtaccctttttcagaagcacagtccaagggagacatacttcagcgggtgcgcgagatacgatatcagggaggtaatcggacaaataccggcctcgcgctgcggtacctaagtgatcactccttcttggtcagtcagggggaccgcgaacaggcaccaaacttggtgtacatggtcaccggaaatcctgcctctgatgaaatcaagcggctgccaggcgacatccaggttgtgcccattggcgtcggtcccaacgccaatgtgcaggagttagaaagaatcggctggcccaacgcacccatcctaattcaggactttgaaactctgcctcgggaagcaccagatctggtgctgcagaggtgttgtagtggtgaaggtctacagatccctacactgtctccagcacctgactgttctcaaccgttggatgtaatacttttgctcgatggctcgtccagcttcccagctagttacttcgacgaaatgaaatctttcgctaaagctttcattagcaaggctaatatcggtcctagactcactcaggtttcggtacttcagtacggctcaataactaccatcgacgtgccgtggaacgtagtgcccgagaaggcgcacctcctgagtctcgtagacgttatgcagcgcgaaggtgggccgtcccaaattggcgacgctttgggatttgccgttcggtatttgaccagcgagatgcacggggctcggccaggcgcttccaaggctgtggtgatcctagtcacagacgtgagcgtggatagcgtcgatgccgcagctgatgcagctaggtcgaatcgggttaccgtgtttcccatcggaatcggagatcgatacgacgccgctcaactcagaatcttggccggccctgctggggattctaatgtggtaaagctccagcgcattgaggaccttcctacaatggttaccctcggaaactcattcctgcacaagctctgcagtggattcgtgcgaatttgtatggacgaggatggaaacgagaagagaccaggggacgtgtggacactgcctgaccagtgccacacggtcacctgtcaacccgacgggcagacattgttgaaaagtcatcgggttaattgcgacagaggcctgcggccatcttgccctaattcgcagtcaccagtcaaggtggaggagacttgtggctgcaggtggacgtgcccctgcgtgtgtacgggatcctccactcggcacatcgtgacatttgatgggcagaactttaagctaaccgggagctgttcctatgttctgttccagaacaaagaacaggacctggaggtgattctgcacaatggcgcttgtagccccggcgcccggcaaggatgtatgaagtctatagaagtaaaacacagcgcactctctgtcgaattgcactctgatatggaagtgaccgtgaacgggcggcttgtcagcgtgccctacgtaggcgggaatatggaggtgaatgtatacggcgcgatcatgcatgaggtgcgcttcaatcacctcgggcacatctttactttcaccccgcaaaataatgagttccagctgcaactctctcctaagacatttgcatcgaagacttacggtctgtgtggaatttgcgacgaaaatggagctaacgacttcatgctacgggatggaaccgttacaaccgactggaaaacgttggttcaggagtggacagtgcagcgcccaggacagacgtgtcagccaatactggaggagcagtgccttgttccagacagcagtcattgtcaagtcctgctgcttcctctatttgccgagtgtcataaagtactagctccagccacgttttacgccatctgtcagcaggattcatgccaccaggagcaggtttgtgaagtgatcgcgtcttacgcgcacctgtgtagaactaacggggtgtgtgtcgactggagaactcctgacttctgtgcaatgagctgccccccatctcttgtttataaccactgtgaacacggttgcccacgtcactgcgacggaaatgtcagctcttgcggagaccacccctctgagggttgcttctgcccgcccgataaagtcatgctggaaggtagctgcgtaccagaagaagcctgtacgcaatgtattggagaggacggtgtgcagcatcagttcctggaggcctgggtgcctgatcaccagccctgtcaaatttgtacttgcttgtcgggcagaaaggtcaactgcaccacccagccttgccctacggcgaaagctcccacatgtgggctatgcgaagtcgcccgtctccgacagaacgcggaccaatgctgccccgagtacgaatgtgtttgcgatccggtgagttgtgacctgccacccgtacctcactgtgagcggggcttacaacccaccctgactaatccaggagagtgccggccgaactttacttgtgcttgccgcaaagaagagtgcaaacgtgtgtctcccccgagctgccctccgcacaggctgcctacgttgcgcaagactcagtgctgcgatgaatatgaatgcgcatgcaactgtgtgaacagtaccgtaagctgtccccttggatacctggcttctacggccacaaacgactgtggatgtaccacgaccacatgcctaccagacaaggtgtgcgtgcatagatcaactatttaccccgtgggacagttttgggaggagggttgtgatgtgtgtacatgcaccgatatggaagacgctgtgatggggctgcgagtggcacagtgttctcaaaaaccctgcgaagatagctgtaggagcggctttacctatgtactgcacgagggggaatgttgtggacgatgccttccgtccgcctgcgaggtagtgacaggttctccccggggcgactctcagtccagctggaaatcagtgggaagccaatgggcatcccccgaaaacccctgcttaattaacgagtgcgttagagtgaaggaagaagtcttcatacagcagcggaatgtcagctgccctcaactcgaagtccctgtgtgtccctcagggttccaactgtcttgcaagacctccgcctgctgcccttcttgtcggtgcgaacgcatggaggcctgcatgttgaatggcacagtcatcgggccaggcaagactgtcatgattgacgtctgtactacttgtcgttgtatggtgcaggtgggtgtcattagcggttttaagttggagtgtagaaagacgacgtgcaacccctgtcctctgggctataaagaagaaaacaatacgggtgaatgctgcggcaggtgcctcccaacagcatgcaccattcagctgcggggaggccaaatcatgactctgaaaagggacgaaacactccaggatggttgtgacactcacttctgtaaggttaacgaacgcggagaatacttctgggagaagcgcgtaacggggtgcccacccttcgacgagcacaaatgcctggccgaaggaggaaagattatgaagatacctggcacctgttgcgacacgtgtgaggaaccggagtgtaatgatattacagcccggctgcagtacgtcaaagtggggtcttgtaaatccgaggtcgaggtggacatccactattgtcaggggaaatgtgcctcaaaagccatgtacagcattgatataaacgacgtccaggaccagtgttcctgttgctcgcccacacggaccgagcctatgcaggtcgcacttcactgtactaacggttcagtggtctaccatgaagtgctcaacgctatggaatgcaagtgtagtccccgcaaatgcagcaaa

SEQ ID NO: 12456 - DNA, 8439 bp, Artificial Sequence
  derived and/or modified sequence
atgatccctgcacgattcgccggcgtgctgctggctctcgcgctgatcctgccaggcacgctctgcgccgaaggaacccgcgggagaagcagtacagctcgatgcagcttattcggctctgatttcgtgaacacctttgacgggagcatgtatagcttcgccgggtactgttcttatctgctggcaggagggtgccagaaacggagcttctctatcattggcgatttccagaacgggaaacgtgtcagcctgtcagtctacctcggggagtttttcgatattcacttgttcgtgaatggaacagtaacacagggtgaccaaagggtaagcatgccctatgctagcaagggattgtatctggaaacagaggccggctactacaaattgtctggagaggcatatggctttgtggcccgtattgatggttcagggaactttcaggtgttactcagcgataggtatttcaacaaaacgtgtgggctctgtggcaacttcaatatttttgctgaagatgactttatgacgcaggaaggaaccttgaccagtgatccctacgacttcgcaaattcatgggccttgtcttcaggtgaacagtggtgcgagagggcctccccgccaagctcttcatgcaacatatcctccggcgaaatgcaaaaaggcctgtgggaacagtgccagctgctgaaatcgacttccgtcttcgcccgatgccatcctctggtggatcccgagccattcgtggctctgtgtgagaaaaccctatgtgagtgcgctgggggtctggaatgtgcctgccctgccttgttggagtatgctcgcacatgcgcgcaggaaggcatggtgctctacgggtggacagatcatagcgcgtgtagccctgtctgcccagctgggatggagtacaggcagtgtgtgagcccctgcgccagaacctgtcagtccctgcacataaatgaaatgtgccaagagagatgcgttgatggctgtagctgtcctgaggggcagctcctggatgaaggcttatgtgtggagtctacagagtgtccttgtgtccattcagggaagaggtacccccccggtacgagcctctctagggattgcaatacctgtatctgcaggaattctcagtggatttgttctaacgaggaatgcccaggagaatgcctggtcactggacaatcccatttcaagagttttgacaatagatactttaccttttccggaatctgccagtacctgcttgcccgggactgtcaggatcactccttctcgatcgtgattgaaaccgtgcaatgcgccgatgaccgagacgcagtctgtacacggtccgtgaccgtacgactgcccgggctgcacaactccctcgtcaaacttaagcatggcgctggagtcgccatggacggccaggatgtgcagctgccactgctcaagggagatctgagaattcagcacaccgtaacagcctctgttcgactgagctatggcgaggacctgcagatggattgggacggccggggcaggctacttgtgaaattgtcacctgtctatgcagggaagacatgcggactgtgtgggaattacaatggtaaccagggggatgactttctgaccccatcgggcctcgcagagccccgagtggaagactttgggaacgcttggaagctgcatggcgattgtcaggacctgcagaagcagcactccgatccgtgtgctctgaacccccgtatgacaagattctccgaggaggcatgcgcagtgctaacatcccccacattcgaagcctgccatagggccgtgagccccctcccatacctgaggaattgcaggtacgatgtttgttcatgttctgatggcagagaatgcctatgcggggctttggcctcttacgccgccgcttgtgcagggcgaggtgtgcgagtagcttggagggaaccggggaggtgcgagttgaattgtcccaaagggcaggtctacctgcagtgcggtacgccatgtaatcttacctgccgaagtctgtcataccccgatgaggagtgcaatgaggcctgcctcgaagggtgcttctgccccccaggtctatatatggacgaaagaggcgattgcgtgccgaaggcacagtgtccttgttactatgacggggaaatctttcagccagaagacattttctcagaccatcacaccatgtgttattgcgaggacggtttcatgcactgtacaatgagcggggttccaggatctcttctccccgacgccgtgctttcaagcccactctcccatagatctaaaagatctctgtcatgtaggccgcccatggtgaagctggtttgtcctgccgacaatttgcgagccgagggcctcgaatgtaccaagacctgccagaattacgatctcgagtgcatgtctatgggttgcgtgtctggctgtctgtgtcctccaggtatggtgcgacacgaaaatcgctgtgtcgccctcgagaggtgtccctgttttcaccaggggaaggagtacgctccaggcgagacggtcaagatcggatgcaatacgtgtgtttgtcaggaccgaaaatggaactgtaccgatcacgtctgtgacgcgacttgttccactatagggatggcgcactacctgacgtttgacggtttgaagtacctgttcccaggcgaatgtcagtatgtccttgtacaagattactgtgggagtaatcctggcacattccgaatcctggtcggaaataaaggctgcagccacccttcagtgaagtgtaaaaaaagagttacaattctcgtggaggggggagagatcgaactctttgacggggaggtgaatgtcaagcggcccatgaaggacgaaacccatttcgaggtggtggagagtggccgatatattatactgctgcttggtaaagccctgagcgtggtgtgggaccgccacctgagtatcagcgtcgtgctgaagcaaacctatcaagaaaaggtgtgcggactttgcgggaatttcgacggcatacaaaataatgatctaacttcaagtaacctgcaagtagaagaggatcccgtcgatttcgggaacagttggaaagtgtcgtcccagtgcgctgacactagaaaggtgcctcttgactccagcccggccacctgtcataataatattatgaagcaaaccatggtcgatagctcctgcaggatcctgacaagtgatgtcttccaggactgcaataaactggtcgatcctgagccttaccttgacgtttgcatatatgatacatgtagctgcgagagcatcggggattgtgcctgcttctgtgacaccatcgcggcttacgctcacgtctgtgcccagcacggaaaggtagtcacctggaggacagcaaccttgtgtccccagtcctgcgaagaaagaaatctgcgagaaaacggctacgaatgtgaatggaggtataatagttgcgccccagcatgccaggtcacatgccagcatccagaacctctggcttgtcctgtacagtgcgtggaaggctgccacgcacattgccccccaggaaaaatcctagacgaactcctgcagacctgtgtggatcccgaggattgccctgtctgcgaagtagccggaagaaggttcgccagtggaaaaaaagtgactctgaacccatccgacccagaacactgccagatctgtcactgcgacgttgtcaacctaacttgtgaagcgtgtcaggagccgggcggactggtggtgccccccaccgacgcccccgtgagcccaactacgctctacgtggaggacattagcgagccccctctccacgacttttactgttcacgattgctggatctggtgttcctgctggacgggtcttccagactcagcgaggccgaattcgaagtgctgaaagctttcgtcgttgatatgatggaaagacttaggatcagccaaaaatgggtcagagtggcagtcgtggaataccacgatggtagccacgcatacatcggtctgaaggacagaaaaagaccctctgaactaaggcgaattgcttctcaagtaaagtacgcaggttcccaagtggcgtccacctctgaagtgctcaagtacacactgttccaaatattttctaaaattgatcgaccggaggcctccagaattaccttgctgctgatggcctcccaggagccacagaggatgagccgaaattttgtgcgctacgtgcagggcctcaaaaaaaaaaaggtaatcgtcatcccagtggggatcggtccccatgcaaatctgaagcaaatcaggcttatagagaagcaggctcctgaaaacaaggcttttgtgctatcaagcgtggatgaactcgagcagcagagggacgaaatcgtgagctacttgtgtgacctggctcccgaggccccccccccaacgctgcctccagacatggcacaagtgacagtcgggcccgggctcctgggggtctctaccctcggccctaagcgtaatagtatggtgctagacgttgccttcgttcttgaaggttctgacaaaattggcgaagctgactttaacaggagcaaagagtttatggaagaggttattcagagaatggatgtcggacaggactcaatccatgtaaccgtgcttcagtactcctatatggtgacagtagagtacccattttccgaggctcagtctaaaggggacatcttgcaacgagttagggagatccggtaccagggaggcaatagaactaacacaggtcttgcactcagatatctgagcgatcattctttcctcgtgagccagggcgaccgagagcaggcaccaaatttggtgtacatggttacaggaaacccagcttctgatgaaattaaacgtttacctggggacattcaggtggttccaatcggcgtggggcccaacgctaatgtacaagaactcgaacgaattgggtggccaaacgcacctattttaattcaagattttgagactctgccaagggaggcaccagatctcgttctgcagaggtgctgtagcggtgagggcctccagatccctaccctgagccccgccccagattgcagtcagccgttagacgtgattttgctccttgacggcagtagcagctttcccgcttcttatttcgacgaaatgaagtcatttgccaaagcctttatctcaaaggcgaacatcggtccaagactgactcaggtgtctgtcttgcaatacgggtctataactaccatcgacgtgccctggaatgtggtgccagaaaaggcacacttgctgagcctcgttgacgtgatgcagcgagaaggcggaccatctcagattggtgacgccctcggcttcgccgtgaggtacctgactagtgaaatgcatggcgcccgcccaggggcatctaaggcggtggtcatcctggtgaccgacgtgagcgtagacagcgtcgacgcggccgctgacgccgccagaagtaacagggtcacagtcttcccgattgggatcggtgataggtacgacgctgcgcaactgaggatcctggctggtccagccggagattctaacgtggtgaaactacagaggatcgaggatttgcctaccatggtgacgctcggcaactcttttctccacaaactctgcagcgggttcgttaggatctgtatggatgaggatggtaatgaaaagaggcccggagatgtctggacactccccgaccagtgccacacagtaacatgtcagcctgatggtcagacactcctgaagagccaccgagttaactgcgacaggggcctgagaccctcctgtccgaattcccagagccctgtcaaggtggaagagacctgtgggtgccgatggacctgtccctgcgtgtgtactgggtcctcgacaagacatatcgtgacgtttgacggtcagaattttaaattgacgggcagttgcagctatgtgctgttccagaacaaagaacaggacctggaggttatactgcacaatggcgcctgcagcccaggtgcaagacagggctgtatgaaaagcatagaggtcaaacacagcgctctgtccgtggaactccatagcgacatggaggtgaccgtgaatggcaggcttgtgagtgtgccttacgtgggaggcaatatggaagtgaacgtctacggcgccattatgcatgaagtgagatttaatcacctaggacatatcttcacctttacaccgcaaaacaacgagttccagctgcagctgagcccaaagacatttgccagtaaaacatatggcctatgcgggatctgcgatgaaaacggagctaacgatttcatgctgagggacggtactgtaacaactgactggaaaactttggtccaagagtggactgttcaaaggcctggacagacttgccagcccatactggaagagcagtgccttgtcccggattctagccattgtcaggttcttctactcccactgttcgcagagtgtcacaaggtgcttgcacccgctacattttacgccatttgccaacaagacagctgccaccaagaacaggtctgtgaggtcatagctagctacgctcacctctgtaggaccaacggcgtgtgcgtggattggcgcaccccagatttctgcgccatgagctgtccccccagtctggtttataatcattgcgaacatggctgcccacggcattgtgatgggaacgtctcatcctgcggtgaccatccgagtgagggatgcttttgtccccccgataaggtgatgctggaaggtagctgcgttcctgaagaagcctgtacacagtgcataggcgaagacggcgtgcaacaccagttcttggaggcttgggttcctgaccatcagccatgccagatttgcacctgtctctctggacgaaaggtgaactgtactacccagccttgtccaacagctaaggccccaacgtgcggactttgtgaagttgcgaggctgcggcagaacgcggatcaatgctgcccggagtatgaatgcgtgtgcgaccccgtatcttgcgacctccctcctgtgccccactgcgaaagaggcttacagcccactctgacgaatccaggcgaatgtcgtcccaacttcacatgcgcatgccgaaaggaagagtgcaagagagtctcccccccttcatgtccgccgcatcgattgcccaccttgaggaaaactcagtgctgtgacgaatatgaatgcgcttgcaattgtgtgaacagtaccgtgagctgtcctctcggatacctagcgagcacggctacgaatgactgcggctgtaccaccaccacctgtctcccagataaggtgtgcgtacatagaagcacaatctatcccgtgggacaattctgggaagagggatgcgatgtgtgtacttgcactgacatggaagatgccgtgatgggccttagagtggcccagtgctcccagaagccctgtgaagacagttgcaggagcggttttacatacgttctacatgaaggggagtgctgcgggcgatgtctgcccagtgcgtgtgaagtcgtgactggatcacctcgaggcgactcccagagcagttggaagagtgtcggatcacagtgggcgtctcctgagaacccctgcctaattaacgagtgcgtgcgagtcaaagaagaggtgttcatccagcagcgaaacgtttcttgtccccagctggaggtccccgtctgtcccagtggtttccagttgtcctgcaagacctcagcctgttgccctagctgcaggtgcgaacgaatggaggcatgcatgcttaacggcacagttattggacccggaaagacagttatgatcgacgtctgtacaacttgccgatgcatggtacaggtgggagtcatctcaggtttcaagcttgaatgtagaaagacgacctgcaatccgtgccccctgggttataaagaggagaacaacactggcgaatgttgtggccgatgccttcccacggcttgtaccatacagcttcgaggcggacagattatgacgctcaagagggacgagactttgcaggatggctgtgatacccacttctgcaaggttaacgaaagaggcgaatacttctgggagaaacgcgtcactggatgccccccttttgatgagcacaaatgtctagcggagggtggaaaaatcatgaagatccctgggacatgctgtgatacatgcgaagaacctgaatgcaacgacataaccgctcgcctccagtacgtcaaggtgggatcctgcaagagcgaggtggaagtggatattcattactgtcaaggcaaatgcgccagcaaagctatgtatagcattgacatcaatgatgtgcaggatcagtgtagctgttgcagtcctaccaggacagaacctatgcaggtggctctgcactgcaccaacggttccgtggtctaccatgaggtcctgaacgcaatggaatgcaaatgctctcctcgaaagtgcagtaaa

SEQ ID NO: 12457 - DNA, 8439 bp, Artificial Sequence
  derived and/or modified sequence
atgatccccgctagatttgcaggcgtgctgttagccctggcccttatactgcccgggacgctgtgtgctgaaggtactagaggcaggtcctctactgctcgctgctccctgtttggttccgactttgtcaacactttcgacggaagcatgtattcgtttgccggatactgctcgtacctgctggcaggcggctgtcagaagagatcattttctatcatcggggattttcaaaatggcaaacgcgtatccctgtccgtctatctgggtgaattcttcgatattcacctgtttgtgaacggcacagtaacccagggtgatcagagagtgagtatgccatacgcttcaaaggggctgtacctagaaaccgaagccggttattataagttgagtggggaagcctacggttttgtcgcccgcattgatggcagcggaaacttccaggtgctccttagcgaccggtacttcaataaaacgtgtggcctctgtggaaacttcaacatcttcgcagaagacgacttcatgactcaagaagggacactgacgtctgatccatatgattttgcaaatagctgggcattaagctccggggagcagtggtgtgaaagagcgagcccaccctccagttcctgcaatatctcttccggggaaatgcagaaaggactgtgggaacaatgccaattactaaagtccacttctgtatttgcacggtgccaccctctggttgatcctgaacctttcgtggccctatgcgagaagacgctgtgtgagtgtgctggcgggctggaatgtgcatgtccggctttactcgaatacgccaggacctgcgctcaagagggtatggtcctatacggatggaccgatcacagcgcttgcagcccggtgtgtcccgctgggatggagtaccgccagtgcgtctccccttgtgctcgaacgtgtcagagccttcatatcaatgagatgtgccaggaaaggtgcgtcgacggatgctcctgcccggaagggcagctgctcgacgagggcctctgcgtggaaagtacagagtgcccgtgtgttcactcgggcaaaagatacccccccgggacatcgctctctagggactgtaacacgtgtatttgccgcaactcacaatggatctgtagtaacgaggaatgcccaggagagtgtttggttacaggccagagccacttcaagagttttgacaaccggtattttactttttcaggaatctgccagtatttgctggcacgggactgccaagaccattccttctcgattgtcattgagaccgtgcagtgtgccgacgatcgggacgccgtctgtactcggagtgtgactgtgagactacccggtttgcacaacagcttggttaaactcaagcacggcgccggcgtcgcaatggatggacaggacgtgcagcttccattactaaagggggacctgcgcatacaacatacagtgaccgcaagtgtgcgccttagctatggcgaggacctgcagatggactgggacggcaggggcagactactggtgaagctgtctcctgtgtacgctggcaaaacttgcgggctgtgtggcaattacaatggaaaccagggcgatgacttcttgacaccaagtggtctagccgagcctcgcgtcgaggatttcgggaacgcctggaaactgcacggcgactgtcaggatcttcagaagcagcattccgacccatgcgcacttaacccacgaatgactcgcttttctgaggaagcctgcgcagttctgacttcccccacgttcgaagcctgtcacagggccgtgagccccttaccatacttgcggaattgtcgctacgacgtctgcagttgtagtgatggacgcgagtgcctgtgtggggccttagctagttacgccgccgcgtgcgccggccgcggagtccgcgttgcctggagagagccaggacggtgtgagctgaattgtccaaagggtcaggtgtacttgcaatgtggtactccgtgtaatctaacgtgtagatctctctcataccccgatgaagagtgtaacgaagcttgcctggaaggctgtttctgcccgcccgggttgtacatggacgaacggggcgattgtgtacccaaggcccaatgcccttgctactatgacggcgagatatttcaaccagaggacatcttttctgaccatcataccatgtgctattgcgaggacggattcatgcactgtacgatgagtggcgtacctggctctctgcttccagatgcagtgttaagcagccctctgtcacacagaagcaagaggtctctgtcctgccgacctcccatggtcaagctggtgtgccccgcagacaacttgagagctgaggggctcgagtgtactaaaacatgtcagaattacgaccttgaatgcatgtcaatgggatgcgtgtctggttgcctgtgtcctcccggcatggtgagacacgaaaatagatgtgtggcgctggagaggtgcccatgctttcaccagggaaaagagtatgcccctggcgaaacagtcaaaatcggctgcaacacatgtgtttgtcaggatcggaagtggaactgcactgaccacgtgtgcgatgcaacttgctccaccatagggatggcccattatctgacttttgatgggcttaagtatcttttcccgggggaatgtcaatatgtgctcgtccaggattactgtgggtccaatccaggcacattcaggatcttggtggggaacaaagggtgctcccacccatctgtcaagtgtaaaaagcgggtgacaattctagtagagggcggcgaaattgagttgttcgacggtgaggtgaatgttaaacgccctatgaaggacgaaacacactttgaggtggtagagagcgggaggtacataatcctcctgctgggaaaggcgttgtccgtggtttgggaccggcacctgagcatctctgtcgtattaaagcagacgtaccaggagaaagtatgtggtttgtgtggaaatttcgacgggatccagaataatgatttgacttcctctaacttacaggtagaggaagatcctgttgatttcggcaattcatggaaggtgagtagtcaatgcgcagacacacggaaggttcctctggattcaagccccgccacatgtcacaataatattatgaagcaaacaatggtagacagctcatgtcggatcttgacctcagatgtgtttcaggactgtaacaaattggtagatcctgagccgtacttggatgtgtgtatctatgacacctgctcctgcgaatccattggggattgtgcttgcttctgtgataccattgctgcgtatgcacatgtatgtgcgcagcacgggaaggtggtaacctggagaacggctacactgtgccctcagtcatgtgaggagagaaacctccgagaaaatggctatgaatgtgaatggcgttacaatagctgtgcacccgcctgccaggtcacctgtcagcaccccgaacccctggcttgcccagtgcagtgcgtcgaagggtgtcacgcccactgccctcccggtaaaattctggacgaacttcttcaaacctgcgtcgaccccgaggattgccctgtctgtgaagtagctgggagacggtttgcttccggcaagaaggttacattgaacccctctgatccagagcactgtcagatttgtcactgtgatgtggtgaacttgacctgcgaagcttgtcaggaaccgggggggctggtagtgcctccgaccgatgccccagtgtccccaactaccttatatgtggaggatatctccgagccacctttacacgacttttactgttcacggctgctggaccttgtgtttctcctggatggctcctcacgtctctctgaggcagagtttgaggtcctaaaagcttttgtcgttgatatgatggagcgcctgagaatcagccaaaaatgggtgcgtgtggctgtcgttgagtaccatgacggctcgcatgcatacattggactgaaggacagaaagcggcctagcgagttgcgaagaattgcaagccaggtgaagtatgcaggctcacaagtggcgagcaccagcgaagttcttaaatataccctctttcaaatcttttctaagattgatcgtcctgaggctagccgaattaccctcttgttgatggcatcccaggagccgcagagaatgagtcgcaattttgtgcggtatgtgcagggattgaaaaagaagaaggtgattgtaatccctgtggggattggcccccacgcaaacctgaagcaaattcgtctcattgagaagcaggcccctgaaaataaggccttcgtgctgagtagcgtagacgagctggaacagcagcgagatgaaatcgttagctacctgtgtgacttagcacccgaggccccgccgccgaccctgccccctgacatggcacaggtgacagtggggcctgggcttttgggcgtcagtacgctggggcctaagcgcaacagtatggtactcgatgtggcgtttgtcttggagggctcggacaagattggagaggctgacttcaatcgcagcaaagagtttatggaagaagtcatccagaggatggatgtgggacaggacagcatccacgttacggtgctccagtatagctacatggtgacagtcgagtaccccttctctgaagcccagagcaaaggcgacatattgcaacgcgttcgggaaattcggtaccaaggtggaaatcgtactaacacaggacttgctttaagatacctctccgaccattcttttctagtatctcagggagatcgtgaacaggctccaaatctcgtctacatggtgaccggaaatcccgcatctgacgagatcaaacgtctccccggtgatatccaggtagttcccataggcgtggggcccaatgctaacgttcaggagttggagagaataggttggcccaatgcccccattctgattcaagacttcgagacattgcctagggaggctcccgacctggtactgcagagatgttgttcaggcgaagggctccagattccaaccctttctccggctccagattgctctcagcctctagatgtgattttacttttggacggttcatcttcgttccctgcctcctactttgatgaaatgaaatcctttgcaaaagccttcatctctaaggccaacattggtccccgcctcacccaggtgagcgtcctgcagtacggatctattaccactatcgacgttccatggaatgtggtgcctgaaaaggcacacctgctatctctcgttgatgtgatgcagagagaagggggtccctctcagattggcgatgcgctgggcttcgccgtccggtatctaacttcagagatgcacggagctcgccctggagcatcaaaggctgtggtgatactcgtgaccgacgtatccgtggatagtgtagatgccgccgccgacgctgctcggagtaaccgagtgaccgttttccctattgggatcggggatcggtacgacgccgctcagcttcgtatcctggctgggccagcaggggactccaacgttgtgaagctgcagcgcatcgaagaccttcctaccatggtgacactgggaaactcatttctacataagctatgtagcggatttgttagaatatgtatggacgaagatggaaatgagaaaaggccaggcgatgtgtggactttgccggaccagtgccataccgtgacttgtcagcctgatggccagaccctcctcaaatcccatagagtcaactgcgatcggggattgcggcctagctgccctaattcccagagtcccgttaaggtggaagagacctgtggctgccgctggacctgcccgtgcgtgtgcaccggctcttcaacgcgccatattgtgacattcgacggccagaattttaaactgaccggcagctgcagttacgtgctgttccaaaacaaggaacaggatctggaggtgatcctccacaatggcgcatgcagtccaggtgcacggcaagggtgcatgaaatccattgaggttaaacactcagcgctctcggttgaactgcactcagatatggaggtgacagtgaacgggcgcctggtgtcagtgccctatgtgggaggcaacatggaggtcaacgtgtatggtgcaataatgcatgaggttcggttcaatcacctaggacacatcttcaccttcacaccccagaacaacgagtttcaactacagttaagtcccaagacgtttgcctcaaaaacatacggattatgcggaatttgcgacgagaacggagccaacgattttatgctgagagatggcactgtgaccaccgactggaaaactctggtgcaagaatggactgtgcagcggccaggtcagacttgtcagccgattctggaagagcagtgtctcgtgcccgacagcagtcactgccaggtcctcctccttcccttattcgctgaatgccataaagtgctggctcccgctacattttacgccatctgccagcaggactcctgccaccaggagcaggtctgtgaggttattgcctcttacgcacacctgtgtcgcactaacggggtgtgcgtggattggcggacccctgacttttgtgctatgagttgtcccccttccctggtgtataatcactgtgagcatgggtgtccgcgccattgtgatggtaatgtgtcttcctgcggtgaccacccaagtgaagggtgcttttgcccccctgacaaagtgatgttggaggggagttgcgtgcccgaagaagcgtgcacccagtgtataggcgaggatggagtacagcaccagttcctggaagcctgggttcccgatcatcagccgtgtcagatttgcacgtgtttaagcggccgcaaagtgaattgcaccacccagccttgtccaacagcaaaggctcccacttgtggcctttgtgaagtggctcggttgaggcaaaatgccgatcagtgctgccctgaatatgagtgtgtttgcgatcccgtttcttgtgatctcccacccgttccgcattgtgagcgcggattgcagcctacgcttaccaatccaggtgagtgtcgccccaacttcacttgcgcttgtagaaaagaggagtgtaagcgcgtgtctccgcccagctgtccaccccaccgactccccactctcaggaagacccagtgctgtgacgagtatgagtgtgcatgcaactgtgtgaacagcaccgttagttgccctctgggctacctggcaagcacagctacgaatgactgcggctgtacgactaccacctgcttacctgataaagtgtgtgtacaccgtagtacaatatatcccgttggccaattctgggaggagggatgcgatgtgtgcacctgtacagacatggaggatgccgtaatggggcttagagtcgctcaatgttcacagaagccgtgcgaagactcctgcaggtctggcttcacatatgtcctccacgagggcgagtgctgcggacggtgcctgccatcagcatgtgaggtagtcaccgggtctcctaggggggattcccagagcagttggaagtctgtgggtagccaatgggcgagccccgagaatccgtgtctcatcaacgaatgcgtgcgtgtcaaggaggaagtgtttattcagcagcgaaatgtgtcatgcccccagctcgaagtccctgtttgccctagcggttttcagctctcatgtaagactagcgcttgctgcccatcatgccggtgtgagaggatggaagcatgcatgctgaatggcacggtcatcggacccgggaagaccgttatgattgacgtgtgcacaacttgtcggtgcatggtccaagtcggcgtaatcagtggcttcaaactcgagtgccgaaaaacgacatgcaacccttgccccctgggttacaaggaagaaaacaatacaggcgaatgctgtggccgctgtctacccactgcctgcactattcagctccgagggggtcaaatcatgacgctgaaaagagacgaaaccttgcaggacggctgcgatacacatttttgcaaggtgaatgagaggggcgaatacttctgggagaaacgcgttacgggatgcccaccttttgacgagcataaatgcttagcagagggcgggaagattatgaagatacccggcacctgttgcgatacctgtgaggaaccagaatgcaatgacattaccgcacgtctccaatacgtaaaggtgggctcctgtaaaagtgaagtagaagtagacatccactattgtcaaggcaagtgtgctagcaaagccatgtatagtatcgacatcaacgatgtacaggaccagtgcagttgttgttcccctacacgaaccgagcctatgcaagtggcactacactgcacaaatggatccgtggtgtatcatgaggtattgaacgcaatggagtgcaaatgtagccccagaaagtgttcaaaa

SEQ ID NO: 12458 - DNA, 8439 bp, Artificial Sequence
  derived and/or modified sequence
atgatcccggcgcggttcgcgggagtgctgcttgctctcgccctcatcctgcccggaactctttgcgccgaaggtactcggggccgctcttcgactgcccggtgtagcctgtttggatcggattttgtgaatactttcgatggcagcatgtactcgttcgcgggctactgctcctacctgctggccggaggctgtcagaagaggtcgttcagcatcatcggtgacttccagaacggaaagcgcgtctcattgtccgtctacctgggcgaattctttgatatccacctcttcgtgaacggtaccgtgacccaaggagatcaacgcgtctccatgccttacgctagcaaagggctgtacctggagactgaggccggatactacaaacttagcggagaagcctatgggttcgtggctcgcatcgatggttctggtaacttccaagtgctcctgtccgaccgttatttcaacaagacgtgcggactctgcggcaactttaacatattcgccgaggatgatttcatgacccaagagggaaccctgacttcggatccttatgactttgccaactcgtgggcgctgtcgtcgggggagcaatggtgtgagcgcgcctcgcccccgtcgagctcctgcaacatcagctcaggagaaatgcagaagggcctctgggagcagtgccagctgttgaaatccacttccgtattcgcccgatgccacccgctggttgacccggagcctttcgtggccctctgcgagaaaaccttgtgcgagtgcgcgggcggacttgagtgcgcgtgcccagcgctgctggaatacgccaggacttgcgcgcaggaaggtatggtgctgtacggatggaccgaccacagcgcgtgctctccagtctgcccggcgggaatggaataccggcagtgcgttagcccttgcgcgcgtacgtgccagtcgctgcacatcaacgagatgtgtcaggaacggtgtgtggatggctgcagctgcccggagggacaactgctggacgagggactgtgcgtggaaagcactgagtgcccttgcgtccactcaggcaagagatacccgcccggaacctccctgtccagagactgcaatacttgcatctgtcggaattcgcagtggatctgcagcaacgaggaatgccccggagagtgcctcgtgactggacaatcccactttaagtcctttgacaatagatatttcactttttccggaatctgtcagtacctgctcgcacgcgactgtcaagaccattcattctcaatcgtgattgagacggtgcaatgcgcggacgatagggatgcggtgtgcacccgcagcgtgaccgtccggctgccgggacttcataacagccttgtgaagctcaagcatggggctggagtggcaatggacggtcaggatgttcagctgccgctgctcaagggagatctgaggattcagcataccgtgacggcgtcggtccggctgtcatacggagaggacctgcaaatggactgggatggtcggggtagactgctggtgaaactgtcccccgtctacgccggaaaaacctgcgggttgtgcgggaactacaatggtaaccaaggtgacgactttctgaccccttccggactggcggagcccagagtcgaagatttcggcaacgcatggaaactccacggagattgccaggatttgcagaagcaacacagcgatccttgcgcactcaacccacgcatgaccagattctcagaagaagcatgtgccgtgctgaccagccccacctttgaggcctgccaccgggccgtgagcccgctgccgtacttgcgcaactgccgctacgacgtttgctcatgctcagacggacgggaatgcctctgcggtgcgcttgcctcatacgccgccgcttgtgctggccggggagtgcgagtggcgtggcgggaaccaggtcgctgcgagctcaactgccctaagggacaagtgtacctgcagtgcggaaccccgtgtaacctcacttgcagatccctgtcgtatccggacgaagaatgcaatgaggcctgcctcgaaggatgcttctgcccaccagggctgtacatggatgaaaggggagattgcgtgccgaaagcgcagtgtccgtgctactacgacggagaaatcttccagcccgaggacatcttctcagatcaccataccatgtgttactgtgaagatggtttcatgcactgtaccatgagcggcgtccccggatcgctgctgccggacgcggtgctctcctcgcctctgtcgcatcgcagcaagcggtcgctttcgtgccgcccgcccatggtgaagctggtctgtcctgcagataacctgcgtgccgaggggctcgagtgtaccaaaacctgccagaactatgacctggagtgtatgtctatggggtgcgtctcaggctgcctgtgcccgccggggatggtcaggcacgagaacaggtgcgtcgcccttgaacgctgcccctgcttccatcagggcaaagagtacgcgccgggcgagactgtcaagattggatgcaatacgtgcgtgtgccaggataggaagtggaactgtacggatcacgtctgcgatgccacctgctcaactatcggaatggctcactacctcaccttcgacggactcaagtacctgttcccgggtgaatgccaatacgtgctcgtgcaggattactgcggatctaatccaggaacgttccgcatcctggtgggaaacaagggctgttcccacccgagcgtcaagtgcaagaagagagtgactatccttgtggaaggcggagagatcgagttgttcgacggtgaagttaacgtgaagcggccaatgaaagatgaaacccatttcgaggtcgtggagagcggacgctacatcattttgctcctcggcaaggcactgtccgtggtgtgggaccggcacctgagcatctccgtagtcctcaagcagacctaccaagaaaaagtctgtggactgtgcggaaacttcgacggaatccagaataacgaccttaccagctcgaaccttcaagtcgaagaggatcctgtggacttcggcaactcatggaaagtcagttcacagtgcgcagatactcggaaggtgcccctcgattccagccctgctacctgccacaacaacatcatgaaacaaactatggtggactcatcctgccgcattctgacttctgacgttttccaggactgcaacaagctggtggaccccgaaccgtacctggacgtgtgcatctacgacacctgcagctgcgaatccatcggagattgcgcgtgcttctgcgataccatcgctgcatacgcgcacgtgtgtgcgcaacacggcaaagtggtgacctggagaactgcgactctttgcccgcagtcatgcgaagaacggaacctgcgcgagaacggatacgaatgcgaatggcggtacaattcctgcgccccagcttgccaagtgacctgccagcacccggaacctctggcctgcccagtccaatgtgtcgaagggtgccatgcgcactgtccacctggaaagatcctggacgagctgctgcagacgtgcgtcgaccctgaagattgtccggtctgcgaagtcgctggccgcaggtttgcgtcgggcaagaaagttactttgaatcctagcgacccggaacactgtcagatctgtcactgcgacgtggtgaatctcacctgcgaagcctgccaagagcccggtggactcgtcgtccctccgactgacgcgccggtcagcccgactaccttgtacgtcgaggacatctcggaacctccactgcacgacttctactgctcgagactcctggatttggtctttctgctggatggctcctcccgcctgtccgaagcggaattcgaagtgttgaaggccttcgtcgtggacatgatggagcggctgagaatcagccaaaagtgggtgcgcgtggcagtcgtggagtaccacgatggatcacatgcgtacatcggactgaaagaccggaaacggccgtcagaactgcgcagaattgcttcccaggtgaagtacgccggatcgcaagtggcttccacctcggaggtgctcaagtacactctctttcaaatcttctccaagatcgatcggccggaagcctcccggatcaccctcctgctgatggcgtcacaggaaccccaacggatgtcgcggaacttcgtgcggtatgtccagggactcaaaaagaagaaggtgattgtgatccctgtgggcatcggcccgcacgccaacttgaagcagatcagactgatcgaaaaacaggcaccggaaaacaaagcatttgtgctgtcatcagttgacgaattggaacaacaacgggatgaaatcgtgagctacttgtgcgacttggctcctgaggctcctccaccaaccctcccaccagacatggcacaggtgactgtgggccccggcttgctcggggtgagcaccctgggacccaaaagaaactcgatggtgctggatgtggcattcgtcctggaaggaagcgacaaaatcggagaagcggacttcaatcggtcaaaagaattcatggaagaagtgatccagaggatggatgttggacaggattcgatccacgtgactgttctccagtactcctacatggtgaccgtcgaataccctttctcggaagcgcagtcaaagggagatatcctccagcgcgtgcgtgagatccggtaccaaggaggaaaccggaccaataccggcctcgccttgcgatacctgtctgaccactcctttctggtatcgcagggagacagggaacaagccccgaatcttgtgtacatggtgactggcaaccctgcatcggacgagatcaagcgccttccgggggatattcaggtcgtgccgattggagtgggcccaaacgccaatgtgcaggagctggaacggattggttggcccaacgcaccgattctgattcaagactttgagactctgccgcgcgaagcaccggatctggtcctgcagcgctgctgttcgggtgagggactgcagatccccacgctgtcgccggcaccggactgctcccagcctttggatgtgatcctcctgcttgatggatcgtcgagcttccctgcgtcgtactttgacgaaatgaagtcattcgccaaggctttcatatcgaaggcgaatatcggcccccgcctgacccaagtgtctgtgctccagtatgggtcgatcaccactatcgacgtgccgtggaatgtggtcccggaaaaggcccacttgctgagcttggtcgatgtcatgcaaagggaaggcggcccatcccagatcggagacgccctgggctttgctgtgcgctacctgacttcagaaatgcatggagctcgcccgggagcctccaaggcggtcgtgatcctggtcaccgatgtgagcgtggactcggtggatgccgccgcggacgccgcccgctccaaccgcgtcaccgtgttccccatcggcatcggcgaccgctacgacgctgcgcaactcagaatcctggcgggaccggctggagacagcaacgtcgtgaagctgcagcggattgaggacctccctactatggtgacgctgggaaacagcttcctccataagttgtgttccggcttcgttcggatctgcatggatgaggatggcaacgagaagcgcccgggcgacgtctggacgctgcccgaccagtgccatacggtcacctgccaaccggacgggcagacccttctgaaatcacatcgcgtcaattgtgaccggggactgcggccgagctgccctaactcccaatcacccgtgaaggtggaagaaacttgtggctgcaggtggacttgcccgtgcgtctgcactggctcaagcacgcggcacatcgtgaccttcgacggccaaaacttcaaattgaccggctcgtgcagctacgtgctgtttcagaataaggaacaggacctcgaggtgatcttgcataacggggcgtgttcacctggagctcggcaggggtgcatgaagtcaattgaagtgaagcatagcgcactgtcagtggaactgcattccgatatggaagtgactgtgaacggtagactcgtgtcggtgccgtacgtgggaggcaacatggaagtcaacgtgtacggcgccatcatgcatgaagtgagattcaaccacctcggccatatcttcacgtttacgccgcagaataacgaattccagctgcagctttcccctaagactttcgcaagcaagacctacggactctgtggaatttgcgacgaaaatggtgcgaacgactttatgctccgcgatggaactgtaaccaccgactggaaaactctggtgcaggaatggactgtgcagcggccaggacagacttgccagccaatactcgaagaacagtgcctggtaccggacagctcccattgccaggtgctgctccttccgctgttcgccgagtgccacaaagtcctcgcaccggccactttctacgccatctgccaacaagattcctgtcaccaggagcaggtgtgcgaagtcatcgcatcatacgcgcatctgtgccgcactaacggggtgtgcgtggattggcggactccagacttctgcgctatgtcgtgcccgccgtcactggtgtacaaccactgcgagcatggctgcccgaggcactgcgatggaaacgtcagctcgtgcggggaccacccgtccgagggttgcttttgccctccggataaagtgatgcttgaggggtcctgtgtgccagaagaagcgtgcacccagtgtatcggcgaagatggagtccagcaccagttccttgaagcctgggtcccggaccatcaaccgtgccagatttgcacctgcctctccggtcgcaaggtcaattgcaccactcaaccatgtccaaccgcgaaagcccctacctgtggactctgtgaggtggcacgcctccgacaaaacgccgatcaatgctgccctgaatacgagtgcgtctgcgatcctgtctcctgtgatttgcctccggtgccacactgcgagcgcggactgcagccgactctgaccaatccgggggagtgcagaccgaactttacttgcgcttgccgcaaggaagaatgtaagcgggtgtcgcccccatcctgcccgccacacagactgccgactctgcgaaagactcaatgctgcgacgaatacgagtgtgcgtgtaactgcgtgaactctaccgtgtcatgccccctcggatatctggcctccaccgccaccaatgactgcggatgcaccaccacgacgtgcctcccggacaaagtgtgtgtccaccggtccaccatctatccggttgggcaattctgggaggagggttgcgacgtgtgcacttgcaccgacatggaggacgctgtgatggggctgagggtggcgcaatgttcgcaaaaaccgtgcgaagattcctgccgctccggcttcacctacgtcctgcacgaaggcgaatgctgtgggcgctgcctgccatcggcctgcgaggtggtgactggttcgccaagaggcgactcccagtcgtcctggaaatcagtgggaagccagtgggcgtcgcccgaaaacccgtgcctgatcaacgagtgcgtgcgggtgaaggaagaagtgttcatccaacagaggaatgtctcgtgcccgcagcttgaagtgcctgtgtgcccgtcgggattccaactctcatgcaagacttccgcttgctgcccgtcctgtagatgcgagagaatggaagcctgcatgctgaacggaactgtcatcggtccgggtaagactgtgatgatcgacgtgtgtaccacgtgtcgctgcatggtgcaggtgggagtgatctccggcttcaaacttgaatgccggaaaactacgtgtaacccttgccctctcggctacaaggaggagaataacactggagagtgctgcggtcggtgcctgccaaccgcctgcactatccagctgcgcggtggacaaatcatgacccttaagcgggatgaaactctgcaggacgggtgcgacactcacttctgcaaggtgaacgagcggggggagtatttctgggaaaaacgggtgactgggtgcccgccttttgacgaacacaagtgcctggccgagggcggcaagatcatgaagatcccagggacttgctgcgacacttgcgaggaaccggagtgtaacgatatcaccgcacggctgcaatacgtgaaggtgggctcgtgcaagtcagaagtggaggtggacatccactactgtcaaggaaaatgtgctagtaaggcgatgtactcaatcgacatcaacgatgttcaagatcaatgttcgtgctgctccccaacccgcaccgagccaatgcaggtggctctccattgcactaatgggtctgtcgtctaccacgaggtgctgaatgctatggaatgtaaatgtagcccaagaaaatgctccaag

SEQ ID NO: 12459 - DNA, 8439 bp, Artificial Sequence
  derived and/or modified sequence
atgatcccagctcggttcgcaggtgtactgctggctctggccctgatcctgccaggtaccctttgcgccgaaggaacccggggaagaagctccaccgcacgatgttctctctttggaagcgacttcgtgaacaccttcgatgggtccatgtactcatttgcaggctattgcagctaccttttggccggaggatgccaaaagcgctcgttctcaatcatcggagacttccagaatgggaaacgcgtgagtctgtcggtttaccttggggagtttttcgacattcacttgttcgtgaatggaactgtgactcagggtgaccaacgggtgtctatgccttacgccagtaaagggctttacctcgaaactgaggccggatactacaagctctcgggtgaagcctacggtttcgtagctaggattgacggatcgggcaactttcaagtgttgctttccgatcgctatttcaacaagacctgcggattgtgtggaaacttcaacatattcgcagaagatgacttcatgactcaagaaggaactcttacctcggacccgtacgacttcgcgaattcatgggccctgtcgtccggagaacaatggtgcgagagagcgtccccaccgagctccagctgcaacatctcctcgggggagatgcagaagggactgtgggaacaatgccagctgctgaagtccacctccgtgttcgcacgatgccacccgctggtggaccctgaaccgtttgtcgcactttgtgaaaagacgctctgcgagtgcgccggaggcctggaatgtgcgtgccccgccctgctcgaatacgcgcggacctgcgcccaggagggtatggtcctctatggctggactgaccattcggcctgttccccagtttgcccggcagggatggagtacagacaatgtgtgtccccgtgcgcccggacgtgccagtcactgcatatcaatgagatgtgccaggaacgctgcgtcgatggctgctcgtgccctgaaggacagctgctggatgagggactttgcgtggaatccaccgagtgtccatgcgtgcactcaggaaagcggtacccgcccggaacctcgctctccagagactgtaacacctgcatctgcagaaactctcagtggatctgcagcaacgaagagtgccctggcgagtgtctggtgaccggacaatcccacttcaaatcctttgacaatagatactttaccttctcgggcatttgtcagtacctgctggctcgggactgtcaggaccactcattcagcatcgtgatcgaaaccgtccagtgcgcggacgatagagatgccgtctgcaccagatcggtgacggtgcgcctcccaggcctccataatagcctggtcaagctgaaacatggcgcgggagtggcaatggacggtcaggacgtgcaactgccgctcctgaaaggagatctgaggatccagcataccgtcaccgcctcagtgcgactgtcatacggagaggacctccagatggattgggacggccgcgggcgcctgctcgtcaaactctcccccgtttacgcgggaaagacttgtggtctgtgtggtaactacaatggcaaccagggagatgattttctgaccccgtcgggcctggccgagccgcgggtggaagatttcggaaacgcgtggaagctccacggtgactgccaagacctgcaaaagcagcactccgacccgtgcgccctcaacccgcgcatgactagattctcagaagaagcgtgcgcggtgcttacttcgccgaccttcgaagcctgtcatcgcgcggtttcgccactgccgtacctgcgaaattgccgctatgacgtttgcagttgctcggacgggcgcgagtgcctgtgcggagccctcgcttcctacgccgcagcatgcgccggaagaggagtcagagtggcttggagagagccgggccggtgcgagttgaactgccctaaaggccaggtgtacctgcagtgtggaacgccgtgcaacttgacgtgcaggtccctgtcgtacccggacgaagaatgcaatgaggcatgtctggaaggatgcttctgcccccctggactctacatggatgaacggggcgactgcgtgcccaaagcccaatgtccgtgctattacgatggagagatcttccaaccagaggatatcttcagtgatcaccataccatgtgctactgcgaggacggattcatgcactgtaccatgtcgggagtgcccggctcactcctgccggatgcggtgctgagctcaccgcttagccatcggtcaaaaaggtcgttgtcgtgccggcctcctatggtgaaactcgtctgcccggctgacaacctcagagcggaagggctggaatgcacgaaaacttgccaaaactacgacctcgagtgcatgagcatgggatgcgttagcggatgtctgtgtccgccaggaatggtgcgccacgaaaaccggtgtgtggcccttgaaaggtgcccatgcttccaccagggaaaggagtacgcgccgggagaaactgtcaagatcgggtgcaatacttgcgtctgccaggaccggaagtggaattgtactgatcacgtctgcgacgcaacttgctcaaccatcggaatggcgcactacttgaccttcgacggattgaaatacctgtttccgggcgagtgtcaatacgtgctggtgcaagactactgcggatccaacccgggaaccttccgaattctggtgggaaacaaaggatgctcacacccaagcgtgaagtgcaagaagagagtgaccatcttggtggagggcggagagatagaactgtttgacggggaagtgaatgtgaagcgcccaatgaaggacgaaactcattttgaagtcgtcgagagcggacgctacatcatcctgctcctggggaaggccctgtcggtggtttgggacagacacctgtcaatctcggtggtcctcaagcaaacctaccaggaaaaggtgtgcggcctttgcggaaactttgatggaatccaaaacaacgacctgacttcttcgaacctgcaggtggaggaggacccagtcgacttcggcaacagttggaaggtgagcagccaatgtgccgacacccgcaaagtgccgctggatagctccccggcaacctgccacaacaatatcatgaagcagactatggtagactcgtcctgccgtatccttacttcggatgtgttccaggactgcaacaaacttgttgaccctgaaccttacctggatgtgtgcatctacgacacctgttcatgcgagtcaatcggagattgcgcctgcttttgcgacaccatcgcggcttacgcccacgtatgcgcgcagcacgggaaggtggtcacttggcggaccgccacgctgtgcccccagtcctgcgaggagcgcaacctccgagaaaacggctacgaatgcgagtggcggtacaattcctgcgcaccggcttgccaggtcacctgccagcacccggagccgctggcctgtccggtgcagtgtgtcgaagggtgtcatgcgcactgcccgccaggaaaaatccttgacgaattgctgcaaacttgcgtcgaccctgaggactgtccggtgtgcgaagttgcggggcgccgctttgcgtcgggcaagaaggtcactctcaacccgtcggacccagagcattgtcaaatctgccactgcgatgtggtcaacctgacttgcgaagcctgccaagaacctgggggactggtggtgccaccgacggatgctcccgtgtcaccgacgactctctacgttgaggatatcagcgaacctccactgcatgatttctactgttcccggctcctcgatcttgtgtttctgctggacggaagctccaggctctccgaggccgagtttgaagtgctgaaagcattcgtggtggacatgatggagagactgcgcatcagccagaagtgggtccgcgtggcggtggtcgagtatcacgatggatcacacgcttacattggcctgaaggaccggaagcggccgtcagagttgcgccggattgcatcgcaggttaagtacgctggctcccaagtggcatcgactagcgaagtgctcaaatacactctgttccagatattctccaagatcgacagaccagaggcgagcagaatcaccctgctcctcatggcatcgcaagagccgcagaggatgtcccgcaactttgtccggtacgtgcaggggcttaagaagaagaaggtgattgtgatcccggttggtatcggcccccatgccaatctgaagcagattaggttgatcgagaagcaggcgccagaaaacaaagcgttcgtgctctcgtcggtggatgaacttgaacagcagcgcgacgagattgtctcgtacctgtgcgatctggcacctgaggctccaccgcctaccctgcctccggacatggcacaggtgacggtcggccctgggctgcttggtgtgtcgactctgggaccaaagagaaattccatggtccttgatgtcgcgttcgtactggaggggagcgacaagatcggagaagccgatttcaaccgaagcaaggaattcatggaggaagtgatccagcgcatggacgtcggccaggactccatccacgtgactgtcctccagtacagctacatggtgacggtggagtacccgttctctgaagcgcagtcgaagggtgatatcctccaaagagtccgggaaattcggtaccaaggaggaaaccggactaacaccgggctggccctgagatacctgtcagaccactcctttttggtttcccagggtgaccgcgaacaggcccccaatctggtgtacatggtgactggaaatccagcttcagatgaaatcaagcgactgcccggcgacatacaggtggtgcctatcggagtgggaccgaacgcgaacgtccaagaactggaaaggatcggttggccgaacgctccaatccttatccaggacttcgagactctgccgcgcgaagcaccagatcttgtcctgcagcgctgttgtagcggcgagggcctccaaattccgaccctgtcgccggcgcccgactgtagtcaaccactcgatgtgatcctcctgttggatggctcatcatccttcccggcctcctacttcgatgagatgaaatcgtttgccaaggccttcatctccaaggccaacatcggaccaaggctgacccaggtgtcggtcttgcaatacggttccatcactacgatagatgtcccctggaacgtggtgccagagaaggcccacctcctgtcgctcgtcgacgtgatgcaacgcgagggaggcccgtcgcaaatcggggacgccttgggattcgcagtgcgctatctgacttcggaaatgcacggagctaggccgggcgcctcaaaggctgtggtcatcctcgtgactgatgtctcggtggacagtgtggatgctgctgcggatgctgcgcggagtaatcgcgtgactgtgttcccaatcggaatcggtgaccgctacgatgcagcccaactcaggatcttggccggaccagccggagattcgaacgtcgtgaagctgcagaggatcgaagatctcccgactatggtgaccttgggtaacagcttcctgcacaaactgtgctcggggttcgtgcgcatctgcatggacgaagatgggaatgagaaaagaccgggagatgtctggaccctgcccgaccagtgtcatactgtgacttgtcaaccggacggccagactctgctgaaatctcatcgggtcaattgcgaccgcggactgcggccctcgtgtccaaactcccaatcgccggttaaggtggaggagacgtgcggatgccggtggacttgcccatgcgtgtgcaccggaagctccaccaggcatatcgtgactttcgacggacagaatttcaaactcaccggatcctgcagctacgtgctgttccagaataaagaacaggacctggaagtcattctgcacaatggagcgtgtagcccgggcgcgcgccaaggctgtatgaagtccatcgaggtgaagcactcagcactctcggtggaactgcatagcgatatggaggtgactgtgaatggtagactggtcagcgtgccctatgtaggaggtaatatggaagtgaacgtgtacggcgctatcatgcacgaagtccgctttaatcatctcggacacatcttcacttttacgcctcagaacaatgagttccaattgcagctgtcccctaagacgtttgcttcaaagacctatggcctctgcggaatctgcgacgagaatggagccaacgatttcatgctgcgtgacggcactgtcacgaccgactggaaaactctggtgcaggagtggaccgtgcagcggccgggacagacgtgtcaaccgatcctcgaagagcagtgtctggtgcctgactcaagccactgtcaggtgttgcttcttcctctcttcgcagaatgccacaaagtcctggccccggcgaccttctacgcaatctgccaacaagattcgtgtcatcaggaacaggtatgcgaggtcatcgcctcatacgcccatctgtgtagaaccaacggggtctgcgttgactggcgcacccctgacttttgcgcaatgtcatgtccaccctcgctggtgtacaaccactgcgaacatggatgcccgcgccattgcgacggaaacgtgtctagctgcggcgatcacccgtccgaaggttgcttctgcccgcccgacaaagttatgttggaaggaagctgcgtgccggaggaggcttgcacccagtgcattggcgaggacggagtgcaacatcaattcctcgaagcctgggtgcctgatcaccagccatgccaaatttgcacttgcttgtcgggacgcaaggtcaactgcactactcaaccttgccccaccgcaaaggcgcccacttgcggactctgcgaagtggccaggctgcggcagaacgcagaccaatgctgcccggaatacgaatgcgtctgtgacccagtctcgtgtgacctcccaccggtcccgcactgcgaacggggactgcagccgaccctgaccaatccaggggaatgccgcccgaacttcacttgcgcctgcagaaaggaggagtgcaaaagagtgtccccaccgtcctgcccgcctcaccggctgccgacgctccggaaaactcagtgttgcgacgaatacgaatgtgcctgtaattgcgtgaactcgactgtgtcttgtcctctgggatacctcgcctctactgctaccaatgattgtggatgcaccaccaccacttgcctcccagataaagtctgcgtgcaccggtcaaccatctacccagtgggccaattctgggaagaagggtgtgacgtctgcacgtgcaccgacatggaggacgccgtgatgggactcagggtcgctcagtgttcacagaagccatgcgaagattcctgcaggtcaggttttacgtacgtgctccatgaaggggagtgctgcggccgctgtttgccgagcgcctgcgaagtcgtgactggatcaccgagaggtgattcgcagagctcctggaagagtgtgggctcccaatgggcctcccctgaaaacccatgtctgatcaacgaatgtgtgcgcgtgaaggaggaggtgttcattcagcagcgcaacgtgagctgccctcagctcgaggtgcctgtctgtcctagcggattccagctgtcgtgcaagacctccgcttgctgtccctcatgtcggtgcgaacgcatggaagcgtgtatgctgaatgggaccgtcatcgggccaggcaagaccgtgatgatcgacgtctgcaccacctgccgctgcatggtgcaagtgggcgtgatctcgggattcaagctcgaatgcagaaagactacctgcaatccgtgccctttgggttataaggaagagaacaacactggcgaatgctgcggtcggtgtctgcctactgcttgcaccatccagctgcggggaggccagattatgactctcaagcgggatgaaaccctgcaggacggctgcgatacccacttctgcaaggtcaacgagcgcggggagtacttctgggagaagcgggtgaccggatgtccaccgtttgacgaacacaagtgcctcgccgaggggggaaagatcatgaagattcctgggacctgctgcgatacttgcgaagaacctgaatgtaacgatatcactgcccggctccagtacgtgaaagtggggtcctgcaagagtgaagtagaggttgacatccattactgccaggggaagtgcgcgagcaaagcaatgtacagcatcgacatcaatgatgtccaagatcagtgcagctgctgcagccccactaggaccgagccgatgcaggttgccctgcattgtaccaacggatccgtggtgtaccatgaagtccttaatgctatggagtgcaagtgttctccacgaaagtgctcaaag

SEQ ID NO: 12460 - DNA, 8439 bp, Artificial Sequence
  derived and/or modified sequence
atgatacctgcaagattcgcaggcgtgctgctggctctggccctgatcttgccgggaacactatgtgcggaaggtaccaggggccgttcctccaccgcacgttgctccctgttcggatctgactttgtaaatactttcgacggatctatgtattccttcgccggttactgttcttacctgcttgcaggagggtgccagaagcgtagcttctcgattattggagatttccagaacggtaagagggtaagcctctccgtttatctgggggagttcttcgatatccacctgtttgtcaacggtacagtaacacagggggatcagcgagtgtccatgccgtacgcaagcaagggactgtacttggagactgaggctggctattacaagttgagtggggaagcatacggatttgtggcccgaattgacggcagcggcaattttcaggtgttgctctctgatcggtacttcaacaaaacctgtggattgtgtgggaactttaacatcttcgccgaggacgatttcatgacccaagaaggcacactgacttcagacccttacgacttcgcaaactcctgggccctctcatcgggagaacagtggtgtgaacgggcctcacctcccagttcatcctgcaatatctcctctggggaaatgcagaaaggactctgggaacagtgtcagctgctgaaaagcacaagcgtcttcgccagatgccaccctctggtcgatccagaacctttcgtggccctgtgcgagaaaacactttgcgagtgcgcggggggcctggagtgtgcctgccctgctcttcttgaatacgcacgcacatgtgctcaggagggaatggttctgtatggctggacagaccattccgcctgctctccggtctgtcccgccgggatggagtatcgccagtgcgtgagcccgtgtgcacgcacttgccaatctctacacatcaatgagatgtgccaggagagatgcgttgatggttgcagctgccctgaggggcaacttttagatgaagggctgtgcgtggaatcgacggagtgcccctgcgttcatagcgggaaacgctatccccctggtaccagcttgagccgcgactgcaacacatgtatttgccggaattcacaatggatctgcagcaatgaggagtgcccaggcgagtgcctggtgacagggcagagtcacttcaagagcttcgataatcgatactttacatttagtggcatctgtcagtacttgctcgctcgagattgccaggatcactcattcagcatagtcatcgagaccgttcagtgtgcagatgatcgggacgctgtttgcacacggtctgttacggttcgactgcccggtttgcataacagccttgtgaaactgaagcacggagcaggcgtcgccatggacggccaagatgtgcagttgcctctgcttaagggagacttacggatccaacacactgtcacagccagcgtccggctaagttacggcgaggatttacaaatggactgggatgggcgcggtcggctactagtgaagcttagccccgtgtatgctggtaaaacatgcggtttatgtggtaattacaatggcaaccagggtgatgattttctcacgccatcagggctcgcggagccaagggtggaggactttgggaacgcatggaaacttcatggggattgtcaggatttacagaagcagcattccgacccgtgtgcattgaatccgcgcatgacccgcttctcagaggaggcctgtgctgtgctaaccagtcctacctttgaggcatgccacagggcggtctcaccgctgccttacctgcggaactgtagatacgatgtgtgtagttgttcagacggccgggaatgcctatgcggagcgctagcatcgtacgccgcggcttgcgctggacggggggtgagggtggcctggcgcgagcccggccgatgtgagcttaattgccctaaggggcaagtttacttacagtgcggtacgccttgcaacctcacgtgtaggagcctgagctaccccgacgaggagtgtaatgaagcctgcttggagggatgcttctgcccccccgggctttacatggacgagcggggcgattgcgtgcccaaggcgcaatgtccctgctattacgacggagagatattccagccagaagacatcttcagtgaccaccacacaatgtgctattgcgaggacggcttcatgcactgcaccatgagtggtgtacctggaagcctcctgcctgatgccgtgctctcatcccctctttcacacaggagcaaaaggtccctgagctgccgcccacccatggttaagctagtgtgccctgcggacaatttacgcgccgagggcttagagtgtaccaagacctgccagaactatgatctcgagtgtatgagcatgggatgcgtgtccgggtgcctttgtccaccgggcatggtgcgccacgagaatcggtgcgtggctctggagcgatgcccatgtttccatcaggggaaggagtacgcccccggggaaactgtcaagattggatgcaacacctgcgtgtgtcaggaccgcaagtggaattgtacagaccatgtgtgtgacgccacatgctctacaatcggcatggctcactacttgacattcgacggcctgaaatatctgttccccggagagtgtcagtacgtgttggtccaggattactgcggctccaaccctggcacctttagaatattggtaggaaataagggctgctctcatcccagcgttaaatgcaaaaaacgcgtgacgattttggtggaaggaggggaaattgagctgttcgacggtgaggtcaatgtcaaaaggccaatgaaagacgagactcactttgaagtcgtggaatccggccgctacatcattctattgctcggaaaggctctctccgtcgtctgggacaggcacctatctatctccgttgtcttgaagcagacctaccaggaaaaggtgtgcggactctgcggtaacttcgacggcatccagaacaatgaccttacctcgtctaacctccaggttgaggaggatcccgttgactttggtaatagctggaaagtgagtagtcaatgcgctgacaccagaaaagtgcctttggattcttctccagctacgtgccataataatattatgaaacaaacaatggtggactcaagttgtcgaattctcaccagtgatgtgtttcaggattgtaacaagcttgtggaccctgagccatatctcgacgtctgtatatacgacacctgctcttgcgaatctatcggagattgcgcctgtttctgtgacaccattgctgcttacgcacacgtctgtgcccaacacggtaaggtcgtgacatggcggaccgccacactgtgcccccagtcttgtgaggagcgtaaccttagagagaacggctatgagtgtgagtggcgctacaacagttgcgcccctgcctgccaagtgacctgccaacatcctgagcctctggcctgtccagttcagtgcgtggaagggtgccacgcccattgccctccagggaagatactcgatgagctattgcagacctgtgtcgatcctgaggactgccccgtctgtgaagtagctggcagaaggttcgcgtcaggcaaaaaggtgactctgaacccgagtgaccctgagcactgtcagatttgccactgcgacgtggttaacctcacatgtgaagcatgccaggaaccaggcggcttggtggtcccccctactgacgctcctgtttctccaaccaccctgtacgtggaagacattagtgagccccccctgcacgacttttattgcagccggctgctggatcttgtgttcctgctggacggctcctcccggctgtccgaggccgagttcgaggtgttgaaggccttcgttgttgacatgatggagcggctgaggatctctcagaagtgggttcgcgtggcagtggtcgagtaccatgatggctctcatgcctacattgggctaaaagatcgcaaacgccccagcgagctgcggcggattgcctctcaggtgaaatacgctgggtctcaggttgcctccacgagcgaagtgctgaagtatactctgttccagatcttctctaagattgacaggcccgaggcatccaggattacgctgctgctgatggcgtcccaggaaccccaacggatgagtcggaatttcgtcagatatgtgcagggcctcaaaaaaaagaaagttatcgttattccagtcggaattggtcctcacgcaaatctgaagcagatccgccttattgaaaagcaagccccagagaacaaggcgtttgttctctctagtgttgatgagctggagcagcaaagggacgaaatcgtcagttacctgtgcgatttggcccctgaagcgccaccacccacactgcctcccgatatggcacaagtcaccgttggcccagggttactcggggtgtctactctcgggcccaaacgtaattcaatggtgctcgacgtggccttcgttttggaaggctccgataagattggcgaggctgactttaataggagcaaagagtttatggaggaagttatccagagaatggacgtggggcaagacagcattcatgtgacagtactccaatactcttacatggtcacagttgagtatccattttctgaggcccagtcgaaaggcgatatccttcagcgagttagggaaatccgctatcagggaggtaatcgcactaacaccggtctggccctgcgctatctgtcagaccactcattcctggtaagtcaaggagacagagagcaggcaccaaaccttgtgtacatggtcaccgggaatcccgcgtcagatgagatcaaaaggctgcccggagacatacaggtggtgccaataggtgtcggtccgaatgccaatgtgcaggagcttgagcgcataggttggcccaacgcaccaatccttattcaagactttgagacactcccccgggaggcacctgacctggttctgcagaggtgctgttccggtgagggtctccaaattcctacgctgtcacccgcacccgattgcagccaacctctggatgtgattctcctcctggacgggagttctagcttccctgcttcctacttcgatgagatgaagtctttcgctaaggcgttcatttcgaaggcgaatatcgggccgcggctgactcaagtgtctgtgctgcagtacggatccataaccacgattgacgtgccctggaacgtggttcctgagaaagcccaccttctctctttagtcgacgtcatgcagcgggaaggtggaccctcccagatcggcgacgctttgggctttgctgtccggtacctgacttccgaaatgcacggggctcgcccaggggcatccaaagctgtggttattctggtgacagatgtcagcgttgactcagtagacgccgcagccgatgcagccagaagcaaccgtgtcaccgtgttccctatcggcatcggagatcgctacgacgcagcgcaattgcgaatcttagcgggaccagcaggcgattccaacgttgttaagctccagaggattgaggacctccccactatggtgaccttgggcaacagcttcctgcacaagttgtgcagtggcttcgtccggatatgcatggatgaggacggcaacgagaaacgtccgggcgatgtatggaccctccctgaccaatgccacacggtcacctgtcaacctgacggccagacgctactgaagtcccatagagttaactgtgatcggggacttcggccctcatgtcctaatagccagtcccccgtgaaggtcgaagagacttgcggatgtcgctggacttgcccttgtgtgtgtactgggagcagcacccggcatattgtgaccttcgacggacagaatttcaagctgacgggcagctgttcatatgtcttgttccagaacaaagaacaggatttggaggtgatcctccacaacggggcctgcagcccaggcgcacggcaggggtgcatgaaatctatagaggtgaagcactctgcgctgtcagtggaactccattctgacatggaagttactgtaaacggccgactggtgtctgtcccttacgtgggaggaaatatggaggtgaatgtctacggggccatcatgcacgaggtccggttcaaccacctggggcacatctttacattcaccccacagaacaatgaattccagctgcagctgtcgcccaaaacctttgctagtaagacttatggactctgcggcatttgcgatgaaaatggggctaacgacttcatgcttcgcgatggtacggtgacaacagactggaagacgctcgtccaagagtggaccgttcagagacctggccagacttgtcagcctattctcgaagagcagtgcctagttccagattcatcacactgtcaagtgctgttgttgcctctgtttgcggaatgtcataaggtactggcaccagctaccttctacgccatctgccagcaggacagctgccaccaggaacaagtctgcgaggttatagctagctatgcccatctgtgcagaacgaatggcgtatgtgtggattggcgaacaccagatttctgtgcaatgagttgccccccaagcctcgtgtataatcattgtgagcacggatgtccgcgacactgcgatgggaatgtcagttcttgtggcgatcaccccagcgaagggtgcttttgccccccagataaagtgatgctcgagggcagctgcgtgcctgaggaggcatgcacccagtgtatcggagaggacggcgtacagcatcagttcttagaggcatgggtcccagaccaccagccatgtcagatctgcacctgtcttagtggacgtaaggtaaactgcaccactcaaccctgccccaccgccaaagcgccaacgtgcggcctgtgcgaggtggctagactccgacagaacgctgaccagtgttgtcccgagtacgagtgcgtctgtgacccagtctcctgcgatcttccccccgtaccccactgcgagaggggcttgcagcccaccctgacaaaccctggagagtgccgccccaactttacctgcgcttgtaggaaggaggaatgcaaaagagtgagtcccccttcctgtccaccacacagactacccaccttacgaaagactcagtgttgtgatgaatatgagtgtgcctgcaattgtgtgaactctacagtgtcatgtcccctagggtatctggctagtacggccactaatgattgcgggtgtactacgacaacctgcctccccgacaaggtctgcgtgcatcgctccaccatctacccggtgggacagttttgggaggaaggatgcgacgtgtgtacctgtaccgatatggaggacgccgtcatggggctcagggtggcccagtgcagccagaagccgtgcgaggactcctgtaggagcgggttcacttacgtgcttcatgagggagagtgctgcgggaggtgcctgccgagcgcatgcgaagtcgttaccggaagtccacgaggcgatagccagagttcatggaagtcggtgggctctcagtgggcaagccccgaaaacccttgtctgattaatgagtgcgtgagagtaaaagaggaagttttcatccaacagagaaatgtgtcatgtccccaactcgaagttcccgtgtgtccaagcggcttccagctgtcttgcaaaacatcagcatgctgcccatcgtgcaggtgtgagcggatggaagcatgcatgctgaatgggactgttatcgggccgggaaaaactgtgatgattgacgtctgtaccacttgcagatgcatggttcaagtcggcgtcatttctggctttaagttggagtgtcggaaaaccacctgtaatccatgcccacttggctacaaggaggaaaacaacacaggggaatgttgcggacggtgccttcctaccgcctgcactattcagctgcgcggagggcagatcatgaccctgaaacgagatgaaacgctgcaggatgggtgtgacacgcacttctgtaaggtgaatgagaggggtgaatatttttgggagaaaagagttacaggctgccctccatttgacgagcacaaatgtctggctgagggcggcaagattatgaagatacctgggacttgctgcgatacctgcgaggaacctgagtgcaacgacatcacagccagattgcagtacgtcaaggtggggtcctgcaagtccgaagtggaggtcgatattcactattgccaggggaagtgcgccagtaaggcaatgtattctattgacatcaatgacgtccaagatcagtgttcttgctgtagccccaccagaactgagcccatgcaagtagcgttgcattgcactaatggaagcgtcgtgtaccacgaagtcttgaatgcaatggagtgtaaatgctcccctcgtaagtgcagcaaa

SEQ ID NO: 12461 - DNA, 8439 bp, Artificial Sequence
  derived and/or modified sequence
atgatacctgcgaggtttgctggcgtgttgttggcgctagccctcattttgcccggaaccctgtgcgcagaagggacaagagggaggtcttctacagctcggtgtagtctgtttggtagtgactttgtgaacacgttcgatggttctatgtatagcttcgccgggtattgctcttacctgttggcaggcgggtgccaaaagagaagcttctccatcatcggagatttccaaaacgggaaacgcgtctcattgtctgtatatcttggagaattttttgacattcacttattcgtcaacggaaccgtgactcagggcgatcagagggttagtatgccttacgcgagtaagggcctgtatctggaaaccgaggctggatactacaagctgtctggggaggcttatggcttcgtagcgcgcattgacggatctggcaatttccaggtgttgttgagcgatcggtactttaacaagacctgtggcttatgcgggaactttaatatcttcgctgaggacgacttcatgacccaggagggcactctaacgtcggatccgtatgacttcgccaacagctgggccctttcatcgggagagcagtggtgtgaacgcgcgagccccccgtcctcctcctgcaacattagttccggagaaatgcagaagggcctgtgggagcagtgccagctgctaaaatctaccagcgtgttcgctagatgtcatccgctggttgacccagagcccttcgtggcattgtgcgagaagacactgtgcgaatgcgccggcggattggaatgcgcgtgtccagccctgctggaatacgctaggacttgcgctcaagagggaatggtgctttacgggtggaccgatcacagcgcgtgctccccagtgtgccctgccggcatggaataccggcaatgcgtctctccctgcgctcggacttgccagagccttcacatcaatgagatgtgccaagagagatgtgtagatggttgtagctgcccagaaggacagctgctggatgagggcctgtgtgttgagagcacagaatgcccatgcgttcacagcggcaagagatacccacctggaacttcattgtccagggactgtaatacttgtatctgtaggaactcacagtggatatgttccaatgaggagtgccccggcgagtgtctcgtgaccggccagagccatttcaagagtttcgacaatcgatatttcacatttagcgggatttgccagtacctcctcgcgcgcgactgccaagaccattctttttctatcgtgatagagacggttcaatgcgccgatgaccgggacgccgtatgcacacggagcgtcactgtgcggctgccgggcctccacaattcgctcgtgaaactgaaacatggcgcgggcgtggctatggatggtcaggacgttcagctgcccctgctgaagggggacctgcggatccagcacactgttactgcaagtgtgaggctgtcctacggtgaagacctgcagatggattgggacggcaggggccggctactggtgaagctgagccctgtgtacgccggcaaaacgtgcgggttgtgtggaaactataatggaaatcagggagatgactttctcactccctccggcttggctgaaccccgcgtggaggacttcgggaacgcatggaaactgcatggtgactgccaggacctacagaagcagcattcagatccttgtgctctcaatccacgcatgactcgcttcagcgaggaagcctgcgccgtcctgaccagcccgaccttcgaggcctgccacagagccgtcagcccattaccatacttgcgcaactgtcggtatgacgtctgttcctgtagtgacggcagagagtgtctatgtggggccctggcatcttacgccgccgcctgcgccgggcgtggggtacgcgtggcgtggcgggagccagggcgatgtgagttaaactgtccaaaagggcaggtatatctgcaatgtggcactccctgtaatttaacgtgccggtcgctaagctacccagatgaggaatgcaatgaagcatgtttagagggttgcttctgtccacccggcttgtacatggatgagcgcggcgactgtgtgcctaaggctcagtgcccttgttactacgacggggaaatcttccagccagaggatatatttagtgaccaccatacaatgtgttattgcgaggatggcttcatgcactgtaccatgagcggcgtccctggctccctgctccccgacgcagtcttgtcatccccactgtctcatcggagcaaacgttccctctcctgtagaccgcccatggtcaagctagtgtgtccggcagataacctgagagcggaaggtctggagtgcacgaaaacttgccaaaactatgatcttgagtgtatgagtatgggatgcgtgtcaggatgcttatgtccccccgggatggtgagacacgagaacagatgtgtcgcgctggaacggtgtccctgcttccaccagggtaaggagtatgcgccaggagagactgtgaaaattgggtgtaacacatgcgtttgccaggacagaaaatggaactgcacagatcatgtgtgcgatgcaacttgctcaactatagggatggcgcactatctgacgttcgacggactgaagtatctcttcccaggagaatgtcagtatgttttggtgcaggattattgcggttctaaccccggcaccttccggatcctcgtcggcaacaaaggatgtagtcatccaagcgttaaatgtaagaaaagggtgaccatcctggtggagggcggggagattgaactcttcgatggcgaagtgaacgttaagcgacccatgaaagatgagacacattttgaagtggtagagtccggtcgatacattatcctgctgctagggaaggccctcagtgttgtgtgggatcgtcatctgtccatctcagtggtgttgaaacagacataccaggagaaagtgtgcgggctatgtggtaacttcgacggtatccagaacaacgacctgacaagcagtaatttgcaggtcgaggaggatcccgtggattttggaaactcttggaaggtttcaagccagtgtgcagatacgagaaaggtaccgctggattcatcccccgcaacctgccataacaatatcatgaagcagaccatggtggactcatcttgtcgcatcctgacgagtgacgtgttccaggactgcaacaagctggttgaccctgagccatacttagacgtgtgcatctacgacacatgctcatgcgagtcgatcggtgactgcgcgtgtttttgtgatacaatcgctgcttatgcccacgtgtgcgcccagcatggcaaggtcgtgacttggcgaaccgccactctctgtcctcaatcctgcgaggagcggaacttgagagaaaatgggtatgagtgtgaatggaggtacaacagctgcgctccggcctgtcaggtcacgtgccagcaccccgagccgctggcatgccccgttcagtgcgtggagggttgtcatgctcactgtcccccgggaaaaatcttggacgaattgcttcagacttgtgttgatcctgaggattgccctgtctgtgaggtcgcgggaaggcgcttcgcttcagggaaaaaggtaacactcaatccatctgacccagaacattgccagatctgtcactgtgacgtggtcaatcttacctgcgaggcctgccaggagcccggggggctggtggtgcctccaaccgacgcccctgtcagtcccactacattgtacgtagaggacatttctgagcctccccttcacgacttctattgcagccgcctgctggatctggtgttcctgctggacggttcgagtaggttatctgaagccgaatttgaggtgcttaaggcattcgtggtcgacatgatggagaggctgcgcatctcgcagaagtgggtgagagttgccgtggtcgagtaccatgacggctcccacgcttacattggcctgaaagatagaaagagaccctccgagttgcggcggatcgcttcacaggttaagtacgcaggctctcaggtagctagcacgagcgaagttcttaaatataccctctttcagatcttcagcaaaattgacagacctgaggcaagtaggatcactctcttgctgatggctagccaggagccccagagaatgagtagaaacttcgttaggtatgtgcagggtctcaaaaaaaagaaggtaatcgtgatacccgtgggcatcggtcctcacgccaacttgaaacaaattcggctaattgagaaacaagcaccagaaaataaagcattcgtcctgagcagcgtcgacgaattggaacagcagcgggacgaaattgtatcctatctgtgtgacctggctccagaagcccccccgccaacactcccccctgatatggcacaagtgaccgtgggacccggtctgctgggggtttccacgttagggcccaagcggaatagtatggtgcttgacgtggcctttgtcctcgaaggcagtgacaaaataggggaagctgactttaataggagcaaagaatttatggaagaagtgatacagcgcatggacgtaggacaggattcaattcatgttactgttttgcaatactcatatatggtcactgtggaataccctttctctgaggcacagtctaagggagacatactccagcgggtgcgcgagattagataccagggtgggaatagaacaaatacaggactggcgcttagataccttagcgatcactcttttcttgtatctcaaggcgatcgagaacaagcccccaacctggtctatatggtaacagggaaccccgcaagcgacgagatcaagcgcctccctggtgatatacaggtggttccaatcggtgtggggcctaatgctaatgtccaggagctcgaaagaattggctggccaaatgcccccattttgatccaggacttcgagaccctgccaagggaagctcccgatctggtattgcagcgttgttgctctggcgagggcctccagattccaacactgagcccagctcccgattgcagtcagcctctggacgtgatattgctcctagatggctccagctcattccccgcgtcctatttcgacgaaatgaaatctttcgctaaggcatttatcagcaaggccaatataggacctagactaacccaggtctcggtgctccaatacggaagtatcacaacaatcgatgtgccctggaacgtcgtccccgagaaagcccacctgttgtccctggtcgatgtgatgcaacgcgaaggcggtccttcccagatcggagacgcccttgggttcgccgtccggtatctcaccagcgagatgcatggtgcacggcctggagcgagtaaggcggttgtgatcctggtgacggatgtcagtgtcgatagcgttgatgcggcagccgacgcagccaggagtaatcgggtgactgtgtttcctataggcatcggagatcgctatgacgctgcacagcttcgtattctggctgggccggctggcgatagcaatgtggtgaaattacagcgaatcgaggacttacctacaatggtaactctgggaaactcattcctgcataagctatgtagcggtttcgtccggatttgtatggacgaggatggcaacgaaaagcggcccggcgatgtgtggacactgcccgaccaatgtcatactgtgacctgtcagcccgacgggcagacactgttaaagtcccatagggtgaattgtgaccgcggacttaggccctcgtgccccaacagccagagccccgttaaggtagaggagacctgcggctgcagatggacctgtccctgcgtttgcaccggatcctccaccagacacattgtgacgttcgacgggcaaaactttaagcttactggttcttgcagctacgtgctcttccagaacaaagagcaagatcttgaggttatcctccacaatggcgcatgttctcccggtgccaggcaaggatgcatgaaatcaatcgaggtcaaacactcagccctgtcagtcgagctccattccgacatggaggttaccgtgaatggaagactagtctctgtcccttatgtcgggggaaatatggaggtgaacgtgtacggggccattatgcatgaagttcggttcaaccatttagggcatatattcacttttacaccacagaacaacgagttccaactccagctcagccccaagaccttcgctagcaaaacttacgggctctgtggcatctgtgatgagaacggcgctaacgactttatgctgagagatggaacagtcaccacagactggaagacactagtccaggaatggacagtacagcgccctggccagacctgtcagcctatcctggaggagcagtgcctcgtgcccgactcaagccactgccaggtgcttctgctacctttgttcgcagagtgccacaaagtgctcgcccccgccaccttctatgcaatttgccagcaggacagctgccaccaggagcaggtgtgcgaggtgattgcctcatacgcgcacctatgccgtactaacggtgtgtgtgttgactggagaacacctgatttctgcgcaatgagctgtccaccaagcttggtgtacaaccactgtgagcatgggtgtccacgacattgtgacggcaacgtttcttcttgcggagaccacccctcagagggatgcttttgtccgcctgacaaggtcatgctagaaggaagttgcgttccggaggaggcctgcacacaatgcatcggcgaagacggcgtgcagcaccagtttctcgaggcatgggtgcctgatcatcagccgtgccagatctgtacctgcctgtccggtcggaaggttaattgtacaacacagccctgccccacagccaaagccccaacgtgcggcttgtgtgaggtagcaaggctgagacagaacgccgaccagtgttgtcctgaatacgagtgcgtgtgcgatcccgtgagttgtgacctacctccggtccctcattgcgagagaggacttcagccgacgctgactaatcccggggagtgtcggccaaatttcacttgcgcatgtaggaaagaggaatgtaagcgcgtgtcccctccgtcatgtccgccccacaggctgcccacacttaggaagacacaatgctgcgatgagtacgaatgtgcgtgtaactgtgttaactcaactgtcagctgtccactcggctacctcgccagcaccgctaccaacgactgtgggtgcactacaaccacctgccttcctgataaagtgtgtgtccatagaagcaccatttacccagtagggcagttctgggaggagggatgcgacgtgtgcacgtgtactgacatggaagatgccgtcatgggcttacgcgtcgcccagtgttcacagaagccatgcgaggatagctgtagatctggctttacatatgtgctgcatgagggagagtgctgtggacggtgccttccctcggcttgcgaggtggtcaccgggtcaccgcgaggagactcgcaatccagctggaaatcagtagggtcccagtgggccagtcctgagaatccctgtctgataaacgagtgcgtgcgagtaaaagaggaggtgttcatacagcagcggaacgtgtcttgcccacagcttgaggtacccgtatgcccatccgggttccagctctcctgtaaaacttccgcgtgttgcccgtcttgccggtgcgaaagaatggaggcctgtatgttgaacgggacagttatcggcccagggaaaaccgtgatgattgacgtttgcacaacctgtcgatgcatggtgcaggtgggtgtcatcagtgggtttaaacttgaatgtagaaaaacaacttgcaacccttgccctctcggttataaagaggagaataatactggtgagtgttgcggtcgctgtctgcctacggcctgcaccatacaactcaggggcgggcagattatgacactcaagagggatgaaactctccaggatggctgcgatacacatttctgcaaagtcaatgagcgtggggagtacttctgggagaagagagtaactggctgtcccccctttgatgaacacaaatgcttggcagaaggtgggaaaatcatgaagatccctgggacttgttgtgatacctgtgaggaaccggagtgcaacgatatcacagcccggctacagtacgtgaaagtcgggtcctgtaagtcagaggtcgaggtcgatatacattactgtcagggcaagtgtgcatccaaggccatgtattccatcgatattaacgacgtgcaggatcagtgtagctgttgctcacctaccagaaccgaaccaatgcaagtagctttgcattgtaccaacgggagtgtcgtgtaccatgaagtgctcaacgccatggagtgcaaatgcagtcccagaaaatgttccaag

SEQ ID NO: 12462 - DNA, 8439 bp, Artificial Sequence
  derived and/or modified sequence
atgattccggcgcgcttcgccggcgttcttctagccctggcactgatcctgcctggcactctctgtgcggaaggcactcgcggccgctctagcactgcgcgttgcagcctgttcggctccgacttcgtgaacaccttcgatggttccatgtacagcttcgcgggctactgcagctaccttctggctggcggatgtcaaaagcggtcattctctatcattggggatttccaaaatggtaagcgtgtcagcctaagtgtctacttgggtgagtttttcgacattcacctattcgtgaatggcaccgttacccaaggtgaccagcgggttagcatgccgtacgcgtctaaaggtctatacttggagactgaggccggctactacaaactgtcgggtgaggcgtacggtttcgttgcccgcatagacgggagcggtaatttccaagtgcttttgagcgaccgttactttaataaaacttgcggcctgtgcggcaacttcaacatttttgccgaggatgatttcatgacccaggaaggaaccctgaccagcgatccatacgacttcgcgaacagctgggcactatcctctggtgaacagtggtgtgagcgcgcttccccacctagctctagctgcaacatttccagcggcgaaatgcaaaagggcctgtgggagcagtgccaactgctgaagagtacttccgtgtttgcccgctgtcaccccctggtcgaccccgaaccttttgttgcactatgcgagaaaactctgtgtgagtgtgccggtgggctggagtgtgcttgcccggcactgctggaatacgcccgaacctgcgcacaggaaggcatggttctctatggctggacggaccacagcgcatgctctccagtgtgtccagccggtatggaataccggcagtgcgtgagcccctgcgcgcgtacgtgccagtccctgcacattaatgagatgtgccaagaacgttgcgtggacggttgctcatgtcctgaaggccagctgctggacgagggtctgtgtgtggagagcaccgagtgcccctgcgttcactccggaaagaggtacccacctgggacatctctttctcgtgactgtaatacctgcatatgccggaattcccagtggatatgcagtaacgaagagtgcccaggcgaatgtttggttacagggcagtcccactttaaatcttttgacaatcggtattttacctttagcggtatatgtcagtatctgctggcccgtgactgccaagatcacagcttttcaatcgtgattgagacggtgcagtgcgcggacgatcgagacgccgtttgcactcgctcagtgaccgttcggctgccgggcctgcacaactctctggtgaagctgaaacacggggctggtgtggccatggacggccaggacgttcaacttccactgctgaaaggggacttgagaatccagcatacggtgacagcgagcgttcgcctgtcgtatggcgaagatctgcagatggattgggacgggcgcggccgcttgctggtcaaactgagtccagtttatgccggcaaaacttgcggtctgtgtggcaattacaatggcaaccaaggagacgactttctgaccccaagcgggctggcggaaccgcgtgttgaggatttcggtaacgcctggaagctacacggcgactgccaggatctgcaaaagcaacacagcgacccatgcgccctgaaccctcggatgacgaggttcagcgaagaggcctgtgccgtgctgacgagcccaactttcgaagcgtgtcaccgggcagtcagcccactgccttatcttcgcaactgtaggtacgatgtgtgtagttgctctgacggccgcgagtgtctgtgtggagctctcgccagctatgccgcggcgtgcgccggccgcggggtgcgggttgcctggcgcgagccgggtcgctgtgagcttaattgtccgaaaggccaggtgtaccttcagtgtgggacaccatgcaacctcacttgtaggagcctgagctaccccgacgaggagtgcaatgaggcctgcctggagggctgcttttgccctcctggtttgtatatggatgaacgcggcgactgtgtgccaaaggcccagtgtccgtgctactacgacggtgagatcttccagcctgaagatattttttcagatcaccataccatgtgctactgtgaggatggctttatgcactgtactatgtctggagttccgggttcccttctgccggacgctgttctgagcagcccactgtcccatcgctctaagcgttcattgtcgtgccgcccaccgatggtcaaactggtgtgtccagcagataatttgcgcgcggaaggtctggagtgcaccaagacctgtcagaactacgacctggaatgcatgtccatgggttgcgtcagcggttgcctgtgtccgccaggaatggtacgccacgagaaccgctgcgttgcattagaacgctgcccttgcttccaccagggcaaggaatacgctcccggagaaacagtcaaaatcggatgcaatacttgcgtgtgtcaagatcgcaaatggaattgtaccgatcacgtgtgcgacgcgacctgttcaactatcggtatggcgcactatctgaccttcgacggcctgaaatatctgttccctggtgaatgccagtacgtactcgtgcaagactactgcggtagcaaccccggtacctttagaatcctggtgggtaacaaaggttgtagccacccttctgtgaagtgcaagaaacgagttactattctggtggagggcggtgagatagaattgtttgacggagaagtcaatgtgaaacgtcccatgaaggacgaaactcatttcgaggttgtggaatctggcagatacattatcctgttattaggcaaggcactgagcgttgtctgggacaggcacctgtcaatctcggttgttctgaaacagacctatcaggaaaaggtttgtggcctgtgtgggaatttcgatggtattcaaaacaatgatctgacctcctctaatctgcaggttgaggaagaccctgttgactttggcaatagttggaaggtgtcatctcagtgtgcagatacgcgcaaagtgcctctggattctagccctgcaacttgccacaacaacattatgaagcagactatggtcgacagcagctgccggatcctgactagcgatgtctttcaggattgcaataagctggtggatccggaaccatatctggacgtctgtatttacgacacctgtagctgcgagagcatcggtgactgcgcctgtttctgtgacaccattgccgcatatgcgcacgtgtgtgcgcagcacgggaaggtggtcacatggcgcaccgcgacgctgtgtccccaatcctgtgaagaacgcaacctgcgcgaaaatggctacgaatgtgaatggcgctacaactcctgtgctcctgcgtgtcaggtcacctgccagcacccagaaccactggcctgtccggtgcagtgcgtggaaggctgccatgcccactgcccgcctgggaaaatcttggacgagctgctgcagacctgtgtggatccagaggattgcccagtgtgcgaagtagcgggtcgcagatttgcttccggtaagaaagtgactctgaacccaagcgaccctgagcactgccagatttgccattgcgacgtagtaaacctcacctgcgaagcctgtcaggagccaggcggcctggttgtccctccaacagacgctcctgttagcccgaccacgctgtatgtcgaggacatcagcgagccaccgctgcacgatttttactgttccaggctgctggacttggtttttcttttagacggtagctcccgactgtctgaggctgaatttgaggtcctgaaggcatttgtggttgacatgatggagcgcctccgaatttctcaaaagtgggtgcgcgtcgccgtggtggaataccacgacggttcccacgcatacattggcctgaaagaccgaaaaagaccttcagagctgaggcgcattgcgagccaggtgaaatatgctggctctcaagtagcttccacaagtgaggtcttaaaatataccctattccagatttttagcaagattgaccgccctgaagccagccgcatcaccctgctgcttatggcttcccaggagccgcaaaggatgtcgcggaactttgttcgctacgtgcagggcctaaagaaaaaaaaggtgattgtcattccggtcggtatcggccctcacgccaatctgaaacagatccgcttgatcgagaagcaagcgccggagaacaaagcatttgtcctgtcatctgtcgatgagctggaacagcagcgcgacgagattgtcagctatctgtgtgacctggcacctgaagcgccaccgccaacgctacctcctgatatggcacaggttacggtgggtccaggcctgctgggtgtgtctacactgggccccaaacgcaacagcatggtgttggacgttgcgttcgtgctcgagggctctgacaagatcggtgaggctgacttcaaccgaagcaaggaattcatggaagaagttattcagcgcatggacgtggggcaagattccatccacgtgaccgtcctacaatactcgtacatggtgactgtagaatatccgttttcggaggcacagagtaagggtgacatcctgcaacgcgtccgcgaaatcaggtatcagggtggtaatcgcacgaatactggactggcgctgcgctatctgagcgaccacagcttcttggtgagccaaggtgaccgggagcaagctccaaatctggtgtacatggtgacaggtaaccctgcgtccgatgaaataaagcgcctgcctggcgatattcaagtcgtccccattggcgtgggtccgaatgcaaacgttcaagagctggaacggataggttggcctaatgccccaattctgattcaggacttcgagaccttgcctcgagaggcgccggatctggtcctgcagagatgctgcagcggcgaaggtctccaaattcctaccctgagtccagcccccgattgctctcagcctttagacgtgatcctgctgctggatggaagctcgagctttcccgcctcgtacttcgatgagatgaaatccttcgcaaaagcttttattagcaaggcaaatattggtccgcgcttgacccaggtttctgtcctgcagtacggctctatcacgactatcgatgtcccatggaacgtcgttccggagaaagctcacctgctgtccttggttgacgtgatgcagcgagaaggtggtccgtcacagatcggtgacgctctgggcttcgccgtccgttacctaacaagcgagatgcacggcgctcgtcctggtgcctctaaagcagttgtcattctggttaccgacgtgtctgttgatagcgttgacgccgcagccgacgcagcacgcagcaaccgtgtgaccgtgtttccgattgggatcggcgaccgttacgatgccgcccaactgcgaatactcgcgggaccggcgggcgacagcaacgttgttaaactgcagcgaattgaggatctgccaaccatggtcacgctgggaaattccttcttgcataagctgtgcagtgggttcgtccgtatctgtatggacgaggacggcaacgaaaagagaccgggtgacgtttggactctgcctgaccagtgccacacggtaacctgccagccagatggtcagaccctgctgaaaagccaccgcgtaaattgcgatcgcggcctgcgacctagttgccctaactcgcagagtccagtaaaagtcgaagaaacgtgtggttgccgttggacctgtccatgcgtctgcaccggtagcagcacgcgccacatcgtgaccttcgacggccaaaacttcaaactgaccggcagctgtagttacgttttgttccaaaacaaggagcaggacttggaagtcatcctgcacaatggagcctgctctccaggtgccagacagggttgcatgaaatcaatcgaggtgaaacattctgccctgagcgtcgaactgcacagcgacatggaagtcaccgtaaacggccgcctagtgagtgtcccttatgtgggtggtaatatggaagtgaacgtctatggcgctataatgcacgaggttcgttttaatcacttaggtcatatcttcacgttcactcctcagaataatgagtttcagctgcagttgtcaccaaagactttcgcgtcaaagacctacggtctgtgtggtatttgcgatgagaacggtgcgaacgacttcatgctgcgggatggcaccgtcaccaccgattggaagaccttggtgcaggagtggacagtgcaacggccgggacaaacctgccagccgatcctggaggagcagtgcctcgttccagactcatctcactgtcaggttttactactgcctttgttcgccgagtgtcacaaggtcctcgcaccggccaccttttatgcaatctgccagcaggacagctgccatcaggaacaggtgtgtgaggtcattgcatcatacgcacatctgtgccggaccaatggcgtctgcgttgattggcgtactcctgatttttgtgccatgtcatgcccaccgtcgctggtgtacaaccattgtgagcacggctgtccacgccactgtgatggcaatgtgagcagctgtggcgaccatccttctgagggctgcttctgcccgccggataaggttatgcttgaaggaagctgcgttccagaggaggcgtgtactcagtgcatcggcgaggacggtgtccagcaccagttcctggaagcatgggtaccagatcaccagccttgccagatctgcacctgtttgtccggacgcaaggtgaattgcactacgcagccgtgcccaactgctaaggcaccgacctgcggcctatgtgaagtcgcaaggctgcgccaaaatgccgaccagtgttgtccagaatatgagtgtgtgtgcgatccggtcagttgcgatctgccgcctgtgcctcattgcgagcgcggactgcagccgaccctgacgaacccgggggaatgccgtccaaatttcacgtgcgcgtgtcgtaaggaagaatgcaaacgcgtgtctccaccttcgtgtccgccacataggttgcctaccctgcgaaagacccagtgctgcgatgaatatgaatgtgcttgtaattgcgttaacagcaccgtgtcatgcccgctgggttacctggcatctaccgccactaacgactgtggttgcaccaccactacctgcctgccagacaaggtgtgtgtacatcgctctaccatttacccagtgggtcagttctgggaggagggctgtgacgtttgtacgtgcaccgacatggaggacgcagtgatgggtttgcgcgtcgcccaatgctctcagaagccttgcgaggattcctgccgctctggatttacgtacgtgctgcacgagggtgagtgctgcggtaggtgtctgccgagcgcgtgtgaggtcgtgaccgggtctcctcgcggtgacagccagagctcgtggaagagcgttgggagtcagtgggcaagcccggagaatccgtgtctgattaatgagtgcgtccgcgttaaggaggaagtctttattcagcaacggaacgtctcttgccctcagctggaggttccggtgtgtccgagcggtttccagctgtcatgcaagacctcggcatgctgcccgtcatgccgctgcgagcgtatggaagcgtgcatgttgaacggcaccgtgatcggccccggcaagacggtcatgattgatgtctgcacgacttgtaggtgcatggtgcaggttggagtcatttctggcttcaagctggaatgccgcaagacgacctgtaacccatgtccgctcggttacaaggaggagaataacactggcgaatgctgcggaaggtgcctgcccaccgcgtgcacaattcaactgagggggggccaaatcatgaccctcaagcgtgatgaaacccttcaggacggttgcgatacacatttttgtaaagttaacgaacgcggcgagtacttctgggagaaacgtgtgaccgggtgtccgccttttgacgagcacaaatgtttggcggaaggcggtaagatcatgaagatcccaggcacctgctgtgacacctgcgaggaaccggagtgtaatgacatcaccgcgcgcctgcagtatgtcaaggtcggtagctgtaagtccgaagtggaagttgacattcattattgccaaggcaagtgtgcgtctaaagctatgtacagcattgatattaatgacgtccaggaccagtgtagctgttgcagcccaacgcgcaccgagccgatgcaagttgcgctgcattgcacgaatggtagtgtcgtttaccatgaggtgttaaacgcaatggaatgcaaatgcagtcctcgcaaatgtagcaag

SEQ ID NO: 12463 - DNA, 8439 bp, Artificial Sequence
  derived and/or modified sequence
atgatacccgctcggtttgctggcgtattgctcgcgcttgcgctgattctaccaggcaccctgtgtgccgaagggacgagaggccggagttccactgcacggtgttccctgtttggaagtgatttcgtgaacacgttcgatggctcaatgtatagcttcgccggctattgttcctatcttctggcaggcgggtgtcagaagcgatcctttagtatcatcggggatttccagaatgggaaaagagtcagcctcagcgtgtacctgggtgaattctttgatatacacttatttgtgaatggaactgtgacccagggtgaccaacgagtttcaatgccctatgcatcaaagggtctgtacctcgagacagaagctggctattacaaactgtccggagaggcatatgggttcgtagcccgaattgatggaagcggcaacttccaagtgcttctttcagaccggtattttaataagacttgtgggctatgcggtaatttcaatatattcgctgaagacgatttcatgactcaggagggaacattaacgagcgatccctacgattttgccaactcttgggccctctctagtggcgagcagtggtgcgaaagagcttctcccccttctagcagctgcaacatctcaagcggcgaaatgcaaaagggcctatgggagcagtgtcagctgctgaaatctacgtccgtcttcgcccgctgccacccactggtggaccctgagccattcgtggctctgtgtgagaaaacactctgcgagtgtgcggggggactggagtgtgcatgccccgcgctactggaatatgctcgtacctgcgcgcaggaaggaatggtgctgtatggatggacggatcattccgcgtgctcacctgtgtgtcccgcggggatggagtaccgccagtgtgtgtcaccctgcgctcggacatgtcagagcttgcacattaatgagatgtgccaggagagatgtgtcgatgggtgctcatgcccagaagggcaattgctggatgagggcctgtgtgtggaatctaccgaatgtccctgtgttcactctggaaaaagatacccacctggtacgtcactcagcagggattgcaatacctgcatctgccggaattctcagtggatctgttccaacgaggagtgtcctggcgagtgcctggtcaccgggcagagtcacttcaaaagcttcgataacaggtattttacatttagtggcatctgccagtacctactggcccgggactgccaggaccactcatttagtatcgttatcgagacagtccagtgcgctgacgacagagacgcggtttgtaccagaagcgtgactgttagactacctggtttacacaactcattggtgaaactgaagcatggtgccggagtggcgatggatggtcaggacgtgcaattaccattgctcaaaggggatttaaggattcagcacacagtaactgccagcgtcagactgtcatatggtgaggacctgcagatggactgggatgggagagggcggctgctagtgaaactgtcgcctgtgtatgccggcaagacttgcggcctgtgtggcaattataacggcaaccagggagatgattttcttacacctagcggactggctgaacctcgagtggaggatttcggaaacgcttggaaattgcatggcgactgtcaggacctccagaagcagcacagcgatccttgcgctctgaatcctaggatgactaggttttccgaggaagcatgtgccgtcttaacttcaccgacatttgaagcctgtcaccgagccgtttcccccctgccctacctgaggaattgcaggtacgatgtatgtagctgttccgatggccgcgaatgtctatgtggtgcactggctagctacgctgcagcgtgtgcaggaaggggcgtgcgagtggcatggcgggagcctgggcgttgcgaacttaattgccctaaaggacaagtatacttgcagtgcgggactccttgtaacctcacgtgccggtcgctctcctaccctgatgaggagtgtaacgaagcatgccttgaagggtgcttttgtccacctggtctctacatggacgagagaggagattgcgttccaaaagcgcagtgtccctgttactatgacggagagatatttcagcctgaggatatattctccgatcaccatacaatgtgctactgtgaggacggctttatgcattgcacaatgagcggagtgcctgggtcccttctgccagatgctgtgctgagctctccgctctcgcacaggtctaagcggtccttgtcctgccgtccacctatggtgaaactcgtctgccccgctgacaatttgagggctgagggtctcgagtgcacaaagacatgccaaaactatgatctcgagtgtatgtccatggggtgcgtgtcgggctgcctgtgtccaccgggaatggtgagacatgagaatcgctgtgtggcactggagcggtgtccctgcttccatcaaggcaaggagtacgcacccggtgagaccgtcaaaattgggtgtaacacctgcgtctgccaggatcgcaagtggaactgtactgatcacgtgtgtgacgctacctgttccacaattggcatggctcattatctgacatttgacggcctcaagtatctgtttccaggcgaatgccagtacgtgctggttcaagactactgcggaagcaaccctggtacttttcggattctcgtggggaacaaaggctgcagccaccccagtgtaaagtgtaaaaaaagagtgacgatactggtagagggcggagagattgagctgttcgatggtgaggtgaacgtgaagcgccccatgaaagatgagactcacttcgaggttgtcgagtcaggacggtatatcatactgctcttaggaaaagctttatcagtggtgtgggatcgccacttgagtatcagcgtggtgctcaagcagacatatcaggaaaaagtgtgtggtctgtgcggcaatttcgatggaattcagaataatgacctgacgtcttcaaatcttcaggtcgaggaagatccagtagacttcggtaattcttggaaggtgagttctcagtgcgcagacacgcggaaggtgcccctggacagctccccagcaacctgtcacaacaatatcatgaagcaaacaatggtggattctagctgtcgcattctcacttcagatgtttttcaggattgtaacaagttggttgacccagagccctatttagacgtgtgcatctatgatacttgttcctgcgagtcgattggggactgcgcgtgcttctgcgataccattgccgcctacgcgcacgtttgtgctcagcacggaaaagtggtgacctggcgcaccgctactttgtgcccacagtcttgtgaggaacgtaacctgcgggagaacggctacgaatgtgaatggcggtacaactcatgtgctcccgcatgccaggtgacatgccagcatcccgagcccctggcttgtccggttcagtgtgtagagggctgtcatgcacactgccctccaggaaaaatcctggatgaactgctgcagacttgcgtggacccagaagattgcccagtctgcgaagttgctggccgtcgctttgctagtggaaagaaagtaaccttgaacccatcagatcccgaacactgtcaaatttgccactgtgacgtggtaaacctaacatgcgaggcatgtcaggagcccggtggcctggtggtgccgcccacagacgcaccagtgtctcccacgacactgtacgtagaggatatctctgaaccgccccttcatgatttctactgtagtcggcttctggacctggtgtttcttctagacggctcatcgagactgagcgaagcggagttcgaggtgcttaaagcctttgtagtggacatgatggagagattgaggatctcccagaagtgggtgagagtggctgtggtcgagtatcacgacggctcgcacgcctacatcggtctcaaagaccgcaagagaccatctgaactgcgtcggatcgcgtcacaggtgaaatacgctggcagccaagtcgcaagtacttcggaggtgctgaaatatacactgtttcaaattttttcaaaaattgacaggcccgaagctagccggattaccctattactcatggcgagtcaggaaccccagcggatgagcagaaacttcgtcaggtacgttcagggtctgaaaaagaaaaaagtaatcgtcattcccgttgggattggccctcatgccaacctgaagcagatccgcctgatcgaaaagcaagctcccgagaacaaagctttcgtccttagcagcgtcgacgaactagagcagcaacgagacgagatagtgagttatctctgtgaccttgcgccggaggccccaccccctaccctgccccctgacatggcccaggtaacagtggggcccggtcttttgggcgtttccacactcggaccaaaaagaaatagcatggtcctggacgtcgctttcgtgctggaaggctccgacaaaattggagaggcagacttcaatagaagcaaagaattcatggaggaggtaatccaacgcatggatgtgggacaggactctatacatgtgacggtcttgcagtacagttacatggtgactgtcgagtacccattttcagaggctcagagcaagggagacatcctgcagcgcgtgcgcgagatccgctaccagggtggaaatagaactaatactggcctcgcattgcgttacttgagtgaccactcctttctggtatcgcagggcgatagggaacaggccccgaacctcgtatacatggtcacgggaaacccggcttccgatgaaataaagaggttacccggagacattcaggtcgtgcctattggtgtcggacctaatgcaaatgttcaggagttggagagaataggttggcccaatgcgcccatcctgatacaggacttcgagacgctacccagggaggcacccgacctggtccttcaacggtgctgtagcggcgagggactgcaaatcccaactctgtcacccgccccagattgttcccagcctctcgatgtgatcttgttactggacggctcgtccagttttccagccagctacttcgatgagatgaagtcttttgcgaaggccttcatctcgaaagcaaatataggaccgcgtcttactcaggtcagcgtgcttcaatatgggagtattacgaccatcgatgttccctggaacgtggtgcccgagaaagcccacctcttaagcctggtggacgtaatgcagcgcgaaggcggcccaagtcagattggggacgcacttggatttgccgtgcggtacttaactagtgaaatgcatggagcaagacccggagcaagtaaagccgtggtaatactcgtgaccgatgtgagtgtggatagtgttgacgcagctgccgacgccgcgcggtccaatcgggtgacagtcttcccaataggtatcggcgacaggtacgacgccgcccagttgagaattcttgctgggcctgcaggtgattcaaatgtggtgaagctgcagagaatagaggatcttcccactatggtcaccctcggtaactcatttctccacaagctgtgctctggatttgtgaggatttgcatggacgaggacggaaacgagaaacgtccgggagacgtttggacgctgcctgaccagtgtcacactgtaacatgtcagcccgatggccagaccctcctcaagagccatcgagtaaattgtgacagaggcctgcgtccgtcatgccctaattctcaaagccccgtcaaagtagaagagacttgcggctgcagatggacttgcccatgtgtctgcaccggcagcagtacccggcacatagtgacgttcgatggccaaaatttcaaattgaccggtagctgcagctatgtgctgtttcagaataaggagcaagatctggaagtaattctgcacaacggagcctgctcaccaggcgctaggcagggatgcatgaagtcaattgaagtgaagcacagcgctttgtccgtcgagctccattcagacatggaggtgaccgtcaacggcaggctggtcagcgtgccatatgttggcggtaatatggaggtcaatgtctacggggcaattatgcacgaagtgcgatttaaccacctaggccacatcttcaccttcaccccccagaacaatgaatttcaactgcagctgtctcctaagaccttcgcaagcaaaacctatggcctctgcggcatctgcgacgagaatggcgcgaacgatttcatgttgcgagacggaactgtgacgacagactggaagacactggtgcaggagtggactgtccagcggcctgggcagacctgccagcccatcctggaagaacagtgcctcgtgcctgattcctcccactgtcaggttctgttattaccactctttgcggagtgtcacaaagtgttggcaccagcaacattttacgctatctgccagcaggactcctgtcatcaggagcaggtatgcgaagtaattgcgagttatgcccacctgtgtcgaacgaatggcgtgtgtgttgactggcgcactcccgacttctgcgccatgagttgccctccctctttggtctataaccattgcgagcacggttgtcctcgacattgtgatggcaatgtgtcaagttgcggcgatcatccctcagaggggtgcttttgccctcctgacaaagtaatgttggaagggagctgcgtgcctgaagaagcgtgtacacaatgcatcggcgaagatggggttcagcaccaattcctggaggcctgggtaccagaccaccagccatgccagatatgtacatgtttgtctggtcgtaaagtaaactgcacgacccagccatgccccacagcgaaggctcctacgtgtggcttgtgtgaagttgcccggctgcgccagaacgccgaccagtgttgccccgagtacgaatgcgtgtgtgatcccgtatcctgtgatcttccacccgttccccattgcgagcgcggtctgcaaccgacactaaccaacccaggagaatgccgcccgaactttacttgcgcttgtcggaaagaggagtgtaagagggtgagccccccgtcctgtcctccacaccggcttcctacgctgcggaagactcagtgttgcgatgaatacgagtgcgcgtgcaattgcgtgaatagcaccgtatcttgccccctcggataccttgcgagcacagccaccaatgactgtggttgcaccacgactacctgcctgcctgacaaagtgtgcgtgcaccggtcgactatctatcccgtcgggcagttttgggaggagggatgtgacgtttgtacatgtacagatatggaagacgctgtgatggggttacgagtcgcacaatgtagtcagaagccatgtgaggactcttgtcggtctggtttcacatacgttctgcacgagggagaatgttgtggccgctgtctgccctccgcatgtgaagtcgtaaccggatccccccggggtgactcccagagctcttggaagtctgtgggctcacaatgggcatcccctgagaacccctgcctcattaatgaatgcgttcgtgtcaaggaagaagtgttcatacagcagagaaatgtgtcatgcccacagcttgaagtgcctgtgtgccccagtggatttcagctgtcatgtaagactagtgcctgctgtccctcgtgccggtgcgaaaggatggaagcatgcatgttaaacggcactgtgatcggacctggcaagacagtgatgatagatgtgtgtacgacctgccggtgtatggtccaggtgggtgtcatttcaggcttcaaattggagtgccggaagaccacatgtaatccctgtccactcggatacaaggaagagaacaacacaggtgagtgctgcggccgctgcctgcctacagcctgcacgatccaattaagaggtggccaaattatgacactcaaacgggatgagacactccaagatggctgtgacacacatttctgtaaggtcaacgagaggggcgaatacttctgggagaagcgcgtcacaggatgtcctcctttcgatgaacataagtgtctggcagagggaggcaagatcatgaaaatcccagggacctgctgtgacacctgcgaggaaccggagtgcaacgatatcactgcccgtctgcagtacgtaaaggtgggctcatgtaaatccgaagttgaggtggatatacattactgccaaggcaagtgcgcctcaaaggcgatgtactccatcgatatcaacgacgttcaagatcagtgtagttgttgctctcctacacggacagagccgatgcaggtggctctgcattgcacaaacgggagtgtggtctatcacgaagtgttaaacgcgatggaatgtaagtgtagcccaagaaagtgctctaag

SEQ ID NO: 12464 - DNA, 8439 bp, Artificial Sequence
  derived and/or modified sequence
atgatccccgcaaggttcgccggagtccttctcgcactcgcactaattctacctgggactctctgtgctgagggaactcgtggacggtctagtacagctcggtgttccctgttcgggtctgactttgtgaatactttcgatggatctatgtattctttcgccgggtactgtagttacctcctagctggagggtgccagaaaaggtcattctctatcatcggggatttccaaaatggaaaaagggtgagtctgtcagtataccttggagaatttttcgatatccatcttttcgtcaacggaactgtcacacagggggatcagagggtgtcgatgccttatgcatctaagggactttatctcgaaactgaagcagggtattataagctttcaggagaagcctatggatttgtcgctagaattgatgggtccggaaactttcaggtgctcctctccgatagatacttcaacaaaacatgcgggctctgtgggaactttaatatattcgctgaagacgattttatgactcaggaaggaactcttacatccgatccttatgatttcgccaactcatgggccttatctagtggggaacagtggtgtgaacgggcttctcccccttcctcctcctgcaatatctcttccggggagatgcagaagggactctgggaacagtgtcagctgctaaaaagtactagtgtttttgcccgatgccaccctcttgtggatccagaaccattcgttgccctctgtgaaaagacactatgcgaatgtgcaggaggactggaatgtgcttgtcccgctttactggagtatgccagaacatgtgcacaggaagggatggtcctgtacgggtggacagaccattctgcatgttcaccagtgtgtccagctgggatggaatatagacagtgtgtttcaccctgcgcgcgcacatgtcaaagtttacatatcaatgaaatgtgccaggagcggtgcgtcgatgggtgttcatgccctgaaggacagcttctcgatgagggactttgtgtggaatccacagaatgtccttgcgtccattcaggaaaacgctaccctcccggaacatccctctctagagattgtaatacatgtatctgcagaaattctcagtggatatgctcaaatgaggagtgtcctggagagtgcctggtcacaggacagtctcactttaaatctttcgataacagatattttacattctccggaatttgtcaatacctgctagcaagagattgtcaggaccactccttctctattgtcatagaaacagttcaatgcgccgatgatcgagatgcagtgtgtactcgtagtgtcacagtacggctgcccgggcttcataatagtctggtgaaattgaaacatggagcaggggtggccatggatggacaggatgtccagctaccattactaaaaggggatctcagaatacagcacactgtgacagctagtgtgcgcttgagttacggagaagatctacaaatggattgggatggacggggacggctactcgtgaaactctctcctgtgtatgccgggaaaacatgtggactgtgtgggaattataatgggaaccagggggatgattttctcacacctagtggactggccgaaccccgggtcgaagatttcggaaatgcctggaagctgcatggggactgccaggacctccagaagcagcatagtgatccatgtgctctcaatccccggatgactcggttctctgaggaggcttgcgctgttctcacttctcctacattcgaagcctgtcaccgtgcagtgagtccactcccctatctacgtaattgtcgatatgatgtctgctcatgttctgacggaagggaatgtttatgtggagccctcgcgagttatgccgccgcatgtgcaggaaggggggtccgcgttgcatggcgggaacctgggagatgtgaacttaactgtccaaaaggacaagtctatttgcagtgtgggacaccctgcaacctgacttgcagatccctgtcttaccctgatgaagagtgcaatgaggcttgcctggaggggtgtttctgtcccccagggctatacatggatgaaaggggagattgcgtgcccaaagcccagtgtccctgctattatgatggggagatcttccagcccgaggacatttttagtgatcatcacactatgtgctattgcgaggatgggtttatgcattgtacaatgtccggggtacctggatcactcctgcccgatgccgttctatcttcacctctgtctcatcgctcaaagcgctcattgtcatgtcggcctcctatggtgaaattagtttgtcccgctgacaatttgagggcagaaggactagaatgcactaaaacatgccagaactatgatcttgagtgcatgtctatgggatgtgtctctggatgtctctgccctccagggatggtgaggcatgaaaatcggtgtgtagccctggaacggtgtccctgtttccaccagggaaaagaatatgcccccggggaaactgttaaaataggatgcaatacatgtgtgtgtcaggatcggaaatggaattgcactgatcatgtttgcgatgcaacttgctcaacaataggaatggcacactatctaacatttgatggacttaaatacctcttccctggagaatgtcagtatgtactggttcaggattactgtggatctaaccccggaactttccgcatcctcgtagggaacaaaggatgttcccacccctcagtaaaatgcaaaaaacgagtgactatccttgtcgaggggggagaaattgaactgtttgatggagaagtcaacgttaaacgcccaatgaaagatgaaactcatttcgaagtggttgagagtgggagatacataatcctgctgctcgggaaggcattatcagtagtatgggatcgccacttgtctatatccgtggtcttgaagcagacttaccaggagaaagtttgcgggctgtgtggaaacttcgatggaatccagaataacgatctcacttcttccaatctgcaggtggaggaagatcctgtggatttcgggaactcctggaaagtctcctctcagtgtgcagatacaaggaaagtgccccttgattcctccccagccacatgccacaataacataatgaaacagacaatggtcgactcttcttgtaggatccttacatccgatgtattccaggattgtaacaaactcgttgatcccgaaccctatctggacgtgtgtatatatgatacttgttcctgcgagtctatcggagattgcgcttgcttctgtgatacaatagctgcctacgcccatgtgtgtgcacagcatggaaaagtagtgacatggcgaactgctacactctgtcctcagagttgcgaggaacgaaacctgcgggaaaatgggtatgaatgtgaatggagatacaacagttgtgcacctgcctgtcaggtgacatgtcagcaccccgagcctctcgcttgccctgtgcagtgtgtggaaggatgccacgcccattgccctcctgggaaaattcttgatgagcttttgcagacatgtgtggatcctgaagattgtcctgtttgtgaagtggcaggacggagattcgcatctgggaaaaaagtgacactcaacccatcagatcccgaacactgccagatctgtcattgtgatgtggtgaacctcacatgcgaagcttgccaggagccaggaggactcgtggtacctcccactgatgcccccgtgagtcccacaactctctatgtcgaagatatcagtgagccacccctccatgatttttattgttcccgactgctggatcttgtatttctcctggatggatctagtcggttgtctgaggcagaattcgaagtgctcaaagccttcgtcgtggacatgatggaacggctacggatcagtcagaaatgggtccgcgtggcagtggtagaatatcacgatggatcccacgcatatatcgggcttaaagatcggaaacggccaagtgaattacggaggatcgcctctcaagtaaaatatgccggatcacaggtcgcctccacatctgaagtcctaaagtacactctctttcagatcttttctaagatagatcggccagaggcttctcgaataacactcttgctcatggcttcccaggagcctcagcggatgtcccgcaattttgttcggtatgtccagggattaaagaaaaaaaaagtcatcgttatacctgtcggaatcgggcctcacgccaacctcaagcagatcaggctcattgaaaaacaggcccctgaaaacaaagcctttgtgttgtcaagtgtggatgagcttgagcagcagcgcgacgaaatagtgtcttacctctgtgatctcgcaccagaagctcccccccccacattgcctccagatatggcgcaggttacagtcggacctgggctcctaggggtttcaacactcggacctaaaagaaactcaatggtgttggatgtcgcgttcgtgctcgaagggtctgataaaattggagaagccgactttaatcggtctaaagagttcatggaagaagttatacagaggatggacgtcggacaggacagtattcacgttacggtacttcagtattcctatatggttacagtcgagtatcctttttccgaagcccagtccaaaggagatatactgcagcgggtgcgcgaaatccggtatcagggagggaataggactaacactgggctagcactaagatatctctctgatcactcattcttggtttcccagggggacagggaacaggcccccaacctagtctatatggtgactggaaaccccgcgtctgatgaaataaaacggctaccaggggacatacaggtcgtacccatcggagtgggacctaacgctaatgttcaggaactcgaaaggattggatggcccaacgcgcctatccttatccaggattttgagactctgcctcgggaagccccagatctagtgctccagaggtgttgtagtggggaaggactgcagatcccaactctttctccagctcccgattgctcccagcccttggatgttatcctgctattggacggatcctctagtttccctgcgagttactttgatgagatgaaatctttcgcaaaagccttcatatctaaagctaatatcggacccaggctgacacaggtatctgtgcttcagtacggatccatcactacaatagacgtaccctggaatgttgtacccgaaaaggctcacctgctgtccttagtggatgtcatgcaaagagaagggggaccttctcagataggggacgctctcgggttcgctgtgcggtacctcacatctgaaatgcacggagcccggccaggagcatctaaggcagtggttatcctggttacagatgtgtccgtggattcagtggatgccgctgctgatgccgcaagaagtaaccgggttacagtgtttcccataggaatcggagatcggtatgatgctgctcagctacggatcctcgcaggaccagcaggagattctaatgttgttaaattacagcgaatagaggacctacctacgatggttacactcggaaactctttccttcataaattatgttcagggtttgtccggatttgtatggatgaagatggaaacgaaaaacgccccggagatgtgtggacacttcctgatcagtgccatactgtgacatgccagcctgatgggcaaactctcctgaaatcacaccgggttaattgtgataggggacttaggccttcttgtcctaattcgcaatcaccagtgaaagtggaggagacttgcgggtgcagatggacatgtccatgtgtatgcacagggtcttccacaaggcacatcgtgacatttgatgggcagaacttcaagttaacaggatcttgctcttatgtacttttccagaataaggaacaggatttagaagtaatactccacaatggggcctgctctcctggagcccgtcaggggtgtatgaaaagtatcgaagtaaaacactctgccttatctgttgaactccatagtgatatggaagtgactgtgaacgggagactcgtcagtgtgccttatgtgggaggaaacatggaagtgaacgtctatggagccatcatgcacgaagtgcgcttcaaccacttggggcacatattcacatttactccccagaacaatgaattccagttgcagctgagtcctaaaactttcgcttctaaaacatatgggctgtgtggaatttgtgatgaaaatggagcaaatgattttatgctaagagatgggactgtcacaactgattggaaaacacttgtgcaggagtggacagttcagcggccaggacagacatgtcagcccattcttgaagaacaatgtctggtgccagactcatctcactgtcaggtgctgctcttaccactctttgccgagtgccataaggtgctcgcaccagccacgttctatgccatttgccagcaggattcgtgtcatcaggaacaggtgtgcgaagtaattgcttcttacgcccacctgtgtcgcacaaacggggtttgtgtcgattggagaacacctgatttctgtgcaatgtcctgtcccccgtccctcgtatataatcattgtgaacatgggtgcccacggcattgtgacggaaacgtatcttcatgtggagaccatcctagtgaagggtgtttttgtcctcccgataaggtgatgttggaaggatcctgcgtacccgaggaggcctgcactcagtgcataggagaagacggggtgcagcatcagtttctagaagcttgggttcccgatcatcagccctgccagatttgtacttgtttatccgggagaaaagtgaactgtactactcagccatgtcccactgccaaagctcccacatgcgggctttgcgaagtggcacggctacgacagaatgcagaccaatgttgtcctgaatatgagtgcgtgtgcgatccggtgtcgtgcgatcttcctcctgtgccacactgtgaacgcgggttgcagcctacactaacaaaccccggagagtgtagacctaatttcacttgcgcatgccgcaaagaagaatgtaaacgagtgtctcctccttcctgtcctccacaccggttacctactcttcgcaaaactcagtgttgtgatgaatacgaatgtgcctgtaactgcgtgaattctactgtgtcgtgccctctaggatatctcgcttccactgcaactaatgattgtggatgcactactacaacttgcctcccagataaggtgtgcgtccatcggtccactatatatcctgtggggcaattttgggaagaagggtgtgatgtgtgtacttgtacagacatggaagatgcagtgatgggactccgcgtcgcacaatgctcgcagaaaccatgtgaagatagttgtcgctctgggttcacatatgtactgcacgagggagagtgttgcggaagatgcttgcctagtgcctgcgaagtggtcacagggtcgccacgcggagattcccaatcttcttggaaatctgtggggtcccagtgggcttctccagaaaacccctgtctgatcaatgaatgtgttcgcgtgaaggaagaagtgttcatccagcagcgaaacgtgtcatgcccacagctggaggtcccagtgtgtcccagtgggtttcagctatcttgtaaaacatcagcctgctgtccatcttgccgttgcgaacgaatggaagcttgcatgctcaatggaacagtaataggacccggaaagacagtgatgatcgatgtgtgtactacatgcagatgtatggtgcaggttggagtcatctccgggtttaaactggaatgccgcaaaacaacatgcaatccgtgtccactaggatataaagaagaaaacaatactggagaatgctgcgggaggtgtctgcctactgcctgtacgatccagctccggggaggacagatcatgacactgaaaagggatgagactctccaagatgggtgcgatacacatttttgtaaagtgaacgaaaggggagaatacttctgggagaaacgagttacaggatgcccccctttcgacgaacacaaatgtcttgccgagggaggaaagataatgaagattcccggaacttgttgtgatacatgtgaagagccagaatgtaacgatataacagcacgactccagtacgtcaaagtggggtcttgcaaatcagaggttgaggtggatattcactattgtcaggggaaatgtgccagtaaagctatgtattctattgatatcaacgatgtccaggatcagtgctcatgctgctctcccacacgaacagagcccatgcaggtcgctctccactgtacaaatggatccgtagtataccatgaagtcctcaacgccatggaatgtaaatgttcgccccgaaaatgcagtaag

SEQ ID NO: 12465 - DNA, 8439 bp, Artificial Sequence
  derived and/or modified sequence
atgattccggctagattcgcgggcgtgctgcttgctcttgctctgatactcccaggcacactgtgcgctgaagggacaaggggcagatcctccacggccaggtgctcactgtttggttccgactttgtgaatacctttgatgggtcaatgtattcctttgccggttactgctcttacttgttggccggtggctgccagaaaaggtcattctctatcattggggactttcagaacggcaaacgagtgtctctcagcgtgtatctcggggagtttttcgacatccatctctttgtcaatgggaccgtgacacaaggcgaccaacgcgtcagcatgccatacgcttctaaaggcctgtacctggaaacagaggctggatactataagctttctggcgaggcgtacggattcgtcgctaggatcgacggtagtggcaattttcaggtgctgttgagcgaccgctattttaacaaaacctgcggactgtgtggaaacttcaacatcttcgccgaggacgactttatgacacaggagggcacacttactagcgacccgtacgactttgcaaactcatgggcactgagttccggggagcagtggtgcgagagggcaagtccaccgtcaagctcttgcaacatcagtagtggagagatgcagaaaggtttgtgggagcagtgccagttgttgaaatccacctctgtctttgctcggtgtcatcccctggtcgaccctgaaccttttgtggccctctgcgagaagacgctctgtgagtgtgccgggggccttgaatgcgcttgccctgcgttgctggagtatgcgcgcacctgtgcccaggaggggatggttctgtatggctggacagaccacagtgcatgctccccagtgtgcccagccggcatggaatacaggcagtgcgtgtccccctgtgccaggacatgtcaaagtctgcacattaatgagatgtgtcaggaacgctgcgttgacggttgttcatgcccggaggggcagctcctcgacgagggcctgtgtgtggagagtactgagtgtccttgcgtgcacagcggtaaaaggtaccctccgggcacatcactctctcgcgactgtaacacatgcatctgccgcaattctcagtggatctgtagtaacgaggagtgcccaggcgagtgcctggtaacggggcagtctcattttaagagctttgacaaccggtacttcaccttcagcggaatctgtcagtatctgctggctagggactgccaggatcactccttctcaatcgtcatcgagaccgtgcagtgtgcggacgatcgagacgcagtatgcacacggagcgtgaccgtaagactgcctggactgcataacagtttggtaaagctgaagcatggcgcaggcgttgcgatggacgggcaggatgtgcaactccctctgctgaagggagatctgagaattcaacatacagtaaccgccagcgttcgcctctcttatggggaggacctgcagatggactgggacggacgcggaaggctcctcgtgaagctcagtcctgtgtacgctgggaaaacatgtggtctctgcggtaactataacggcaaccaaggcgatgattttttgacccccagcgggttggcggaacccagggttgaagattttgggaatgcatggaaactccatggcgactgtcaggatctgcagaagcagcatagtgatccatgtgcacttaaccctcgcatgacacggttcagtgaagaggcctgtgctgtgctgacttctccaacatttgaggcctgtcacagagccgtgtcacccctgccctacctccgaaactgccgatacgacgtgtgttcttgttccgacggcagggaatgcctgtgcggcgccctggcctcctatgcagcagcttgcgcaggacggggagtgcgggtcgcttggcgggaacctggccggtgtgagttgaactgtccgaagggccaagtttatctgcagtgcggtaccccttgcaatctgacgtgccgatctctctcctatcctgacgaggagtgtaatgaggcctgcctggagggatgcttctgcccacccggcctttatatggacgagcgcggcgattgcgtccccaaagcccaatgcccatgctactacgacggggaaattttccagccagaagatattttcagcgaccatcacacaatgtgctattgcgaggacggatttatgcattgcactatgagcggcgtacctggaagtctgcttccagacgccgtgctgagtagtccactgagccaccgcagtaagaggtccttgtcctgcagaccaccaatggtcaaactcgtttgtccggccgacaacctgcgcgctgaagggctggaatgcacaaagacttgccagaactatgacctggagtgtatgtctatgggctgcgtgagcggatgtctttgtccccctgggatggtgcgacacgaaaaccgatgtgtagccctggagcggtgtccatgcttccaccaggggaaagaatatgccccaggggagactgtgaagattggctgcaacacctgcgtgtgccaggacagaaagtggaactgtactgaccatgtgtgcgacgctacatgctctacaatcggaatggcccactacctgacattcgatggactgaaataccttttccccggagagtgccagtatgtcctggtgcaggattactgtggaagcaaccctggcaccttcagaatccttgtggggaataagggttgctcacatccctcagtcaaatgtaagaagcgcgtgaccatcctggtagaaggcggcgaaattgagctcttcgatggtgaggtgaacgtgaagcgaccaatgaaagatgagacacattttgaagtcgttgagtccggaagatacatcattttgttgctcgggaaagctctcagcgtggtttgggacagacacctttccatatcagtggtgttgaagcagacataccaggagaaggtgtgcggactgtgcggtaactttgacggaatccagaataacgacctcacatctagtaacctgcaagtggaggaagacccggtcgattttgggaactcatggaaagttagttcccagtgtgccgacacaaggaaagtccccttggacagctcccctgcaacctgccacaataacataatgaagcaaacaatggtcgacagctcctgccgaattttgacaagtgatgtgttccaagactgcaacaagctggttgaccctgagccttacttggatgtgtgtatctacgacacatgttcttgtgagtctataggggattgcgcatgcttttgcgatacaatcgccgcttatgcccacgtatgtgcccaacatgggaaggtcgtcacatggaggaccgctaccttgtgcccgcagagttgtgaggaacgcaatctgcgggaaaatggatacgagtgcgaatggagatataattcctgcgctccagcatgtcaggttacatgtcagcaccccgagcctctggcatgtcccgttcaatgtgtggaggggtgtcacgcacactgcccacccgggaaaatactggatgagttgttgcagacctgtgtggacccagaggactgccccgtgtgtgaagtggctggccggagattcgcgtccggtaagaaagtcactctcaatccatccgacccagagcactgccaaatctgtcactgtgacgtagtgaaccttacttgtgaggcctgccaagagcctggcggcctcgtggtgcctccaaccgatgcccccgtgtctccaactaccttgtatgtggaggatatcagcgagccaccactgcacgacttctactgctcccgcctcctcgacctggtgtttctgctggatgggagcagtcggctgtcagaggcagagttcgaggtactgaaggctttcgtggttgacatgatggagcgactgagaatctctcagaagtgggtgcgagtggctgtagtcgagtaccacgatggctcccatgcctacattggcttgaaggaccgcaaacgcccctctgagttgcgccgcattgcctctcaagtcaagtacgcggggtcccaggttgctagtacgagtgaagtattgaagtacaccctttttcagatcttttccaagattgaccgcccggaggcctccagaattacgctgctcctgatggcatcccaagaacctcaaagaatgagtaggaactttgtgagatacgtgcaaggcctgaagaaaaaaaaggtgatcgtgataccagtcggaatcggcccgcacgctaatctgaaacaaattaggctgattgagaaacaagctccagaaaacaaggccttcgtgctgagttcagtggacgaactcgagcaacagcgggatgaaatagtgtcttacctgtgcgaccttgctcccgaagccccgccccctactctccccccagatatggctcaggtgactgtaggccctgggctgctcggcgtgtcaaccttggggcccaagcggaatagtatggtgctcgacgtcgctttcgtactcgaaggctccgataaaataggggaagcagactttaaccgatcaaaggaattcatggaggaggtcattcagagaatggatgtaggccaggactctattcacgtgactgtgttgcagtactcttacatggttaccgtggaatatcccttctctgaagcacagtccaaaggcgacatcttgcagcgggtgagagaaattagataccagggtggcaatagaaccaatactggcctggcacttagatacctcagcgaccactctttcctggtgtcccagggagacagagagcaggcccctaacctcgtgtatatggtgacaggtaaccctgccagcgacgagatcaaaagactccccggggatatacaggtagtaccaataggagtgggcccaaatgctaatgtccaggagctggaacggataggctggcctaacgccccaattctgatccaggactttgagacgctgccccgggaggcccctgatctcgtgttgcagcgctgttgttccggggagggccttcagatccccactctctcccccgcacctgactgtagtcagcccctggacgtgatcctcctgctcgatgggtcttccagcttccccgcctcctatttcgatgaaatgaagtctttcgcaaaagcttttatatctaaagccaacattggccctcggctgacccaagttagcgttctgcagtacggctcaatcacaaccattgacgtgccatggaacgtcgtgcctgaaaaggcgcatctgttgagccttgtagatgtgatgcagcgcgaaggcggccccagtcaaattggcgacgcactggggtttgcggtgaggtatctgacgagcgagatgcacggggcccgccccggagcttctaaagccgtcgtgattctcgttacggacgtgtctgtcgacagcgtggacgctgccgcagacgcggcccggagcaatagggtgaccgtatttcccattgggatcggggaccgctatgatgctgctcagctccgcatattggccggacctgccggagattccaatgtagtgaagctgcagaggattgaggacttgccgactatggtcaccctgggcaactcattcctgcacaagctgtgttcaggattcgtgaggatatgcatggatgaagatggcaatgaaaagaggcccggggacgtctggaccctgcctgatcagtgccataccgtcacctgccagcccgatggacagaccttgctgaagagtcatagagtgaactgcgaccgaggattgaggccctcatgtcccaattctcaaagcccagtcaaagtggaggagacctgtggctgtcgatggacatgtccttgcgtttgtaccggctcatccactagacatatagtgaccttcgatggccagaatttcaaactgaccgggagctgcagctacgtcctgtttcagaacaaggaacaagatctggaagtgattctccataatggtgcatgctctcctggggctaggcagggttgcatgaagagcatcgaggtgaagcactccgccctgtctgtcgaactgcacagcgacatggaggtaacggttaacgggcgcttggtttcagtcccctatgtgggcgggaatatggaggtgaacgtatacggtgccatcatgcacgaagtacgatttaatcatctcggccacatctttacgtttacaccccagaataatgaattccagctgcaactctctccgaagacgtttgcttccaaaacttatggtctgtgcggcatctgtgatgagaacggtgctaacgactttatgctccgggatggaactgtaacaactgactggaaaacactggtacaggaatggactgtacagcgccctggccaaacttgccagcccatcctggaagagcagtgtctggtcccagacagctcacactgtcaggtgctcttgctcccactcttcgccgaatgccacaaggtgcttgcccctgctactttctatgccatttgccaacaagacagctgccaccaggaacaggtgtgcgaagttatcgccagttacgcccacctctgccgcactaacggcgtgtgtgtcgattggcgcactcccgacttttgcgcaatgagctgcccaccctctctggtgtataaccactgcgaacacggatgcccgcggcactgcgatggaaatgtctccagctgcggagatcacccgagtgagggatgcttttgccctcccgataaagtgatgcttgaaggcagctgcgtgcccgaggaagcatgtacacagtgcataggtgaggatggcgtacagcaccagttcctggaagcctgggtccctgaccaccagccatgccagatatgcacatgcttgtccggaaggaaagttaattgtacaactcagccttgccccacggccaaggcaccaacctgcggattgtgcgaagtggcccgccttcggcagaacgccgatcagtgctgcccggagtatgaatgcgtgtgtgatcctgtgtcctgcgacttgcctccggtgcctcactgtgaaaggggcctgcagcccactctgacaaatcccggtgaatgccggcccaacttcacatgcgcctgtagaaaggaagaatgcaagcgcgtgtctcccccctcctgtcctccccaccggcttccgactctgcggaaaacccaatgctgtgatgaatatgagtgtgcctgtaattgtgtcaacagtaccgtgtcatgccccctgggatacctggctagcactgctaccaatgattgcgggtgtactaccaccacgtgcctgcctgataaggtctgcgtgcaccgaagtaccatatatcctgttggccaattctgggaggaagggtgtgacgtgtgcacttgcactgacatggaggacgccgtcatgggcctgagggtggcacagtgctctcagaaaccctgcgaagatagctgtcgatcagggtttacttacgtgctgcacgagggagagtgctgcggacgatgtttgccgagtgcctgtgaggtggtcacgggcagcccgcgaggggattcccagagttcttggaagtccgttggctctcaatgggccagccccgaaaacccgtgcctgatcaatgaatgtgtccgcgtcaaggaggaggtgttcattcagcagcggaacgtgtcatgccctcagttggaggtcccagtttgtccttctggattccagctttcctgtaagacttctgcatgttgtccgagctgtagatgcgagaggatggaggcctgcatgctcaacgggaccgttatcgggccaggtaagaccgtgatgatagatgtctgtacaacctgtaggtgtatggtacaggtaggagtgatcagcggcttcaaactggagtgccgaaaaacaacctgtaacccatgtcccttgggttacaaggaggaaaataatacaggtgagtgttgcggaaggtgcctcccgacagcctgtacgattcagctgcgaggagggcagatcatgacattgaagcgcgatgagaccctccaggatggctgtgacacgcacttttgtaaggtgaatgaacgcggagaatatttctgggaaaagcgagtgaccggatgccctcccttcgacgagcataagtgcctggcggaaggtggcaagatcatgaagatccctggtacctgctgcgacacctgtgaagaaccagaatgtaacgatatcaccgcacgattgcagtacgttaaggtaggaagttgtaaatccgaagtggaggttgacatccactattgccaagggaagtgcgctagtaaggctatgtactctatagacattaacgacgtgcaggaccaatgctcatgttgctcccccacaagaacagaacccatgcaggtggctctgcactgtactaacggctccgtggtctaccacgaagtcctgaatgcaatggagtgcaagtgctcccccaggaaatgctccaag

SEQ ID NO: 12466 - DNA, 8439 bp, Artificial Sequence
  derived and/or modified sequence
atgatcccagcccgattcgccggggtgctattggccttggctttgattctgcctggtactctctgtgctgaaggcacccgaggacgcagtagcaccgcccgctgtagtctgtttggtagcgatttcgtaaacaccttcgatgggagcatgtacagtttcgctggttattgctcatacttgctggcgggcgggtgccagaagcgtagtttctccatcattggcgatttccaaaatggcaaacgcgtatcactcagtgtctacctcggcgagttctttgatatccatctcttcgtgaacggcaccgttacacagggcgaccagcgtgttagtatgccttatgcttccaagggattgtacttggagaccgaagctggttactacaagttgtctggagaggcgtatggattcgtggctcggatagacgggtccgggaactttcaggttctgctgagtgaccggtatttcaacaagacctgcgggctttgcggcaactttaatatatttgctgaagatgattttatgacgcaagaaggaacgctgacatcagacccttatgacttcgctaattcctgggccctgagcagtggggagcaatggtgtgaacgggcttccccgcccagtagttcttgcaacatatctagtggagagatgcagaaggggttgtgggagcagtgccagcttctcaaaagcacaagcgttttcgcccgctgtcaccccctggtggatccagagccattcgttgcattatgtgagaagaccctttgcgagtgtgctgggggcttagaatgcgcctgtcctgccttacttgagtatgctcggacctgtgctcaggaaggtatggtcctctacggctggacagatcattctgcatgcagtcccgtgtgccccgcaggcatggagtaccggcagtgtgtgtccccctgtgctagaacatgccagtccctgcacattaacgaaatgtgccaggagcggtgtgtggatggatgcagttgcccagagggtcagctgttggacgagggtctctgtgttgaatcaaccgagtgcccatgtgtccacagcggcaaaaggtatcccccaggaacctccctgagcagggactgcaatacatgcatttgccgcaactcgcagtggatctgctctaacgaagagtgcccaggcgagtgtctagtgacaggtcagtcgcacttcaaatctttcgacaaccgctatttcaccttttcaggaatttgccagtatcttctcgcccgtgactgccaagaccactccttttcaattgtgatcgaaacggttcagtgcgctgacgatcgcgatgctgtgtgcaccaggagcgtgactgttagattgccgggcttgcacaactccctggtaaaactgaagcacggcgcaggcgtcgccatggacggccaggatgttcaactacccttgctgaaaggcgacttgcggattcaacataccgtgaccgccagcgtccgcctaagctacggggaggatctccagatggactgggatggtcgcggtcggctgctcgtcaagcttagtcctgtctacgccggaaagacttgtggcctgtgcggaaattataacgggaatcaaggcgatgacttcctgactcccagcggattagctgagccacgggttgaggattttggaaatgcatggaaactgcatggagactgtcaggatctgcagaaacagcacagcgacccatgcgctctgaatccccgaatgaccagattctcagaagaggcgtgtgcggttcttacttcgcccacctttgaggcctgtcacagagccgtgtccccgctgccctaccttaggaattgccggtatgatgtctgctcgtgctcagatggcagggaatgtctctgcggcgctttggcttcctacgctgcagcttgcgccgggcggggagtccgtgtggcctggagggagccaggacgctgcgagctgaactgccctaaaggtcaggtttatttgcagtgcggaacgccctgcaaccttacctgccgcagccttagctacccggacgaagagtgcaacgaagcttgcctggagggctgcttctgtccaccgggactatatatggatgagagaggagactgtgtgcctaaggctcagtgtccctgttattatgacggagagatttttcaacctgaagatatattctcagatcaccatacaatgtgctattgcgaggacggctttatgcactgtacgatgtcgggcgtgcccggaagcctgctgcccgatgcagtcttgagttcgccgttaagtcatcggtccaagcggtccctctcttgcaggccccctatggtgaaactggtgtgtccggcagacaatctcagggctgaaggcctggagtgtaccaagacatgccagaactatgacctcgagtgtatgtctatgggatgcgtttctggttgcctgtgcccaccaggaatggtgcgccatgagaatcgatgcgtcgctctcgagcgctgcccttgttttcaccagggaaaggagtatgccccgggagaaaccgtcaaaatcgggtgcaacacctgtgtgtgccaggacagaaaatggaattgtacagaccacgtatgtgacgctacttgttccactatcggcatggctcattatttaaccttcgacggcttaaaatacttgttcccaggcgagtgtcagtacgtactggtccaggattattgcggcagcaatcctggaacctttagaatccttgtaggcaacaaaggctgctcccatccttccgtgaagtgtaagaaacgagtcaccattctggtggaagggggtgaaattgagctgttcgatggtgaagtgaatgtgaagcgcccaatgaaagatgagactcattttgaggtggtggagagcgggcggtatattatcctactactaggaaaggccttgagtgtagtgtgggaccgacatttgtcgatttccgtggtgctgaagcagacctaccaggagaaggtttgcggcctttgtgggaattttgacgggatccagaacaacgatctgacttcctccaatcttcaggtggaggaggaccccgtggacttcgggaattcatggaaggtgagctctcaatgtgcggatactcggaaggtgcccctggactcgtccccagctacttgtcacaacaacatcatgaagcagactatggtggactcctcctgtaggatccttacctcggacgtgttccaggattgtaataagcttgtagaccctgaaccctatctggatgtatgtatttatgatacttgttcctgtgagagtatcggagactgcgcttgtttctgtgacaccatcgccgcctatgctcacgtttgtgcccaacatggtaaagtcgtgacttggcggaccgctactctctgcccccagtcatgtgaggagcgtaacctccgagaaaatgggtacgaatgcgaatggagatacaattcgtgtgcaccagcctgccaagtgacctgccaacatccagaacctttggcatgtcccgtccaatgtgttgaggggtgtcacgctcactgtccaccaggaaagatcttggacgaattgctgcagacctgcgtcgaccccgaggactgtcctgtgtgtgaagtggctggcagaagatttgccagcggcaagaaggtcaccctgaaccctagcgatccggaacattgtcagatatgtcattgtgacgtggttaacttaacatgcgaagcatgccaggagccgggaggcctcgttgtgcctcctaccgacgccccggtctctcccacaaccttgtatgtggaagatatctccgagccaccccttcatgatttttactgctctcggctcctggacctcgtgttcctccttgacggaagtagccgcctttcagaagctgagttcgaggtgttgaaagcttttgttgtagatatgatggaacggctgcgcatcagccagaaatgggtgcgagtggcggtagttgagtatcatgacggatctcacgcctatattggacttaaagaccgaaagcgcccgtctgaactgagaaggatcgcctcgcaagttaagtacgctggctcccaggtcgcaagtacttccgaggtcctcaaatacaccttgttccaaatcttttccaagatagatcgaccagaagcttcccgaataaccctgctgctcatggcatcccaagagccccagaggatgagtcgcaacttcgtgagatacgttcagggcctcaaaaagaagaaggttatagtgatccccgttggaataggcccacatgccaatctcaagcagatccgtcttattgagaagcaggctcccgagaataaagcttttgtgttatccagcgtggacgagctggagcagcagagagacgaaatcgtgagctacttgtgtgatttagcacccgaagccccgcctcccacgctgccgcctgatatggcccaagtgactgtgggtcctggtttactcggcgtatcaaccctcggtcctaagaggaactccatggtgctcgatgttgcctttgtcctggaagggtccgataagattggcgaggctgattttaatcgtagtaaagagttcatggaagaagttatccagcggatggatgtgggacaggacagcatacacgtgacggtactgcagtactcttacatggtcaccgtggaatatcctttttcagaagcccagtcaaaaggcgatatacttcaaagggtccgagaaatcaggtatcagggtggaaatagaactaacaccggattggccctaaggtatttgtctgaccattctttcttggtttctcagggcgatagagagcaagcccctaatttggtttatatggtgacaggcaaccctgcctccgacgaaattaagagactgcctggtgacatccaggtggtcccgattggcgtggggccgaatgctaatgttcaggaactcgagcggattggctggcctaatgcccctatcctcattcaggacttcgagaccctcccacgggaagctcctgacctcgtgctccagaggtgttgctccggtgaggggctgcaaatcccaaccttgagcccagcccccgactgtagtcagccactggatgttattctgctgctcgacggctcaagctccttccctgcctcttactttgacgagatgaaaagcttcgccaaagcttttatatctaaggcaaatatcggaccccgattgacacaggtgagcgttctgcagtacggttctataaccactattgatgtgccatggaacgtcgtgcctgagaaagcacaccttctctccctggttgacgtgatgcagcgggagggtggtccgagccagatcggagatgcgcttggcttcgcggttcggtacctcacaagcgaaatgcatggtgcccgaccgggagcgtctaaggctgtggtcatactcgtgacagacgttagcgtggattctgttgacgccgctgccgacgcagcgcgcagtaacagagtgactgtttttcccataggaataggagaccgctatgatgcagcacagctccggatcctggccgggccagcaggagattctaacgtggttaagctgcagagaatcgaggacttgcccaccatggtgaccctgggcaactccttcctgcacaagttgtgctcaggttttgttaggatatgtatggacgaagatgggaacgaaaagaggccaggcgacgtgtggacgctccccgaccagtgccacaccgtgacatgtcaacctgatggccagacattgctcaagtcgcaccgggtgaactgtgacaggggcctgcggccgagctgccctaacagccagtccccggtgaaagtagaggaaacctgcgggtgccggtggacctgcccttgcgtgtgcacgggaagcagtacacggcatatcgtgaccttcgacgggcaaaatttcaagctcacgggtagttgtagttatgtccttttccagaataaggagcaggatctggaggttattttgcacaacggtgcatgtagccctggagcccgtcaaggctgtatgaaatcaatcgaggtgaagcacagcgccctctcggtagagctccactcagacatggaggtgacagtgaatggaaggcttgtgtcagtgccgtatgtcggaggaaacatggaggtgaatgtctatggtgcgatcatgcatgaagtgagatttaaccacctgggccatatcttcaccttcaccccccagaacaacgagttccagctccagctcagcccaaagactttcgcttctaaaacttatgggctgtgcggaatctgcgatgagaatggagctaatgatttcatgcttcgggatggaacagttactactgattggaagaccctggtgcaggaatggacggtgcagaggcctggccagacatgccagcccatcctggaagaacagtgcctggttcctgacagttcccactgtcaagtgttactactgcctttgttcgccgagtgtcataaagtccttgccccggctactttctatgccatttgccagcaagactcctgccaccaggagcaggtgtgcgaagtcatcgccagttacgctcatctctgtcgaacaaacggagtctgcgtggactggcgcacgcccgacttctgcgctatgtcatgtcctccttccttggtatacaaccactgtgaacacgggtgtcctaggcactgtgatggaaatgtgtcttcctgtggtgatcaccccagcgagggctgcttctgtcctcctgacaaggtgatgctagaaggatcttgcgtgcccgaagaagcctgcacgcaatgtatcggggaggacggggtgcagcatcagtttctggaggcctgggtgccagatcaccagccttgtcagatctgtacctgtctctccggtcggaaggtgaactgcaccacacagccttgcccaaccgccaaggctcctacctgtggactgtgtgaggtggccagactgcgccaaaatgctgaccagtgttgtcctgaatatgagtgcgtttgtgaccccgtgagctgcgatctgcccccagtcccacactgcgagcgcggactgcagccaactctgacgaatccaggcgaatgcaggccaaatttcacttgtgcttgtaggaaagaagagtgcaaacgggtatccccacctagttgccctccccatagactgcccactctgcggaaaactcaatgctgtgatgaatacgaatgcgcctgcaactgtgttaacagcactgtatcttgtcccctggggtatttggcctccaccgccaccaacgactgcggttgtacaacaacaacttgcctgccagataaggtgtgtgtccaccggagtactatctatcccgtcggacagttttgggaggagggctgcgacgtgtgcacctgcaccgacatggaggacgcagtgatgggtctcagagtggcgcagtgcagtcagaaaccatgtgaggactcatgccgttccggatttacatatgtgctgcacgagggggaatgttgtggccggtgtcttcccagtgcttgcgaagttgtgaccgggtccccaaggggggacagccagagttcctggaaaagcgttgggtcgcagtgggcatcccccgaaaacccttgccttattaatgagtgtgtacgggttaaggaggaagtgtttattcagcagcgaaacgtatcttgtcctcagttagaggtgccggtttgtcccagtggtttccaactttcttgtaaaacctccgcctgttgccccagctgccgctgtgaacgcatggaagcgtgcatgcttaatggaacggtgattggccccggcaagaccgtcatgattgacgtctgcacaacgtgtcgttgcatggtccaggtgggggttatctcaggcttcaagcttgagtgccgtaagacaacatgtaacccctgtcccctggggtataaggaggagaacaatacaggggaatgttgcgggcgatgtttgccgactgcttgtactattcagcttcgcgggggtcagatcatgaccttgaagagagatgagactcttcaggatgggtgcgacacacacttttgcaaagtgaatgaaaggggcgaatacttttgggaaaagagggtgacagggtgcccaccattcgacgagcacaaatgtctggcggaggggggaaagataatgaagattcccgggacatgctgcgacacatgtgaagagccggagtgtaacgatattacagcgagattgcagtacgttaaggtggggtcgtgcaaatcagaagtggaagtagacatccactattgccaaggaaaatgcgccagtaaagcaatgtactcaatagatatcaatgacgtacaggatcaatgttcctgctgctcacctactcgcacagagccaatgcaggttgccctgcattgcaccaatgggtctgtggtgtatcacgaagtgctgaatgccatggaatgcaagtgcagcccccgcaaatgttcaaag

SEQ ID NO: 12467 - DNA, 8439 bp, Artificial Sequence
  derived and/or modified sequence
atgattcccgctcggttcgccggagtgctgctggctttagctctaatcctgcctggcactctctgtgctgaagggacccggggcaggagttcaactgcaagatgcagcctgtttggcagtgatttcgtaaatacctttgatggatcaatgtattcttttgcaggctactgtagctaccttctggctggtggctgccagaagaggagcttttctataatcggtgacttccaaaacggaaagcgcgtgtccttaagcgtgtatctgggtgagtttttcgatatacatctgttcgtcaatggaactgtcacccagggggaccagcgggtatccatgccctacgccagcaaaggactttatttggaaacagaggccggatattataagctctccggggaggcatacggcttcgtagccaggatcgatggaagcgggaacttccaagtgctgctgtccgatagatatttcaacaaaacatgtgggctgtgtggaaactttaacatctttgccgaagacgattttatgacccaggaggggacgttgaccagtgatccttacgacttcgccaattcgtgggcactgtcaagcggggagcaatggtgtgaacgcgcctcgccaccgagttccagttgcaacatcagtagcggcgaaatgcagaagggcctgtgggagcagtgtcagctgctcaaaagtacctcggtgttcgctcgatgtcatcctctggtcgatccagagcctttcgtagctctgtgtgaaaagacactgtgtgaatgcgcgggcggcctggagtgtgcttgcccggctctgctggaatacgcgagaacctgtgctcaagagggcatggtgctctatgggtggactgaccattctgcatgctcacctgtctgtcccgctggtatggagtaccgacagtgcgtgagtccttgtgcccggacttgccagtcgctgcacatcaatgagatgtgtcaagagcgatgtgtggacggctgttcatgcccggaagggcagctcctggacgagggattgtgcgttgaatctacagaatgtccgtgtgtgcattctgggaaaaggtatccgccgggaacttccttatctagagactgtaatacctgcatctgtcggaattctcagtggatctgtagcaacgaagagtgcccaggggagtgtctggtgacaggacagtcacacttcaagtctttcgacaataggtacttcacattttcagggatttgccagtatctactcgcccgagattgtcaggaccattcattttcaatcgtgatcgagactgtacagtgtgctgacgacagggatgccgtgtgcacccgtagtgtcacagtgcgtctgcccggtttgcacaattccctggtcaagctcaaacatggtgctggcgttgcaatggacggacaagatgtccagctcccactccttaaaggggaccttcgcatacagcatactgtcacggcctccgtgagactgagctacggggaagacttgcaaatggattgggacgggcgtggcaggcttcttgtcaaattgtctcctgtgtatgcaggtaagacgtgcggactgtgtggtaattacaatggcaatcagggggacgacttcctgacacccagcggactggcggagccaagagttgaggattttggtaacgcctggaaactgcacggggactgtcaggatcttcagaaacagcactcagatccatgtgcactaaatccccggatgacacgattcagcgaggaggcctgcgcggttctgacgagtccaacgtttgaagcttgccacagagccgttagtccgttgccgtacctgcggaactgtagatacgacgtctgctcctgttccgacggccgcgagtgcctttgtggggccctggcctcttacgccgccgcctgtgccggaaggggcgtgagagtggcctggagggaaccgggcagatgtgaactcaattgtcctaaagggcaggtgtacttacaatgcggaaccccttgcaacctgacttgcagatccttaagttaccccgacgaggaatgtaacgaagcatgcctggagggatgcttctgtccacctggcctttacatggatgagaggggggactgtgtacccaaagcccagtgtccatgctattacgacggggagatatttcaaccagaggatattttttccgaccatcatacaatgtgctactgtgaggacggctttatgcactgtacgatgagcggtgtgccggggtctctgctcccagacgctgtcctttcctcacccctcagtcatagatccaagcgatccttaagctgtcggccgcctatggttaaactggtatgccctgccgataaccttagggctgagggcttggagtgcacaaagacttgccagaactacgacctcgaatgcatgtcaatgggctgcgtgtcagggtgcctttgtccgcccggaatggtacggcacgaaaataggtgcgtggctctggaaagatgcccttgcttccaccagggtaaagagtacgctcccggagagactgtgaagatcggttgtaacacctgcgtatgtcaggatcgcaagtggaattgtaccgatcacgtgtgcgatgcaacttgctctaccattggtatggctcactacctgacgttcgacggactcaagtacctgtttccgggtgagtgtcagtatgtgctggtgcaggactattgcgggagcaatcccggcaccttcagaatccttgtcgggaataaaggctgttctcacccttcagttaagtgcaagaagcgcgtgacaattttggtggagggcggcgagatcgagctttttgatggggaggtaaacgtcaagcggcccatgaaagacgagacccactttgaagtggtggagtctggacgctacatcattctccttttgggtaaagctctgtcagttgtgtgggatcgacatctgagcatcagcgtggtgctgaagcaaacttatcaggaaaaggtgtgcggactgtgtggcaattttgacggaattcagaataatgacctcacgtcttccaacctgcaagtggaggaggaccccgtggactttggcaacagctggaaggtttcaagccagtgcgccgacacacgcaaagtgccgctcgactcttccccagcgacatgccacaacaatatcatgaagcagacaatggtagatagctcctgcagaatccttaccagtgacgtcttccaagactgtaacaagttggtggacccagaaccgtaccttgacgtctgcatttacgatacgtgttcttgcgagagcatcggagactgcgcctgcttctgcgatactatcgccgcctacgctcacgtttgtgcgcagcacggcaaggtggtgacttggcggacagctacgctgtgtcctcagagttgcgaagagcggaacctcagggaaaatgggtatgaatgcgaatggcgttacaactcatgcgcccccgcttgtcaagtcacatgtcaacacccagagcctttagcctgcccagttcagtgtgtggaaggatgtcatgctcactgccctccaggtaagattctggacgaactcctgcagacatgcgtggatccggaggattgccctgtgtgcgaggtggctggacgcaggtttgctagcgggaaaaaggtgaccctgaatccttcagaccctgagcactgtcagatctgtcattgtgatgtggttaatcttacctgcgaagcctgccaggagcctggaggtttagtcgttccaccaacagacgcaccagtctctcccactacgctctatgtggaggacatcagcgaaccccctttacatgacttttactgttcaagacttctagatctcgtgtttcttttagatggttcatctaggctgagcgaggctgagttcgaggtgctgaaggctttcgtcgtggacatgatggagagactgagaatctctcagaaatgggtacgggttgcggtagttgaataccatgatggatcccacgcatacatcgggcttaaagatcgcaaaagacctagcgaattgcgccggatagcgtcgcaggtaaaatacgcaggcagtcaggtggcttccacttccgaggtgctgaaatatactctctttcagatcttctccaaaatcgaccgccccgaggcatcacgaatcactttgctgttaatggcttctcaagaacctcagaggatgtctaggaacttcgtcaggtacgtgcagggccttaagaagaagaaggttattgtgatccctgtaggtatcggtcctcatgctaatctgaaacagatccgcctgatcgagaaacaggctccagagaacaaggccttcgtcctgtctagcgtggacgagctcgaacagcaaagggacgagattgtttcttacctctgtgatttggcacctgaggcacctccacccaccttaccacccgatatggcccaggtaaccgttggcccaggactcctgggagtgagtactctcggccccaagaggaacagcatggtacttgatgtggcctttgtactcgagggctcagacaaaataggggaggcggatttcaatcgctctaaagagttcatggaggaggtgatccagaggatggacgtggggcaggactctattcacgtcaccgtattgcagtattcatacatggtgacggttgagtaccccttcagcgaggcccaatcaaagggggatatcctccaacgggtgcgtgagatacggtatcaaggcggcaatagaaccaacacaggactggccctccggtatttgtcggaccactcttttctggtaagccagggtgatagggagcaagcacctaaccttgtgtacatggtcacagggaatccggcatctgacgaaatcaaacgacttcctggcgacattcaggtggtaccaattggagtcgggcccaacgccaatgtacaggaactggaaaggatcggatggcctaacgcccccattctgatacaggattttgagactctgcccagagaggctcccgatctggttctgcagcgctgctgttctggggagggcctgcagatacctaccctgtcaccggccccagattgctctcagccactggacgtgatactcctcctggatggctctagttcatttccagctagttacttcgatgagatgaagagcttcgcaaaagcctttatcagtaaagccaacatcgggccccgcctgactcaagtttctgttctccagtacggctccatcaccacgattgacgtcccatggaatgtagtgcctgaaaaggcacatctgctgtccctagtagacgtgatgcaacgcgaaggcggaccatcacagatcggggatgcactggggtttgccgttcgctaccttaccagtgagatgcacggcgcacgtcccggagcgagtaaggccgtcgttatccttgtcacggatgtttctgtggacagtgtggacgctgctgccgatgctgcacgcagtaatcgcgtaacggtgttccctatcggcattggagatcgatacgatgccgcccagctgagaattctcgctggaccggctggggattctaacgtcgtaaaactccagcggattgaggatctgcccaccatggtaactttaggcaacagcttcctccacaaactctgctcaggctttgtcagaatatgtatggacgaggacggcaatgagaagcgacctggcgacgtatggacactgccagatcagtgccataccgtcacatgccagccagatgggcagacactgctgaaatctcacagggttaactgcgaccgagggctgcggccatcttgtcccaactcacagtcacccgtcaaagtggaagagacgtgcggatgccgctggacttgcccttgcgtgtgcacagggtcatctacaagacatatagttacattcgacggtcagaattttaaactgacaggtagttgttcatatgtgctgtttcagaacaaggaacaggacctggaggtgatcctgcataatggtgcttgctctccaggggcacgccagggctgtatgaagagcatagaggtgaaacactctgcactgtcagtagagctgcactcggatatggaggtgaccgtcaatggtcgcctggtgtcagtgccctatgtgggcggtaatatggaggtcaacgtttacggtgctatcatgcatgaggttagatttaaccacctcggccatatctttacatttactccccagaataacgagttccagttgcagcttagccccaagacattcgcgtctaaaacatacggcctgtgcggtatttgcgacgaaaatggggcaaatgacttcatgctgcgagacggcaccgtaactacagattggaaaactctcgttcaggaatggaccgtgcagaggcccggacagacctgtcagccaatcctggaggaacagtgcctcgtaccagattcatctcattgccaggtgttgctcctacccctcttcgcagaatgccataaagttctggcaccagctacattttatgccatctgtcagcaggactcttgtcaccaggaacaggtctgcgaagtcattgccagctacgcccacctgtgtcgaaccaacggggtatgcgtggactggcggacccctgacttttgtgctatgtcatgtcctccaagtttggtctacaaccactgcgaacatgggtgtcctaggcactgcgacggcaatgtgagttcctgcggagaccaccccagcgagggctgcttttgcccgccagacaaagtgatgctggagggcagctgcgtgccggaagaggcctgtactcagtgtattggtgaagatggtgtgcaacaccagttcctggaagcctgggtgcctgaccatcagccttgccagatctgtacatgccttagtggccgaaaagtcaactgcacaacccaaccttgtcctaccgcaaaagccccgacctgtggcctgtgcgaagtcgccaggctgcgccagaacgctgatcagtgttgcccagaatatgaatgcgtatgcgaccctgtctcttgcgacctgccccctgtcccccattgtgaaagagggcttcagccgaccctcaccaacccaggggaatgtagaccaaactttacatgtgcgtgccggaaggaagagtgcaaaagagtgagccctccatcctgtccccctcacagattgccgacacttagaaaaacacaatgctgcgatgagtacgagtgcgcatgtaattgcgtgaactccaccgtgagctgtccactcggatatttggcttccaccgccacaaatgactgcgggtgcacaacaacaacctgccttccagataaagtatgtgttcatcgatctacgatctaccctgtggggcagttttgggaggaaggatgcgacgtctgtacttgcactgacatggaggatgcagttatggggttaagagttgctcagtgctcccagaagccctgcgaggactcttgtcgctcaggcttcacatacgttctgcatgagggtgagtgttgtggtaggtgtctccccagcgcttgtgaggtcgtgaccggaagtccaaggggcgactctcaatcctcatggaagtcagtcggcagccagtgggcttcccccgagaatccatgtcttataaacgaatgcgtgcgggtgaaggaggaggtgttcattcaacagaggaatgtgtcctgccctcagctggaggtgcccgtctgcccttcgggattccagttaagctgtaagacaagcgcctgctgtccgagttgcaggtgtgaacggatggaagcatgcatgttgaacggcacagtgattggcccaggtaaaactgtgatgattgatgtatgcaccacatgcagatgcatggttcaggtcggcgtaattagtggattcaaactggaatgcagaaaaacaacctgcaatccttgcccattggggtataaagaagagaacaataccggagagtgctgtgggcggtgcctgccaaccgcttgtaccatccaactccgcggcgggcagatcatgacactcaagagggatgagacactgcaggacggatgcgacacgcacttctgcaaagtgaatgaacgaggggagtacttttgggagaaacgcgtcacaggatgtccacctttcgatgagcacaaatgtctagccgaaggaggcaaaattatgaagattcccggcacatgctgcgacacctgtgaagagcctgaatgtaatgatataaccgcacgattgcagtacgtgaaagtaggatcttgtaagtccgaggtggaagtcgatattcactattgccagggcaagtgcgcttccaaggctatgtactccatcgatataaacgacgtgcaggaccagtgctcgtgctgctctcccacacggaccgagccgatgcaagtggccctacattgtaccaatgggtcagtggtttaccacgaggtcctgaatgctatggaatgtaagtgttcccctcgaaaatgtagtaag

SEQ ID NO: 12468 - DNA, 8439 bp, Artificial Sequence
  derived and/or modified sequence
atgataccagcaagattcgcaggagtcttgctggccctagcccttattctacccggtactctgtgcgccgagggaactcgaggacgatcatcgacggctcgatgctctcttttcggatcagactttgttaacacttttgacggttcaatgtattcattcgctggctattgttcatatttgcttgcgggcggttgccaaaagcggtcgttttccattattggagattttcagaacggaaagcgagtatcactctcggtttatttaggcgaattttttgatattcatctgttcgtaaatggaactgtcacccaaggagatcaacgtgtctccatgccctatgcttctaaaggactttaccttgaaacggaagcggggtactacaaattgtcaggtgaagcttacggatttgtcgccaggatagatggttctggtaatttccaggtactcctgtcggatcgatatttcaataagacttgtggactttgtggaaatttcaatatcttcgcagaggatgactttatgactcaagaaggaaccttgacgtccgacccatacgatttcgctaactcttgggcactttcctcaggtgagcaatggtgcgagcgtgccagccctccatccagtagctgcaacatatcatcgggagaaatgcaaaagggactgtgggaacagtgccaacttttgaaatcgacttccgtatttgccagatgtcatccgctggttgatccagagcctttcgtggcgctttgcgaaaaaacactgtgcgaatgtgctggaggcttggaatgcgcgtgccctgccctgctcgagtacgcaagaacgtgcgctcaggagggaatggtattgtacggttggactgatcatagtgcttgctctccagtatgtccggctggaatggaataccgccaatgtgtttcgccgtgcgcacgtacatgccaaagtctccatattaatgagatgtgccaagaacgttgtgtagatggatgctcttgcccagaaggccagctcctcgatgaaggattgtgcgttgagtcgaccgagtgtccatgcgttcattctgggaaacgttacccaccagggacttcgcttagtcgtgactgcaatacgtgtatttgtcgcaatagtcagtggatctgtagcaacgaagaatgcccaggagagtgtttggttactggtcaatctcattttaaatctttcgataaccgttattttactttttcgggaatatgccaatacctcctggcacgtgattgccaagaccattcgttctctatcgtcattgagacagttcagtgcgctgacgatagagatgctgtatgcacacgttcagtgacagtcagacttcccgggctccacaatagccttgtgaagcttaaacatggggcgggtgtcgctatggatggacaagatgtgcaacttccactcctcaaaggagatctacgaattcaacatacagtaacagcctctgtgagacttagctatggagaagatctacaaatggactgggacggtcgtggccgtttgcttgttaagctttctccagtttatgcaggaaaaacatgtggattatgtggaaattacaacggaaaccaaggagacgatttccttacaccatcaggcctggccgaaccacgagtcgaagatttcgggaacgcttggaaacttcatggcgattgtcaagacctccaaaagcaacatagcgatccatgcgcattaaacccgagaatgacccgattttcggaagaggcttgtgcagttttgacatcaccgaccttcgaagcttgccatcgtgcagtatcaccactcccataccttcgaaattgtcgatacgatgtttgcagttgttcggatggccgcgaatgcctctgtggagctcttgcttcgtatgcggctgcttgtgctggccggggagttcgagttgcctggcgagagccaggtagatgcgaacttaattgccccaaaggacaagtctacctccagtgtggaaccccatgtaatctaacttgcagatccctgtcatatccagatgaggagtgcaatgaggcttgcctggagggatgcttttgtccaccaggattgtatatggatgagagaggagactgtgtcccaaaagcgcaatgcccgtgctactacgatggagagatcttccaacccgaagatatattctcggatcatcacacgatgtgctattgtgaagatggattcatgcactgtactatgtctggtgtgcctggatcactcctaccagacgcagttctttcatcgccactatcgcatcgttcaaaacgatccctaagctgcagacctccaatggtcaaacttgtttgtccagctgacaacctgagagctgaaggtttagagtgcacaaagacttgccagaattatgatctcgaatgtatgagtatgggatgtgtatctggatgtctgtgcccgccaggcatggtaagacatgaaaacagatgcgtggcattggagcggtgtccatgttttcaccaaggcaaagaatatgctccaggagaaacagttaaaatcggatgtaacacttgtgtctgccaagatcgcaaatggaattgtaccgaccacgtctgcgacgccacgtgctcaaccattggaatggcacactacctcacttttgacggactcaagtatttattcccaggcgaatgtcaatatgttcttgtacaagattattgcggatcgaatccaggaacatttagaattttggttggaaataaaggatgttctcatccttcagttaaatgtaagaaacgtgttactatcttggttgaaggaggggaaatcgaacttttcgatggagaggtcaatgtcaagagaccaatgaaagatgagactcactttgaagtagtggagtctggacggtatataatcttgcttctagggaaggcactttcagttgtgtgggaccgacacctttcaattagcgttgtgcttaaacagacctatcaagaaaaggtctgtggactgtgtggaaatttcgatggtatccaaaataacgatcttacttcttctaacttacaggtagaagaggacccagtagatttcggtaatagttggaaggtgtcgtcgcagtgtgctgatacaagaaaagtcccattggatagttcgccggctacctgtcataataacattatgaaacagacaatggtggatagctcgtgccgaatcttgacttctgatgtctttcaggattgcaacaaactcgtagatccagagccgtatttggacgtgtgcatctatgacacatgttcctgcgagagtattggtgattgtgcgtgcttctgtgacacaattgcagcctacgctcacgtttgtgcacagcatggaaaggttgtcacatggcgaactgcaactctctgtcctcaaagttgcgaggaacggaatctccgcgaaaacggatatgaatgtgagtggcggtataattcctgtgctccggcgtgtcaagtcacgtgtcaacacccggaaccactagcctgcccagtacaatgtgttgagggatgtcacgcacattgccccccaggtaaaatcctcgacgagcttctacaaacatgcgtcgatccggaagactgcccagtgtgtgaagtagcaggacgaaggttcgcaagtggaaagaaggttacactgaacccatcagatccagaacactgtcagatttgccattgcgatgttgtaaatctcacgtgcgaagcatgccaggaaccaggaggtcttgtcgttcctcccactgatgccccagtgtcaccaacgaccttgtacgtcgaagacatatcagagccaccattgcatgatttctactgttctcgtctactagatttggtcttcctcttggacggaagctcgcgtcttagtgaggctgaattcgaggtcctcaaggcatttgttgtcgatatgatggaaaggttacgaatctcacaaaaatgggttagagttgccgttgttgaataccacgatggatctcacgcttatatcggactcaaagatagaaaacgaccttctgaactgcgtagaatagccagtcaagttaaatatgcaggttcccaggtggcatcgacatcagaagttctaaaatacacattgtttcaaatcttctcaaaaatcgatcgacccgaggcgtcaagaatcacacttttgttgatggcaagtcaagaaccccaaaggatgagtcgtaatttcgttcgttacgtgcaaggactcaagaaaaagaaagtgattgttataccggttggaattggaccacatgcaaatcttaaacaaattcgtttgattgagaaacaggcgcctgaaaataaagcttttgttctctcgtcggttgatgagttggaacagcagcgagatgaaatcgtttcgtacctttgtgacttagccccagaggcaccgccgccgactcttccaccggatatggctcaagttactgttggtcctggactcctgggtgtctctacattgggacccaaacggaattcgatggtgttggatgtggcttttgtcttagaggggtcagataaaattggagaagccgacttcaatagatcgaaagaatttatggaggaggttatccaacgtatggatgttggacaagacagcatccatgttactgtccttcaatattcatacatggtcactgttgagtaccctttctcagaagcccaatcaaaaggagatattctgcagagggttcgcgagatccgataccagggaggtaaccgcactaataccggattagcattaaggtatctaagcgatcattcgtttcttgtttcccaaggagaccgtgaacaagcaccaaatctagtgtatatggttacgggcaacccggctagtgatgaaattaagagactgcctggagatatacaagtggtgccaattggagttggacctaatgccaacgtacaagagttggagcgtattggttggcccaatgccccaatactgattcaagatttcgagactcttcctcgtgaagctccagatctcgttttacaaaggtgctgctcgggtgaaggacttcaaattcctaccctcagcccggcgcccgattgttctcaaccactggacgtaatattactacttgatgggagcagttctttcccagcaagttattttgatgaaatgaaatccttcgctaaagctttcatatcaaaggcgaatatcggaccgcgtttaactcaggtatcagtgctccagtatggatcgattactacgatcgatgtaccatggaacgtcgtccctgaaaaagcccacttgttatcgctagtcgatgttatgcaaagagaaggtggtcctagtcaaataggagatgctcttggattcgcagttcgttacttgacgagcgaaatgcacggagcccgtcccggtgcttccaaagccgtagttattttggtgactgacgtctctgttgattcggtcgatgctgccgcggatgcagcaaggagtaaccgagtgactgtcttccccatagggattggagatcgatatgatgccgctcaactcagaatccttgcaggtccagcaggtgatagtaatgtcgttaaattgcagagaatcgaggatttgccaactatggttacactaggaaacagttttctacacaagctatgttcaggatttgtacgaatttgcatggatgaagacggaaatgaaaaacgtcctggagatgtttggacacttccggatcagtgtcacacagtaacgtgtcaaccagatggtcaaacactactgaaatcgcacagagtcaattgtgaccgcggcttgcgcccgtcatgccctaattcccaatctcctgttaaagtggaagagacatgtggatgtcgctggacttgcccatgtgtgtgcacggggtcgtccacacgacatattgttactttcgacggacaaaatttcaaacttacaggctcatgttcgtacgttctttttcagaataaagagcaggacctcgaggttatattacataatggagcttgttcaccaggtgcccgacaaggatgtatgaaatcaattgaggttaaacattctgctttgtcagtcgaattacactctgatatggaggtcacggttaatgggcggttggtgtcggttccttacgttggggggaacatggaggttaacgtttacggagcgattatgcatgaagttagattcaatcacctgggacacattttcacttttacaccacagaataacgaattccagctccagctctcaccgaagacctttgcttctaaaacgtacggattgtgtggaatttgtgatgagaatggtgccaacgacttcatgctgcgtgatggaaccgtaactacggattggaagacactcgtgcaagagtggactgtacaacgcccgggacaaacctgccaaccgatactcgaggagcaatgcttagttcccgattcaagtcattgtcaagttcttttgttgccactgtttgccgaatgtcacaaagtattggctccagcaacattttatgcaatatgtcagcaagattcatgtcatcaagaacaagtgtgtgaagttattgcttcttacgcccatctttgcaggactaatggagtatgtgttgattggcgtacgccagatttctgtgccatgagttgcccaccgagcttggtgtacaaccattgtgaacatggttgcccacgacactgtgatggtaatgtctcatcatgtggtgatcacccaagcgagggctgtttctgtcctccagataaggttatgctcgaaggaagctgcgtaccagaggaagcttgtactcagtgtattggcgaagatggtgtacaacatcagtttttagaggcatgggttccagatcaccaaccttgtcaaatttgcacttgtctatccggtcgcaaagtaaactgcactacccagccatgcccaacagcaaaggctccaacttgcggactttgcgaagttgcacgactgcgtcagaatgcggatcaatgctgtccggaatatgagtgtgtttgtgatccagtttcctgtgacctgccacctgttccacattgtgaaagaggacttcaacccacacttactaatccgggggagtgccgaccaaactttacttgtgcctgccgtaaagaggaatgtaaaagagtgtctccaccgtcgtgcccgccacatcgattgccgacgttgagaaaaactcaatgttgtgacgaatatgagtgcgcttgtaattgcgtgaactccacggtttcttgtccgctgggttacctggcgtcaactgctactaatgattgtggctgcaccaccactacttgtttaccagataaagtttgcgttcatcgatcgacgatctacccggtcggtcaattctgggaggaaggttgtgacgtctgcacctgtactgatatggaggatgctgtgatgggactccgggtggcacagtgttcgcaaaaaccatgcgaagactcatgtagatcaggatttacttatgtcctgcatgagggcgaatgctgtggaagatgcctgccttccgcctgcgaagttgtgacaggatctcctcgaggggacagtcagagtagctggaaatcggttggcagtcagtgggcttcgcctgagaacccatgtctgattaatgaatgcgttcgggtcaaagaggaggtgttcattcagcaaagaaacgttagctgccctcagttagaagtgccagtgtgtccatcaggattccagttgagttgtaagacgagtgcatgctgcccgtcatgtagatgcgaacggatggaagcatgtatgttaaatggaacagttatcggacctggaaaaacagttatgatcgacgtttgcaccacatgcagatgcatggttcaggttggagtgatctccggatttaagcttgaatgtagaaaaacaacttgcaacccatgtccacttggatataaggaggaaaataatactggcgagtgttgtggaagatgtcttccaactgcttgtacgattcaacttcgaggaggacaaatcatgacactgaaacgtgacgagaccctacaggacggttgcgatacacatttttgcaaagttaatgaacgtggagagtacttctgggagaaaagagtaacaggatgcccaccgtttgatgaacataagtgtctggctgagggaggaaaaattatgaagatcccaggaacatgctgtgacacttgtgaggaaccggaatgtaatgatatcaccgctcgtcttcaatatgtaaaggtaggttcctgcaaatccgaggttgaggtggacatacattactgtcaagggaagtgtgctagcaaggccatgtactccatagacatcaatgacgtccaggatcaatgttcgtgctgttcaccaacacggacagaaccaatgcaagttgctcttcactgtacaaatggatctgtagtataccacgaggttctcaacgccatggaatgcaaatgttcgccccgaaaatgctcaaaa

SEQ ID NO: 12469 - DNA, 8439 bp, Artificial Sequence
  derived and/or modified sequence
atgatccctgcccgattcgcaggagttttgttagcactggcactcatcttaccaggtacattatgtgcggaggggacaagaggcaggtcgtcaaccgcccggtgttctctcttcgggagcgacttcgttaatacctttgatggctcaatgtattcttttgccggctattgctcgtatctgctcgcgggcgggtgccagaaaaggtcgttctctattataggggactttcagaacggaaagcgtgtgtccctgagcgtgtatttaggcgagttcttcgatatacacctgtttgtgaacggtaccgtgacgcagggagatcagcgagtatccatgccctacgcctctaaaggactctacctggaaacggaagccggctattataagctttccggcgaagcctatggatttgtggcccgcatagacgggagcggcaacttccaggtgttgctgagcgacaggtactttaataagacatgcgggttgtgcggcaattttaatatttttgccgaagacgatttcatgacacaggaagggaccctgacatccgacccttatgacttcgccaatagctgggccttatcatccggggagcaatggtgcgagagggcgtctcctccatcttcaagctgtaacatttccagcggagagatgcagaagggcctctgggaacaatgtcagcttttgaaatccacaagcgtatttgcacggtgtcatccgctggtggaccctgagcccttcgtggccctgtgcgaaaagacactgtgcgaatgcgctgggggcctcgaatgcgcttgcccggccctgctggagtatgcaaggacttgcgcccaggaaggcatggtactgtacgggtggacggaccacagcgcctgcagcccagtatgtccagcgggcatggaataccgccaatgcgtctcgccttgtgcccgcacgtgccagtcgctgcatataaacgagatgtgccaggagcgctgcgtcgacgggtgcagctgtcctgagggccagctgttggatgagggcctctgtgttgagagcaccgagtgcccctgcgttcacagcggaaaacgatacccgccaggtactagccttagccgcgattgcaatacctgcatctgtagaaacagccaatggatatgtagtaacgaagaatgtccaggtgagtgccttgtgacgggccaaagtcactttaaatcattcgataaccggtatttcactttttcgggcatttgtcagtacctcctggcacgagactgccaggaccatagcttcagcatcgtgattgagacagtacagtgcgccgacgatagagacgccgtgtgtacccgcagtgtgacagtaagacttcccggtttgcataactcattggtaaagctgaagcacggcgccggcgtggcgatggatggtcaagatgtgcagttacctctgttgaagggcgacctccggatccagcacaccgtcaccgcgtcagtgaggctctcttacggagaggacctgcaaatggattgggacgggcgcggcaggctgctcgttaagcttagccccgtgtacgcgggcaaaacgtgtgggctctgcggaaactacaacgggaatcagggagacgacttcttaactccatcaggcctggcagaacctcgggtggaggattttgggaatgcctggaaactgcacggagactgccaggaccttcagaagcaacattccgacccctgtgctctgaatccaagaatgacacggttctccgaggaggcctgtgcggtgctcacatcccctaccttcgaagcctgtcaccgggcagtgagtccgctaccttatttgagaaattgccgatatgatgtgtgctcctgcagcgacggaagagagtgtctctgcggtgcacttgcttcgtatgctgccgcctgtgctggccgcggggtaagggtggcatggagagaacccggcagatgcgaacttaactgcccgaaagggcaggtctatttgcaatgcgggacgccatgcaacttaacatgccgctccttatcatacccggatgaggagtgtaatgaggcgtgcctcgaaggttgtttctgccccccgggcttgtacatggatgaaaggggtgattgcgtccctaaggcccaatgcccatgctattacgacggggagatcttccagcctgaggatatatttagcgatcaccatactatgtgttactgtgaggatggatttatgcattgtacgatgtccggggtgccggggtccctgcttcccgacgctgtcctgtccagtcctctttcacaccggtcgaaacgctctctcagctgtcgccctcccatggtgaaactagtttgccctgctgacaacttgcgtgccgaagggctggagtgcaccaaaacctgtcagaactacgacctcgagtgtatgtccatgggatgtgtcagcggctgcctgtgccccccaggtatggtcaggcacgaaaataggtgcgtcgcactcgagaggtgcccgtgtttccatcagggaaaagagtatgctcccggagagaccgtgaaaattgggtgcaacacctgtgtatgtcaagatcgaaagtggaactgcactgatcatgtgtgtgacgcgacttgctctaccatcggaatggctcactacttgactttcgacggactaaagtatctgtttcctggggagtgtcaatatgtgttagtacaggattattgcggatccaacccagggacttttcggattttggtggggaataaaggatgttcacatccaagcgtcaaatgtaagaagcgtgtaacaatcttggtggaaggaggcgagatcgaattattcgacggagaggttaatgttaaacgccccatgaaagacgagactcactttgaggttgtggagagcggacgctacatcattctgctgttgggcaaggccctgagtgtcgtgtgggatcgccacctgtctatcagtgtggtactgaagcagacctatcaagagaaggtgtgcggcctctgcgggaatttcgacggtatccagaataatgacctcactagctcgaacttgcaagtggaagaggacccagtggacttcggcaattcctggaaagtttcaagccagtgtgcagacacacggaaagtccccctcgactcctctcccgcaacttgtcacaataatataatgaaacaaactatggtggatagctcgtgtcggattttgacatccgacgtcttccaggattgtaataagttggtggatccagagccatacctggacgtttgcatttacgacacctgttcttgcgaatctatcggcgactgcgcctgtttctgtgacactatcgccgcttacgcacacgtctgtgctcagcatggaaaggtcgttacatggcgcactgccaccctgtgccctcagtcttgcgaagagagaaatctcagggagaacggctacgagtgcgaatggcgatataattcctgcgctcctgcttgtcaagtgacatgtcaacatcccgagccgttagcttgtccagtgcagtgtgtggagggctgtcacgctcattgccctcccggcaagatactggacgagttgctacagacctgtgtggaccctgaagactgtcctgtgtgcgaagtggccggacggcgctttgcatcagggaagaaggtaacactgaatccgtccgatcctgagcattgccagatatgccactgcgatgtagtgaacctcacctgtgaagcttgccaggagccaggaggcctggttgtcccacccactgacgctcccgtcagccccacaacgctatatgtggaggacataagcgaaccccccctccatgacttttattgctccaggcttcttgaccttgtgttccttttggacggctccagtcggctctctgaagccgaattcgaagttctaaaggctttcgtcgtggatatgatggagagactgaggattagtcaaaaatgggttagagtagctgtggtcgagtaccatgatggaagccacgcatacatcggattaaaggaccgcaagagaccatcggaactgcgtcgcatagcttctcaagtaaaatacgccggttcccaggtggcctccacaagcgaggtactcaagtacactctcttccagatcttctctaagatagacaggcccgaagcttctagaatcacacttctacttatggcctcgcaagagcctcagaggatgtctcgcaacttcgtcagatacgtgcagggtttaaagaagaaaaaagtgatcgtaatcccggttggtattggaccccacgctaatctgaaacagattcggttaatcgaaaaacaggctccagagaacaaggcgtttgttctgagtagcgttgatgaacttgaacagcagcgcgacgagatcgtttcatatctgtgcgacctggcccccgaagcaccaccgcctaccttaccacccgatatggcccaggtgactgtgggtcccgggctgctaggggtgagtacgttgggccctaagagaaactcaatggtcctggacgtggcatttgtcctcgagggctcagataaaatcggcgaggcagatttcaaccggtccaaggaatttatggaagaagtcatccaaaggatggatgtcggtcaggatagcatccacgtgacagtccttcagtattcctacatggtgacggtggaatatccattcagcgaagcccaatccaagggcgatatcctccagcgggtgcgcgaaatcagatatcagggaggaaatcgcaccaataccggcctggctctacggtacctgagcgatcacagtttccttgtctctcagggcgatcgtgaacaagctcctaaccttgtttatatggttactggcaatcctgcctcggacgagatcaaacgcctgcccggcgacatccaggtggtgcccattggggtcggcccgaatgctaacgtccaagagttagaacgaatcggatggcccaacgccccaattctaatccaggactttgaaacgctcccgagggaggctccagacctggtcttgcagaggtgttgcagcggagaaggcctgcagatccctactttgtcccccgctcccgattgctcacaaccactcgatgtgatactgcttctggatggcagctcgtcattcccagcgtcatattttgatgaaatgaagtctttcgccaaagcgttcatcagtaaagctaatattggccctagactgacccaggtctccgttctccagtacggctcaattaccacgatcgacgtcccctggaatgtggtgccagaaaaggcccacctgctgtcattggttgatgttatgcagcgtgagggcggaccttctcagatcggtgacgccctgggcttcgcagtgcgatatctaactagtgaaatgcacggagccaggccgggggctagcaaggcagttgttatcctggtgactgacgtgtctgtcgattccgtggacgctgctgcagatgccgcgcgcagcaatagagtgaccgtgttccctatcgggataggcgaccgctatgatgccgcccagttaaggatcttggcgggccccgcaggcgatagtaatgttgtcaagttgcaacgaatcgaagatctgcctacaatggtgaccctggggaactctttcctccataagttatgctccggcttcgtgcggatctgcatggatgaggacggtaacgaaaagcgtccgggagacgtatggacactcccagatcagtgtcacaccgtcacttgtcaaccggacggtcagactctgctgaagtcccaccgggttaattgcgatcgaggattgcgacctagctgtccgaatagccagtctcctgttaaagtggaagaaacttgtggttgtcgctggacttgtccgtgcgtgtgcacagggagtagcactcggcatatcgtgacttttgacgggcagaattttaagctcaccgggtcttgctcctacgtactcttccagaacaaggagcaggacctggaggtgatcctccataacggggcctgcagccctggcgctcggcaggggtgcatgaaaagcattgaggtgaagcatagcgccctgtctgtagagctccattcagatatggaggtgacggtgaacgggaggctggtttcagtaccttacgttgggggcaacatggaggtcaatgtttatggcgccataatgcacgaggttagattcaatcatttgggacatatcttcacattcacgccacagaataacgagttccagcttcagctctcgccaaagacattcgcctcaaaaacatacggcctgtgtggcatttgcgacgagaacggggccaatgattttatgctccgcgatggaaccgtgacaactgactggaagacccttgtgcaggaatggactgtccagcgccccggccaaacatgtcagcccatcctggaagagcagtgcctcgtccccgacagttcccactgccaagtgctactgctccctctgtttgccgaatgtcacaaggtcctagctccagctacattttacgccatatgccagcaagattcatgccaccaggagcaagtgtgtgaagtgattgcctcttacgcccacctgtgccgcaccaatggtgtgtgcgttgactggcggacacctgatttctgcgcaatgagctgccccccgagtctggtgtataaccattgcgagcatggatgccctagacattgtgatgggaacgtgagctcctgcggcgaccatccaagtgaggggtgcttctgcccacctgataaggttatgcttgaaggatcctgtgtgccagaagaagcttgcacccaatgtatcggagaggacggcgtccaacaccagtttttagaggcctgggtccctgatcaccagccatgccagatttgcacctgcctgagcggccggaaggtgaattgcaccactcaaccgtgtccaactgctaaagcgcctacttgcgggctgtgcgaagtggctcggttgagacagaacgcagaccagtgctgtcccgaatacgaatgtgtttgcgacccggtatcctgtgatctcccaccggtgccccactgcgagcggggactgcagccgactctcaccaacccaggtgaatgtagaccaaactttacatgcgcatgccggaaggaggaatgtaagagggtgagtcctccctcttgtcccccccacaggctgccaactttgaggaaaacccagtgttgtgatgagtacgaatgcgcctgcaattgcgttaattcaacggtttcctgcccccttggctacctcgcatcgaccgctactaatgactgtggctgcacaacaactacctgcctgcctgataaggtttgcgtgcacaggagtaccatttatcccgttggacagttctgggaagaaggctgtgacgtctgcacctgcactgatatggaggatgcagttatgggactcagagtcgcgcagtgcagccaaaaaccctgtgaggacagttgccgttcagggtttacatacgtccttcatgagggagaatgctgcggccggtgtcttccatcggcttgtgaagtcgtcactggtagcccgcgcggcgactcccagtcctcctggaagtctgtgggatcgcagtgggcaagcccagagaacccctgtctgattaacgagtgcgtcagggtgaaggaggaggtgtttattcaacagaggaatgtcagctgtccacagcttgaggtgcccgtgtgtccttcaggattccagctctcatgcaaaacctcagcgtgctgtccctcgtgtcggtgcgaacgaatggaggcctgcatgctaaacggaacagtgatcggacccgggaagaccgtcatgattgacgtgtgcaccacctgccgctgtatggtgcaggtgggggtaatctctggatttaagttggagtgtcgaaaaaccacatgtaatccgtgtccattgggatataaggaggagaacaacacaggggagtgttgtgggaggtgtctgcccacagcgtgcaccatccagctccgaggcggacagatcatgaccctgaaacgggacgagacgctgcaggacggctgtgacacacatttctgcaaggttaatgagcgaggagaatacttctgggaaaaaagagtaaccggctgtcctccttttgacgaacataagtgcctggccgaggggggaaaaatcatgaaaattccggggacctgttgtgacacctgcgaagaacctgagtgtaatgatataacggccagattgcagtatgtcaaagtgggcagctgtaagagtgaagtcgaggtggacatccattattgccaaggaaaatgcgccagcaaagccatgtactcaatcgatatcaacgacgtccaggaccaatgcagttgttgtagcccaacaagaacagaaccaatgcaagtggcccttcactgcactaacggttccgtcgtgtaccatgaggtgttgaatgcaatggagtgtaagtgttcaccgaggaagtgctccaag

SEQ ID NO: 12470 - DNA, 8439 bp, Artificial Sequence
  derived and/or modified sequence
atgatcccagctaggtttgcaggtgtgcttttggcactggccctgattctgcctggtacgctttgtgccgagggaaccagagggcgctcctccacggcccgttgttccctgtttggttcagattttgtgaatactttcgacggctccatgtacagcttcgccggctactgttcatacctcctcgcaggcggctgccagaagcgctctttttcgataataggtgattttcagaacggcaagcgtgtctcactgtcggtgtacctgggagagtttttcgacattcatctgtttgtcaacggaacggtgacccagggagatcaaagggtgagcatgccatatgcaagcaagggcctgtacctggaaaccgaagctgggtactacaaactctcgggagaagcctacggttttgtggcaagaatagatggatcgggaaactttcaagtgctcctttcggaccgctactttaacaagacctgtgggctgtgcggcaactttaacatttttgccgaagatgatttcatgacccaggaaggaactctgacctccgacccatacgattttgcaaacagctgggccctgtcaagcggagaacaatggtgtgaacgcgcatccccgccatcctcctcctgcaacatttcgagtggagagatgcaaaaaggtctgtgggaacagtgtcaactgcttaaatcgaccagcgtttttgcgcgctgtcaccctctggtcgaccccgagccctttgtggccctgtgtgaaaagaccctgtgcgagtgtgcaggtggtctggaatgtgcatgtccagcacttctcgaatacgcaaggacctgcgcacaggagggaatggtgctttacggatggactgatcattccgcgtgtagccccgtgtgtcctgcaggaatggagtacaggcaatgcgtctcgccttgtgcacgcacctgtcaatcgttgcacattaatgagatgtgtcaagaaagatgcgtggacggctgttcatgtccagaaggacagttgctggatgaaggactttgtgtagagagcactgaatgtccttgcgtccactcagggaaacgctatcccccaggtaccagcctctcacgggattgtaacacttgtatctgtaggaattcgcaatggatttgtagcaacgaagaatgtccgggggaatgccttgtgacgggacagtctcatttcaagtcctttgataaccggtactttactttctccggtatatgtcaatacctgcttgcacgcgactgccaggaccacagcttctcaatcgtgattgaaaccgtgcaatgtgcagatgatcgagatgcggtctgcacccgctccgtgaccgtccgtttgcccggactgcataatagcctggtgaagctgaagcacggcgccggtgtcgcgatggatggtcaagacgtgcagcttccactccttaagggcgacctgcgaatccagcatacggtcaccgcgtcggtcagattgtcgtacggtgaagatctccagatggactgggacggacggggcagacttcttgtgaagctctcacctgtctacgcaggcaaaacttgcggactgtgtggtaactacaacggtaaccaaggcgatgattttcttaccccgagcggattggcagaaccgagagtagaagattttggaaacgcatggaaacttcatggggattgtcaagacctccaaaagcaacatagcgatccctgcgcattgaaccctaggatgacccggttttccgaagaagcatgtgcagtccttacctcgccgacctttgaggcatgtcacagagccgtctcaccactcccttacttgaggaattgtcggtacgacgtctgttcttgtagcgatggacgtgaatgtctttgcggagcactggcatcgtacgcagccgcgtgcgcagggcgtggagtgcgggtggcttggcgtgaacccggtaggtgcgaactcaactgtccaaaggggcaagtctacctccagtgtggaactccctgtaatcttacctgtcgttccctcagctaccccgatgaggaatgtaatgaagcctgcctcgaaggatgtttttgtcctccgggactctacatggacgaaaggggtgactgcgtgcctaaggcccagtgtccttgttactacgacggggagattttccaacctgaggacatattctcggatcaccataccatgtgttactgcgaagatggtttcatgcactgcactatgtccggcgtgcccggatccttgctccctgatgcagtgctgtcatcgccactttcacatcggtccaagagatcactgtcgtgtagacccccaatggtgaaactggtgtgcccggctgacaacttgagagcagaagggcttgaatgtaccaaaacctgtcaaaactatgatctcgagtgtatgtccatgggctgtgtcagcggatgcctctgtccaccgggaatggtacgacatgaaaacaggtgcgtcgcactcgagcggtgtccgtgcttccatcaaggtaaggaatacgcacctggcgaaactgtgaagatcgggtgcaacacttgtgtgtgtcaggatcggaagtggaattgcactgaccatgtctgtgacgctacgtgtagcaccattggcatggcacattaccttacctttgacggattgaagtacctcttccccggagagtgtcagtacgtgctggtgcaggactactgtggctcgaatccaggcacttttaggatccttgtgggtaacaagggatgttcgcacccatcggtgaaatgcaagaagcgggtcactatcctcgtcgagggtggagagattgagttgttcgatggagaggtcaatgtcaaacggccaatgaaggatgagactcactttgaagtcgtggagagcggcaggtacattattcttcttcttggtaaagctctctcagtggtttgggacagacaccttagcatctcggtggtgctgaaacagacgtaccaggagaaggtgtgtggactgtgtggaaactttgatggaatccagaataacgatctgacctcatcgaatcttcaagtggaagaggaccctgtcgatttcgggaatagctggaaagtctcatctcagtgcgcggatactcgaaaagtgccattggacagctcgccggccacctgccataacaatatcatgaaacaaaccatggtggactcatcgtgtcgcatccttacgtcagatgtctttcaggattgcaacaaactggtggacccagagccatacctggacgtgtgcatttacgacacctgctcatgtgaatcgattggggactgtgcatgcttttgcgatactatcgccgcgtacgcacacgtgtgtgcacaacacggaaaggttgtgacctggagaaccgcaactctttgtccacagtcctgtgaagaacggaaccttagggaaaacggttacgaatgtgaatggagatacaactcatgcgcacctgcgtgtcaagtgacttgccaacacccagaaccactcgcatgtccagtgcagtgtgtggaaggttgccatgcccattgtccgccaggaaagattctggatgagctccttcagacctgcgtggatccggaggattgtccagtttgtgaagtcgctggcagacggtttgcttcggggaagaaagtaactcttaacccttcagatcctgagcattgtcaaatctgccactgcgacgtggtgaacctgacgtgtgaagcatgtcaggaacccggaggacttgtggtgcccccaactgatgctcccgtatcaccaacgactctgtacgtggaagatatttcggagcctccacttcatgatttctactgttcgaggttgctcgaccttgtgttccttctggatggctcgagccgactgtcagaggcagaattcgaagtgctgaaggctttcgtggtggatatgatggaacgtctgaggatttcgcagaagtgggtcagagtggcagtcgtggaataccacgatggtagccatgcatacatcggcctgaaggatcggaagaggccttcagaacttcgtcggatagcctcgcaagtgaaatacgctggctctcaggtggcatcaacttcggaggtcctcaagtacaccctgttccagatcttttcaaaaatcgacagacccgaagccagccgcataacccttcttcttatggctagccaagagcctcaacgaatgtcgagaaactttgtccgttacgtgcaaggacttaagaaaaagaaagtgattgtgatccctgtaggtatcggtccgcatgcgaatctgaagcaaatcagacttatcgaaaagcaagcccctgaaaacaaagcatttgtgctttcgtccgtggacgaactcgagcaacagcgcgatgaaatcgtctcgtacctgtgcgaccttgcaccggaggcaccacctcccaccttgcctccagacatggcacaagtcaccgtgggacctgggcttttgggggtgtctaccctgggacctaagcgcaattcaatggttctggacgtagcattcgtcttggagggatcagataagattggagaagcagactttaaccggagcaaggaattcatggaagaggtcatccaaaggatggatgtcgggcaggactcaattcatgtcactgtgctccaatactcgtatatggttaccgtggaatacccatttagcgaggcccagagtaagggagatatcctccagagagtgcgagaaattcggtaccaaggtggcaatagaactaacaccggactcgctctccgctacctttccgatcatagcttcttggtgtcgcaaggggatcgcgaacaagctccaaacctggtctacatggttactggtaaccccgcctcagacgagattaagaggctcccgggtgacattcaagtggtgcctattggagtggggcccaacgccaatgtgcaagagctcgaaagaatcggttggccaaatgcacccatactcattcaagacttcgagactctgccaagagaggcgcctgacctcgtgctgcagaggtgttgctcaggggaaggactgcagattcctaccctttcgcccgcacctgattgttcgcaacctctcgatgtcatcctgcttcttgacggttcctcctcgttccccgccagctactttgacgaaatgaaatccttcgccaaagccttcatctcaaaagccaacattggacctcgtctgactcaggtgtctgtgctgcagtacggatccatcactaccattgacgtaccttggaacgtcgtgcctgaaaaagcgcacctgctgtccctggtggatgtgatgcaacgggaaggcggaccttctcaaattggtgacgcactcgggtttgcagtgaggtacctgacctccgaaatgcatggcgctcgacccggcgcttccaaggccgtggtcattctggtgacggacgtgagcgtggattcagtggatgcggccgcagacgcggcaagatcaaacagagtgaccgtgtttccaattgggatcggagatagatacgacgcagcccagctgaggatcctggccgggcccgcaggagattcaaacgttgtaaagctccagcgcatagaagatctgcccactatggtgaccctcgggaattcgttcctccataagctgtgttctgggtttgtgcgtatttgtatggacgaagatggcaatgagaagcgccctggtgatgtctggactttgccagaccagtgccacaccgttacttgtcaacctgatggacaaaccctgcttaagtcccaccgtgttaactgcgatagaggacttcgcccctcatgtccaaatagccaatcaccagtgaaggtggaagaaacttgcggatgtagatggacgtgtccctgtgtgtgtactggatcaagcactagacatatagtcacgttcgatgggcagaatttcaaacttaccggttcgtgttcctacgttttgtttcaaaacaaagaacaagatcttgaagtcattcttcataacggagcgtgctcgcctggagcaagacagggttgtatgaaaagcatagaagtgaagcattcggcactctcagtcgaactgcactccgatatggaggtgactgtgaacgggcggcttgtgtcggtgccctacgttggaggaaacatggaagtgaacgtgtacggtgcaatcatgcatgaagtcagattcaatcatctcggtcatatctttacctttactccgcagaacaacgaatttcagttgcaactttcccccaagacttttgcatcaaagacttacggcctgtgcggtatttgtgacgagaacggagcaaatgatttcatgctgcgagatggtactgtgaccactgactggaaaactctggtgcaagaatggactgtgcaaagacctgggcaaacttgtcagcccattctggaagagcagtgtctggtgccagactcctcgcattgtcaggtgttgcttctccccctcttcgcggaatgtcataaggtgctcgcccctgcaactttctatgcgatttgccaacaagattcgtgtcaccaggaacaagtctgtgaggtcatagcatcctacgcgcacctttgtcgcactaacggtgtgtgcgtggattggcgcacccctgatttttgcgcaatgtcgtgtcctccctcgctggtctataaccactgtgaacatggctgtccacggcattgcgatgggaatgtcagttcgtgcggtgaccatccttcggaaggatgcttttgccctccggataaggtcatgcttgaaggttcgtgtgtcccagaggaagcatgcactcaatgtattggtgaggatggagtacaacatcagtttctggaagcgtgggtgcctgatcaccagccatgtcaaatatgcacttgtctgtccggaagaaaggtgaattgcactacccagccttgccccaccgcaaaggcacctacgtgtggattgtgcgaggtggcgcgactgcggcagaacgcagatcagtgctgtccggaatacgagtgtgtgtgcgatcctgtgtcatgcgaccttccccccgtgcctcattgtgaacgcgggcttcagccgaccctgactaatccaggggagtgtcgacccaactttacctgtgcatgccgcaaggaagaatgtaagcgcgtttcccctcctagctgtcctccacatcgacttcctaccctgagaaaaactcaatgttgcgatgaatatgagtgtgcatgtaattgtgtgaattcaacggtttcgtgtccgcttggatacctggcctccaccgcgacgaatgactgcggctgcaccactaccacgtgtctccctgataaggtgtgcgtgcacaggagcaccatttacccggtcggacaattttgggaagaaggctgtgatgtttgtacttgtactgacatggaagatgccgtgatgggcctgcgggttgcccaatgttcacaaaagccatgcgaggatagctgtcgatccggatttacgtacgtgctccatgagggtgagtgttgtggacggtgtctgccatccgcatgcgaggtggtgaccggatcgccgcggggggattcccagtctagctggaagtcagtcggttcgcagtgggcgtctccagagaatccttgcctgattaacgagtgcgtgcgcgtgaaggaagaagtgtttattcaacaacgaaacgtgagctgcccacaactggaagtgccagtctgtcctagcggcttccagctgtcctgcaagacttcggcttgctgcccgtcgtgcagatgtgaacggatggaagcctgtatgcttaatggaaccgtgattggacctggtaaaaccgtgatgatcgatgtgtgtaccacttgtaggtgtatggtccaagtcggtgtgattagtggttttaagctggaatgccgcaagaccacctgtaatccttgtcctcttggttacaaggaggaaaacaacactggtgaatgttgcggcagatgccttcctaccgcttgtaccatccaactgcgcggcggccagataatgactcttaaacgcgatgaaaccctgcaagatggttgcgatacgcatttttgtaaggtcaacgagagaggtgaatacttttgggagaagagagtcaccgggtgccctccttttgacgagcataagtgccttgccgaaggcggaaagattatgaaaattccaggtacctgttgcgatacttgtgaggagccagaatgcaatgatatcaccgcaagactccaatatgtcaaggtaggatcctgtaagtccgaggttgaggtggatatccattattgtcagggtaagtgcgcatccaaggcaatgtattccattgacattaatgatgtgcaggatcagtgtagctgttgctcacctacccgtactgagcccatgcaagtcgccctccactgcaccaatggatccgtggtgtaccacgaagtgctcaacgccatggagtgtaagtgctccccaagaaagtgcagcaag

SEQ ID NO: 12471 - DNA, 8439 bp, Artificial Sequence
  derived and/or modified sequence
atgatccccgccagattcgccggagtgctcctcgcactggctctgattctcccagggaccctgtgcgctgaaggaactcggggacggtcgagcaccgcccggtgtagccttttcggatcggatttcgtcaataccttcgacggaagtatgtactcattcgcaggatactgcagctacctgcttgccggcggttgccagaagcgctcattctccatcatcggagacttccaaaatggaaagagagtgagcctttccgtttacctcggagaattcttcgatatacatctgttcgtgaacggtactgtgacccagggggatcagcgggtgtccatgccgtacgcgagtaagggcctgtacctcgaaacggaagccggatactacaaactgtctggagaagcatacggattcgtcgcgcggatcgatggtagcggaaactttcaggtgctcttgagcgaccggtacttcaacaagacctgtggattgtgcggaaactttaacatattcgccgaggacgatttcatgactcaagaagggaccctgacgagcgatccgtacgatttcgccaatagctgggcactgagctccggagaacaatggtgtgaacgagccagcccgccgagctcgtcgtgcaacatcagctccggcgagatgcagaagggactgtgggaacagtgccaactcttgaagagcactagcgtttttgcgcggtgccatccgcttgtggacccggaaccgttcgtcgccctgtgcgaaaagactctgtgcgaatgcgctggagggctggagtgcgcctgtccggccctgctggagtacgcaagaacttgcgcccaggaagggatggtcctgtatggatggaccgaccacagcgcctgctctccggtgtgtccggcgggtatggaatacagacaatgtgtgtcaccgtgcgctcggacctgtcagtcactgcatatcaatgaaatgtgccaagagagatgcgtggatggatgcagctgccccgaggggcagctccttgacgaaggactgtgcgtggagtccactgaatgcccgtgcgtgcacagtggcaaaaggtatccaccgggaacctccctgtcccgggattgcaatacgtgcatctgcagaaactcccagtggatctgctcgaatgaagaatgcccgggcgagtgcctggtgactggtcagtcccactttaagtcttttgacaaccgctacttcaccttttccggaatctgccaatacctcctggcccgggactgccaggaccattcgttctcaatcgtgattgaaaccgttcagtgcgctgacgaccgggacgccgtgtgcactagaagcgtcactgtccgcctgccgggtctgcataattcgctcgtgaaacttaagcacggagcaggcgtggccatggacggacaagacgtgcagctgcccttgctgaagggcgacctcagaatccagcacaccgtaactgcgtccgtccggttgtcctacggcgaagatctgcaaatggattgggatggtcgcgggagactgttggtgaagctgagcccggtgtacgctggtaagacttgtggcctgtgtggtaactataatggaaaccagggagatgatttcctgaccccgtcgggactcgcggagccgcgcgtggaggacttcggaaacgcatggaaacttcatggggattgccaagaccttcagaagcagcattcagatccgtgtgcgctcaaccctagaatgactcgctttagcgaagaggcatgcgctgtgcttactagcccgactttcgaggcctgtcatagagcagtgtcaccactcccatacctccgtaattgtaggtacgacgtgtgctcgtgttcggacggtcgggaatgtttgtgtggtgctttggcgtcctacgcggccgcctgcgcagggaggggagtgcgcgtggcatggagggaaccaggacgctgcgagctgaactgcccaaaaggacaagtgtacctgcagtgcggaactccttgcaatctcacctgcagatccctctcataccccgacgaagagtgcaacgaggcttgcctcgaaggttgtttctgtcctccggggctctacatggatgagagaggggactgcgtgcccaaggcgcagtgcccgtgctactacgatggagagatctttcagcctgaggacatcttctcggaccaccacaccatgtgctactgtgaggatggattcatgcactgcaccatgagtggagtgccgggatcgctcctgcctgatgctgtcttgtcgtcacctctctcccatcgctccaagcgctccctgtcgtgcagaccccctatggtgaaacttgtgtgcccggccgataaccttagagcggagggacttgaatgcactaaaacgtgccagaattacgacctggagtgcatgtccatgggatgcgttagcggatgtctctgcccacctggtatggtccgacacgaaaaccggtgcgtggccctggaacggtgtccctgctttcatcaaggtaaggagtacgcccctggagagacggtaaagatcggatgcaacacctgcgtttgccaagacagaaagtggaactgtactgaccacgtctgtgacgctacgtgctccactattggaatggcccattacctgactttcgacggcctgaagtacctgttcccgggggaatgccagtatgtgctcgtgcaagactactgtggatcaaatccaggcacttttcgcatcctggtgggaaacaaagggtgttcgcacccgtccgtcaagtgcaagaagagagtcacgatcctcgtggaaggcggcgagatcgaactgttcgacggagaagtcaacgtgaagcgcccgatgaaggatgagactcacttcgaggtcgttgagtccggccgctacatcatcttgctgctgggtaaagccctgtcggtcgtttgggataggcacctctccatctccgtggtgcttaaacaaacttaccaagaaaaggtgtgtggactgtgtggcaacttcgacggcatccagaataacgacctgacgtcatcgaatctgcaggtcgaagaggacccagtcgatttcggaaattcatggaaggtgtccagtcagtgtgctgatacccgcaaagtgccgctcgattcgtcaccggcgacctgccacaacaacattatgaaacaaaccatggtggacagctcgtgtagaatcctgacttcagacgtgttccaagattgcaataaacttgtcgatccggagccttacctcgatgtctgcatctacgacacctgtagctgcgaatccattggtgattgcgcctgtttctgcgataccatcgcagcctacgcccacgtctgtgcgcaacacggcaaggtcgtgacctggcgcaccgccacgctgtgtccgcaatcctgcgaggaacggaacctccgggagaacggatacgaatgtgaatggaggtacaacagctgcgcaccggcctgtcaggtgacctgccagcaccccgagccgcttgcatgccccgtgcagtgtgtggagggatgccacgcccactgcccaccaggaaagatacttgacgaacttctccaaacctgcgtcgacccagaagattgtcctgtgtgcgaggttgccggtcggcgtttcgcgtccgggaagaaggttacccttaacccttcggacccagaacattgtcagatatgccactgcgatgtggtcaacttgacctgcgaagcatgccaggaaccgggaggcctggtcgtacccccaaccgacgcgcctgtctcgccaacgaccctttacgtggaagatatcagcgaaccgcccctccacgatttctattgctcgaggctcctcgacttggtatttctgctggacggatcgagccggttgagcgaggcagaatttgaagtgctcaaggcttttgtcgtggatatgatggaaagactgcggatctcgcagaagtgggtgcgagtcgcggtggtggagtatcatgacggcagccacgcatacatcggactgaaagacaggaaacgtccttcggaattgcggcgcatcgcgtctcaggtgaagtacgcgggctcacaggtcgcctcgacctcggaagtcctgaaatacactctcttccagatcttctccaagatagatcgcccggaggcctcacgcattactctgctgctgatggcatcacaggagccacagagaatgtcacggaactttgtgcgctacgtccaaggtctgaagaagaagaaggtgatcgtgatcccggtgggaattggaccgcacgccaacctgaaacagatcagactgatcgaaaaacaggccccagagaataaggccttcgtgctctcctcggtggacgaattggaacagcaacgcgacgagatcgtgtcgtacctgtgcgacctcgctccagaggccccacccccgactctgccgccggatatggcgcaggtgaccgtgggaccgggcctgcttggcgtgtccaccctgggccctaagcgcaactccatggtgctggacgtcgcctttgtcctcgagggaagcgacaaaatcggcgaagcagactttaaccggtcgaaggaattcatggaggaagtcatccagcgcatggacgtgggacaggactccattcatgtgaccgtgctgcaatacagctacatggtcacggtagagtacccgttctcggaagctcaatcgaagggtgatatcctgcaacgtgtgcgggaaatccggtatcagggaggaaaccgcaccaatactggccttgcgttgaggtatctgtccgatcattcctttctcgtgtcccaaggcgatcgcgaacaagccccaaacctggtgtacatggttactggaaatcctgcttctgatgagatcaagaggctcccaggcgacatccaggtggttccaatcggcgtcggccccaacgcgaatgtccaggagctggagcggatcggatggccgaacgcgccgattctgattcaagattttgaaaccctcccccgcgaggcccctgacctggtgctccagaggtgctgctcgggggagggattgcagataccgacgctgtcgccagctcctgactgctcccagccgttggacgtgatcctgctgttggacggaagctcgagttttccagcctcgtacttcgacgagatgaagagcttcgcgaaggcgttcatcagcaaagcgaacatcggaccacggctcacgcaggtgtcagtcctgcagtacggatcaatcactactatcgacgtgccgtggaatgtcgtgcccgagaaggctcatctgctgtccctcgtggacgttatgcaacgcgaggggggaccctcgcagatcggcgacgctctgggcttcgcggtgagatacctgacctcggagatgcatggcgccagaccgggagcctcgaaggccgtggtcatccttgtcaccgacgtctccgttgactcggtggacgctgctgcggacgccgccaggtcgaaccgcgtgaccgtctttccgatcgggatcggcgatcggtacgatgcggctcaactccgcatcctggctggccctgccggagattcgaatgtggtcaagctgcaacggatcgaagatctgccgactatggtgaccctgggcaactccttcctgcataagctctgttccggtttcgtgcgcatctgcatggacgaggacgggaacgaaaagaggcccggagatgtgtggaccctgccagaccagtgccacactgtaacttgccagcccgatggccagaccctgctgaagtcccaccgcgtgaactgcgatcgagggctccgcccgtcgtgcccgaattcgcagtcgcctgtcaaggtggaagaaacttgcggctgccgctggacgtgtccctgcgtctgcaccggatcctccactaggcacatcgtgaccttcgacggtcaaaacttcaagctgacgggatcctgctcgtacgttctctttcagaataaggagcaggacctggaagtgatcctccataatggtgcctgttcaccaggcgcgagacaaggatgcatgaagtccatcgaagtgaaacactcggcactgtcagtcgagctgcactcagacatggaggtgacggtcaatggcagattggtgtccgtgccgtacgtgggcggcaatatggaggtcaacgtctacggagccattatgcacgaggtgcgcttcaaccacctggggcacattttcacctttacccctcagaataacgagttccaactccagctgagcccaaagacttttgcctcgaaaacctacgggctctgtggcatctgcgacgaaaatggcgccaacgacttcatgctgcgcgatggaactgtgactactgactggaaaacccttgttcaggaatggaccgtgcagcggcccggacagacttgccaacccatcttggaggagcaatgtttggtcccggattcgtcccattgccaagtcctgctgctcccgctgttcgccgaatgtcacaaggtgctggcgcctgccactttttacgcaatctgtcagcaggattcttgccaccaggagcaggtgtgtgaggtaattgcttcctacgcacatctttgcagaaccaatggtgtttgcgtggattggcgcaccccagacttctgcgcaatgagctgcccgccatccctcgtgtacaaccactgcgagcatggatgtccgagacactgcgacgggaacgtgtcaagctgcggagatcaccctagcgaagggtgcttctgtccaccagataaagtgatgcttgagggatcatgtgtcccagaagaagcgtgcactcagtgcatcggtgaggacggtgtgcagcaccagttcctggaggcatgggtccccgaccaccagccttgccaaatctgtacgtgtctgagcggccgcaaagtgaattgtacgacccagccttgcccaaccgccaaggctccgacttgcggtctgtgcgaagtggcacgcctccggcagaacgctgaccaatgctgccctgaatacgagtgcgtgtgcgatccggtgtcgtgcgatctcccgccggtccctcattgcgaaagaggcctccaaccgactcttaccaatccgggcgaatgccggcctaatttcacctgcgcttgccgcaaggaagaatgtaagcgcgtgtcgccaccatcgtgcccaccgcaccgcctgccaaccctcagaaagactcaatgctgcgacgaatacgaatgcgcctgcaactgcgtgaacagcaccgtatcgtgccccttgggctacctggcgagcaccgccactaatgactgcggatgcactaccaccacctgcctgccggataaagtgtgcgtgcatcgctcgacgatttacccggtgggacagttctgggaagaaggctgtgacgtgtgcacctgcactgacatggaggatgctgtcatgggactgcgtgtcgctcagtgctcacaaaaaccatgcgaggactcatgtcgctcgggattcacctatgtgctgcacgagggcgagtgctgtggacggtgcctgccgtctgcgtgcgaagtggtgactggatccccgcgcggcgacagccagtctagctggaagtccgtgggatcacagtgggcgtcgcctgagaatccatgcctcattaacgagtgtgtgcgggtgaaggaagaagtctttattcaacagcgcaacgtgagctgtccacagctggaagtgcctgtgtgcccatccgggttccaactctcatgcaagacttcagcatgctgtccttcttgtcggtgtgagcgcatggaagcctgcatgcttaatgggaccgtgattggcccggggaaaaccgtcatgatcgatgtgtgtaccacctgtcgctgcatggtccaggtcggggtcatcagcggtttcaagctcgagtgtaggaaaactacctgtaacccatgcccactgggatacaaggaagagaacaacaccggggaatgctgcggcaggtgcctgccgactgcatgcaccatccaactcagaggcgggcaaatcatgacgctcaagcgcgacgagactctgcaggacggatgtgacacccatttctgcaaagtgaacgaacgtggtgaatacttctgggagaagcgggtgactggttgtcctccgttcgacgaacacaaatgcttggcggagggagggaagattatgaagatccctggcacttgttgcgacacctgtgaagaaccggaatgtaacgacatcacggctcggctccaatacgtcaaggtgggttcctgcaagagcgaagtggaggttgatatccattactgccagggaaaatgcgcgagtaaagcgatgtattcgatcgacattaacgatgtgcaggaccaatgctcctgctgctcaccaactcggactgaaccaatgcaggtggcattgcattgcaccaacggctcggtcgtgtaccatgaggtgctgaacgccatggaatgtaagtgctcgccaaggaagtgcagcaag

SEQ ID NO: 12472 - DNA, 8439 bp, Artificial Sequence
  derived and/or modified sequence
atgattcctgcacggtttgctggcgtcctcctggcactggccctgattctaccaggcaccttatgtgctgaaggaacccggggccgctcctcaaccgctcgctgtagcctcttcggctcagatttcgtcaacacctttgatggaagcatgtattctttcgcgggttattgctcttatctgctagccggaggatgccagaaaagaagtttttccattattggtgatttccagaacggaaaaagggtgagcctcagtgtctatcttggggagttctttgacatccatctgttcgtgaatgggactgtgacccagggcgaccagcgggttagtatgccttatgctagcaagggactgtatctggagacagaagctgggtattacaagctgagtggagaggcatacggttttgtggctagaatagatggttccggcaacttccaggtgctgttgtccgatcggtacttcaataagacatgtggcctctgcggaaattttaacattttcgccgaggatgacttcatgactcaagaaggaacactgacctccgacccgtacgacttcgccaactcatgggcgctgtcatcaggagaacagtggtgtgagagggcttccccccctagctcatcttgtaacatatcctctggggagatgcagaaaggactctgggagcagtgccaattgctgaagtctacctcagtgtttgcacggtgccacccattagtcgacccagagcccttcgttgcgctgtgcgagaagacactgtgtgagtgcgctggtggcttggaatgtgcctgccccgcattgctggaatatgcacggacctgtgcacaggagggcatggtgctgtatgggtggaccgaccattcggcctgcagcccggtatgtccggcagggatggaatacagacagtgcgtttcgccatgtgcgaggacatgccaatcattgcacattaatgagatgtgtcaggaacggtgcgtggatggttgttcctgtcctgaaggccaactgctagacgaaggtctctgcgtggaaagtactgaatgcccctgtgtccattcaggcaagcgatacccgcctggtaccagtctctctcgggattgcaatacatgcatctgtagaaacagccaatggatctgtagtaacgaggagtgtcctggagagtgccttgtgaccggccagtcacacttcaaatctttcgataaccgctattttacctttagtggaatctgccagtatctgctggctagggactgtcaggaccactcattctccatagtgatcgagacagtccaatgtgcagatgatcgcgacgccgtgtgtacaaggtccgtgactgtccgcctgcccggcctgcacaacagtcttgtgaaactgaagcatggtgcaggagttgccatggacggtcaggacgtgcagctgccgctgctcaagggtgaccttagaatccagcatacagtgacagcttccgtgcggttatcatacggtgaggaccttcagatggactgggatgggcggggtcggcttctggtaaaactctcccccgtgtacgctggcaaaacttgcggcttatgtggcaattataatggcaatcagggagatgactttctgactccatctggcctcgccgaaccaagggtggaagactttgggaacgcttggaagcttcatggggactgccaagacctgcaaaagcagcactcggatccgtgcgccctcaacccacgaatgaccagattttcagaggaagcctgtgcagtgctgactagtcctaccttcgaggcgtgtcaccgtgccgtgtcgccacttccgtatctgagaaattgtcggtacgatgtctgttcctgcagtgacgggcgcgaatgtctctgcggcgctctggcctcctatgccgccgcttgcgccgggaggggagttagggtggcatggagagaaccgggaaggtgtgagctcaactgtccaaagggccaggtttatttgcagtgcgggaccccctgcaatctgacatgtcgatctctgtcctatccagatgaggagtgcaatgaggcatgtttggagggttgtttctgtcctccgggtttgtatatggacgagagaggtgattgcgttcctaaggcacaatgcccatgttattatgacggggagatatttcaaccggaagacatcttcagcgaccaccatacgatgtgttactgcgaagacggcttcatgcactgcacaatgtccggcgtacctgggagcttattgccagacgctgtgctgtcctcccctttatcccatcgatccaaaaggagtctgtcctgccgcccgcctatggttaagctggtgtgcccagccgataatttgcgggccgaagggcttgagtgcactaaaacctgtcagaactacgatcttgaatgcatgtccatgggatgtgttagcggctgcctatgcccaccaggaatggtgcgtcacgaaaataggtgcgttgctctggaaaggtgcccttgcttccaccaaggaaaggagtatgcgcctggggaaacggttaagattggttgcaacacatgcgtgtgccaggacaggaaatggaactgtacagatcatgtctgcgatgcaacatgttcgacgatcggaatggcccactatctcacattcgacggcctgaagtacctgtttccaggcgagtgccagtacgtattggttcaggactactgcggctccaacccgggtacttttcgcattctggttggaaataagggctgctcacacccctcagtaaaatgcaagaagcgcgtgaccatcctggttgagggcggcgagattgagctttttgacggtgaggtgaatgtcaagcgccctatgaaagatgagacccactttgaggtggttgagagtggtagatacataatcctccttttagggaaggccctgtcagttgtgtgggatagacacctgtcaatcagtgtggttctaaagcagacttatcaggaaaaggtctgcggactgtgtgggaacttcgacggaatccagaacaacgacctgacgtcaagtaatctgcaggttgaggaggaccctgtggattttgggaattcatggaaggtgtcctctcaatgtgcagacacacgaaaggttcccctcgattcgagcccagccacttgtcataacaacatcatgaagcaaaccatggtggacagctcctgccggatcctgaccagcgacgtgtttcaggattgtaataagcttgtggatcctgagccctacctcgacgtctgtatttacgacacctgctcctgcgaatccatcggcgactgcgcctgcttctgcgacacaatagctgcttacgcccatgtctgtgcccagcacggtaaagtggtaacctggcggactgctactctctgtccccagagctgcgaggaacggaatttaagagaaaacggttacgaatgtgagtggcgctataactcctgtgctcctgcctgtcaggtgacgtgtcagcacccggagccgcttgcttgtcctgtacagtgcgtggagggttgtcacgcgcactgcccgcctggcaagattctggatgaattgcttcagacgtgcgtcgacccagaggattgccctgtatgtgaagtggcgggccgcagatttgccagcggtaaaaaggttactcttaatccctcagatcccgagcattgtcagatctgccactgcgacgtggttaaccttacttgtgaagcatgtcaggagcccggcggccttgtcgtccccccaacggacgcacctgtttcacctaccaccttgtatgtggaggatatttctgagccccccctccacgacttctactgctccagattgctggatctggtctttctgcttgatggatcttcacggctcagtgaggcagagtttgaagtgctgaaggccttcgtggtggacatgatggaaagactgcgcatttcgcagaaatgggtgagagtggccgttgtggaatatcatgacggaagccacgcgtacatcgggcttaaggaccgaaagaggccgtcagaactgcggagaatcgcttcccaggtgaagtatgcagggagccaggttgcctccacctcagaagtgctgaaatacacgttgttccagatttttagtaagatagatcgacccgaggctagtagaataaccttgctacttatggcttcacaggaaccacaacgcatgtcaaggaacttcgtgcgttacgtccaggggctcaagaagaaaaaagtgatcgtgatcccagtggggattggtccacatgctaatcttaagcaaattcggcttatcgagaagcaggctccggaaaataaggccttcgtcctgagttccgttgacgagttagaacagcagagagacgaaatcgtgtcttacctctgtgatctcgccccagaagccccccctcccacgctcccccctgacatggctcaagttactgtcggccccggcctgctgggggtgtcaaccctgggaccaaagagaaattccatggtgttggatgtcgccttcgtcctggagggttcagataagatcggggaagcagacttcaacagatctaaagagttcatggaggaagtgattcaacgaatggatgtgggacaggacagtatacatgtgactgttctgcagtatagttatatggtgaccgtggagtaccccttctctgaggctcagagcaaaggcgatattctccagcgggttagagagatacgttatcagggaggcaatcggactaacacaggcctcgcccttcgttacctgagcgaccactcttttttggtttcacagggcgatcgtgagcaggcccccaatttggtgtacatggtcacaggcaacccagccagtgacgaaattaagcgccttccgggcgatatccaggtggtcccaatcggcgtcggaccgaacgcaaatgtgcaagagctggagagaattgggtggcccaacgcccccatcttgatccaggactttgaaaccttaccgcgagaagctccagacctcgtgctgcagcgttgttgctcaggggaggggcttcaaattcccacgctctcacctgcccccgactgtagtcagccgttggacgtcatcctgctacttgatgggtcgtcttccttccccgcttcatatttcgacgaaatgaaaagcttcgccaaggccttcatctcgaaagcaaacatcggccccagacttacccaagtctctgtactgcagtacgggtcaataaccactattgatgttccgtggaatgtggtgcctgaaaaggctcatcttctgtctctggtagatgttatgcagagggaaggggggccctctcagataggcgacgctttgggatttgctgtgcggtatcttacatctgagatgcacggagcaagacccggcgccagcaaggctgttgtgattttggtgactgatgtgtccgtcgacagcgtggatgccgccgccgacgcggcccgctctaacagagtcacagtgtttcctatcggtatcggggacagatacgacgcagcccagctcaggatccttgcaggtccggccggggactccaatgtggtcaagctccagcggatcgaggatctgccgacgatggtcactcttggaaactcattcctgcacaagctatgttctggctttgtgcggatctgcatggacgaggacggaaatgagaagcggcctggagatgtttggaccctccccgaccaatgccatactgttacatgtcagccagatggtcagacgctgctgaagtctcaccgtgtgaattgtgaccgcggactaagaccatcttgccccaatagtcagtcacccgtcaaagtggaggagacttgtgggtgtagatggacttgcccatgtgtgtgcacgggatcatccacccggcatattgttacatttgatggccaaaacttcaagctcaccggtagctgctcgtacgtgttgttccagaataaggaacaggatctggaggtgattctacataatggtgcctgttccccgggagcccgccagggctgcatgaagagcattgaagtgaagcattccgcattatccgtggagctgcattctgatatggaggtgactgtaaacggacgccttgtttcggtgccttacgttggtggaaacatggaggtgaatgtgtacggagcaatcatgcatgaagtgcgcttcaaccacttagggcacattttcacatttaccccacaaaataatgagttccagctacagttgagcccgaagacatttgctagtaagacatacggcttatgcggaatatgcgatgagaatggagcaaacgatttcatgctcagagacgggacggttaccacagactggaaaaccctagttcaggaatggactgtccagaggcccggccagacctgccagcctatcctggaggagcagtgcctggtgcctgactcaagtcactgtcaagtcctactgttgcccttgttcgcagagtgtcacaaggtactggctcccgccacattttacgccatctgtcagcaggattcctgccatcaggagcaggtgtgcgaagtaattgcctcatatgcccacctttgtagaacgaatggtgtgtgcgtggactggcggactcctgatttctgcgctatgtcctgcccaccctccctagtatacaatcactgcgaacacgggtgtcctcggcactgcgacggcaatgtgtcctcatgcggggaccatccgtctgaaggctgcttctgtccaccggataaggttatgcttgaaggcagttgtgtcccggaagaggcctgtactcagtgtatcggcgaagatggagttcagcatcagtttctggaggcttgggtgccagatcatcagccctgccaaatctgcacctgtctcagcgggagaaaggtaaattgcaccacccaaccttgtcccaccgccaaagccccaacatgtggactctgcgaggtcgcccggttacgacagaatgccgatcagtgttgcccagagtacgaatgtgtatgtgatcccgtgtcatgcgatttaccacccgtcccacactgtgagaggggccttcagcccactttaacgaaccccggtgagtgccggcccaatttcacctgcgcctgccggaaagaggagtgcaagagggtgagtccgcctagctgtccccctcatcggctcccgacgttacgcaagactcagtgctgcgacgagtacgagtgcgcatgcaattgtgtaaattccaccgtcagctgccctctcgggtatcttgctagcactgccacaaatgattgcgggtgcactaccacaacatgccttccagataaagtgtgcgtacaccgatctacaatttacccggtcggccagttctgggaggaaggatgcgacgtctgcacctgcacagatatggaggatgctgttatgggcctgcgtgtcgcccaatgttcccagaagccctgtgaagattcatgccgatctgggtttacgtacgtcctccatgagggagaatgctgtgggcgctgtcttccaagtgcctgtgaagtcgtcacaggatcccctcgcggtgactcccaaagctcatggaagagtgtggggtctcagtgggcttctcccgagaacccatgtctgatcaatgagtgcgtgcgcgtcaaagaggaagtctttatccaacagcgaaatgtctcctgtccccagctagaggtgcccgtgtgtccctctgggtttcagctgtcatgcaaaacgagtgcgtgttgcccgtcctgtcgctgcgagcggatggaggcctgcatgctgaatgggactgtgattggtcctggcaaaacagttatgatcgacgtttgtaccacctgccggtgcatggtgcaggtgggcgtgataagtggattcaaacttgaatgtaggaagactacatgcaacccatgtcccctgggctacaaggaggagaataacacaggggaatgctgcggaaggtgcctgccgacagcttgtacgatccagctgaggggtggtcagattatgacccttaagcgggacgagacactccaggatgggtgtgacacccatttctgtaaggtgaatgaacggggcgaatacttctgggaaaaacgggtgacgggttgtccacctttcgacgaacacaaatgcttggcagaggggggtaagattatgaaaatacctggcacatgctgcgatacgtgcgaggagccggagtgcaatgacattaccgcccgtctacagtacgtgaaggtaggatcctgtaagtcagaggtcgaagtggacatccactattgccaaggcaaatgcgcctctaaggcaatgtattcaatagacattaatgacgtgcaggaccagtgtagctgttgctcccctaccaggaccgagcccatgcaggtggccttgcattgcaccaatgggtcagtagtttaccacgaagtgctcaacgcaatggaatgtaaatgcagcccgcgaaagtgcagcaag

SEQ ID NO: 12473 - DNA, 8439 bp, Artificial Sequence
  derived and/or modified sequence
atgatcccagctagatttgcgggcgtgttgctagccctcgccctgatactgccaggaacactttgcgcagagggcaccagaggaaggagctcaactgctaggtgttcactctttggatcagacttcgtgaataccttcgatgggtctatgtattccttcgcgggctattgcagttatctgctggccgggggctgtcaaaagagatccttctcgattatcggtgacttccagaatggaaagagggtctcgttaagcgtgtatctgggggagttttttgacattcatttatttgtgaacgggactgtcacccagggtgaccagagagttagtatgccatatgccagtaaggggctatatctggaaacggaggctggatactataaactaagcggagaagcctatggcttcgtcgccaggatcgatggtagcggcaacttccaggtgctcctcagcgaccgctactttaacaaaacttgcgggctatgcggcaactttaacatctttgccgaagacgattttatgacacaggaaggaaccctgacctctgacccatatgactttgcgaacagctgggctctgagtagcggagagcagtggtgtgaaagggccagtccacccagtagtagctgcaatattagctccggagagatgcagaagggtctgtgggagcaatgccagctactcaaatcgacttccgtattcgccaggtgccaccctttggtggatcccgaaccatttgtggccctgtgcgaaaaaaccctctgcgagtgtgcaggggggctggagtgtgcctgccctgctttgctggagtacgccagaacatgtgcacaagaaggcatggtattgtatggctggactgatcactccgcatgctcgcctgtgtgtcctgctggcatggaataccgacagtgtgtttctccatgcgccaggacctgtcagtccctgcatattaacgagatgtgtcaggagaggtgcgtcgacggctgtagctgtccagaaggacagttgctcgacgagggtctttgcgtagagagtacggagtgtccctgcgtgcattcaggaaagaggtaccctcctggtacaagcctttctcgagactgcaatacctgcatttgtcggaattcgcagtggatttgcagcaacgaagaatgtccaggcgaatgcctggtaacggggcaatctcattttaagtccttcgataatcgatacttcaccttctctggaatctgccagtatcttctagcccgagattgtcaggaccactcattctctattgttattgagactgttcagtgtgccgacgaccgtgacgccgtatgcacaaggtctgttactgtgagactcccgggactgcacaacagcctcgtgaagttaaaacacggcgcaggtgtggccatggacggccaggatgtacagttgcctttgctcaaaggtgatctccgaatccagcatacagtaacagcatcagtacgtctgtcctatggggaggatttgcagatggactgggatggaagaggaagacttcttgtcaagctatcgcctgtgtacgcagggaagacctgcggattatgtggcaactataacgggaatcaaggcgatgacttccttacgccgagcggactcgcagaacctcgagttgaggacttcggcaacgcctggaagctccatggggattgtcaggacctacaaaagcagcattctgatccctgcgccctgaaccctcggatgactaggttttcggaagaagcttgcgccgtactcacatctcctacatttgaagcctgtcacagagctgttagccctctcccctacctgcgaaactgcaggtatgacgtgtgttcctgttccgacggcagggaatgtctctgtggtgctctcgccagctacgctgccgcttgcgctggccgaggggtgcgagtggcttggcgagaacctgggcgatgtgagctgaattgcccaaaaggccaggtatacttacagtgcggtaccccatgcaatcttacatgtcgaagtctttcctatccagacgaggaatgcaacgaggcctgcctggaaggatgtttttgcccccccgggttgtatatggatgagcgaggggattgcgtgcccaaggcacagtgcccctgctactatgacggcgaaatctttcagccagaggacatttttagcgaccaccacacgatgtgctactgcgaagatgggttcatgcattgcaccatgagcggtgtgcccgggtccttgcttcctgatgccgtcctgtctagcccactgtcccacaggtctaagagaagcctgagttgtcgtccaccgatggtgaaactggtttgccctgcagataatctgagagccgagggcctcgagtgcaccaaaacttgccagaattacgatttggagtgcatgagcatgggatgtgtttccgggtgcctctgcccacccggaatggtgcgacacgagaatagatgcgtagcattggagcgatgtccttgcttccatcagggcaaggagtacgcccctggtgagacagtaaagatcggctgcaatacatgcgtgtgccaggataggaaatggaactgcacagaccacgtgtgtgacgctacgtgttcaactatcggaatggcccattacctcacattcgacggactcaagtacctctttcccggcgagtgccaatacgtgctggtccaggattactgtgggtctaaccctggcacattccgtatcttagtgggtaacaagggatgctctcacccttcagtgaagtgcaagaagagagtgacgattctggtggaggggggagagatagagcttttcgatggagaagtgaatgtgaagagacctatgaaggacgagacccatttcgaagtcgtggagtccggcagatacatcatcttgctgctggggaaagctctgtcggtagtctgggatagacacttaagtatctccgtggtactgaaacagacttaccaagagaaagtctgtgggctctgcgggaactttgatggaattcagaacaacgatctgacctccagtaatctgcaggtagaggaagaccctgtcgatttcgggaattcttggaaggtatcttcccagtgcgccgatactcgtaaggtaccactggacagttcacccgcaacttgtcacaacaatattatgaagcagactatggttgatagctcctgcagaatcctaacatcggacgttttccaggattgcaacaagctggtcgatccagaaccctacctcgacgtgtgtatctatgacacatgttcctgcgagtccatcggcgactgtgcttgcttctgtgacaccatagcggcttatgcccacgtttgcgcacaacacgggaaggtagttacctggcgtaccgccaccctgtgtccccagtcctgtgaggaacgtaatctgcgggagaatggatacgaatgcgagtggagatacaatagctgtgcccccgcatgtcaagtgacttgccaacatcccgaacccctggcatgtcctgtgcagtgcgtggaaggttgccacgcgcattgtccccctggaaagatactcgacgaactgttacagacctgtgtcgacccagaagattgcccagtgtgtgaggtggcaggcagacgatttgcgtcaggaaaaaaggttaccttgaatccttctgatccagagcattgtcagatatgtcactgcgacgtcgtgaacctgacttgcgaagcctgccaggagccaggtggcttagtggtcccccctacagacgctcctgtatcccctaccactctgtacgtggaggacattagcgaacctccgctccacgacttctactgcagccgcctcctcgatctcgtatttctgctggacggatcaagtcgactttccgaagccgagtttgaagtgttaaaagcattcgtggtcgacatgatggagaggctccgaatctcccagaagtgggtgagggtcgcggtcgtagagtaccatgatggtagtcatgcttacatcggactgaaggacagaaaaaggccaagcgagctgaggcgtatcgcctcacaggttaaatatgccggtagtcaggtcgcatcgacatccgaagtgcttaaatatacgcttttccagattttctcgaaaatcgataggcccgaggctagccgtataacgttgttgctgatggcgtcacaggagcctcagagaatgtcacgaaacttcgtgcggtatgtccagggccttaaaaagaaaaaggttatcgttattccggtgggcattgggccccatgcaaacctgaagcagatcaggcttattgaaaagcaggcccctgagaacaaggcttttgtgctgtcatccgtcgacgagctggaacagcagagagatgagatcgtcagctacctttgcgacctcgcccccgaagccccgccacccacattgccccccgacatggcccaagtcaccgtgggccccggactgctgggtgtctccactttgggtcccaaaagaaactcgatggtccttgatgtcgctttcgtcctggaaggctctgataaaatcggcgaagctgatttcaaccgcagcaaagagttcatggaagaggtcatccaaaggatggatgtgggtcaggatagcattcacgtcactgtcttgcaatatagttatatggtgactgtagaatacccattttccgaagcacagtcaaagggagacattttacagcgcgtaagagagatccgttaccagggcgggaaccggaccaacactggactggccctacggtacctgagcgaccacagcttcttggtctctcagggggacagagaacaagcgcctaatttggtgtatatggtgacgggcaacccagcctcggacgaaatcaagcggctcccaggggacattcaagtggttcctataggcgtgggcccaaatgccaatgtacaggagctcgaaagaataggatggccgaatgctccaattctcatccaagactttgagactctgccccgagaggcaccagatctggtcctacagcgatgctgctcaggagaggggctccagatcccgaccctgagtcccgcgccagactgtagccagccccttgacgtgattcttctgctggatgggagctcctcatttcctgcatcttactttgacgagatgaagtcatttgcgaaggcctttatatccaaggccaacattggccctcgtctgacccaggtgagtgtgctgcagtatggcagcatcaccaccatcgatgtgccctggaatgtggtaccggagaaagcacatctgttgtccctggttgatgttatgcagagagaggggggaccctcccagatcggcgacgctctgggctttgctgtccgctaccttacttctgaaatgcatggtgcgaggcctggcgccagcaaagcagttgtgatcctagtcaccgacgtatctgtggatagcgttgatgccgcagcagacgccgcccgttcaaatagggtgactgtcttccccatagggataggggacagatacgacgcagcccagctgaggatactggccggccctgccggcgatagtaacgttgtgaagctgcaacgcatcgaggatctaccgaccatggtgactctcggcaactcgtttctccacaagctgtgttccggcttcgtcagaatctgcatggatgaagacggaaacgaaaagcgacccggcgacgtttggactctgcccgaccagtgccacactgttacttgtcagcctgacggccagacattgcttaagtctcatagagttaattgtgacagaggcctgagacctagctgtccaaatagtcagagtcctgtgaaagtggaagaaacttgtggttgccgttggacgtgcccttgcgtttgtacaggttcttctacacggcacattgtaacgttcgacggccagaatttcaaacttacgggcagctgtagctatgtgctgttccagaacaaagaacaggacctagaggtgatcctccataacggcgcatgcagtcctggcgctagacagggatgtatgaagtccatcgaggttaagcactccgccctgtcagtcgagctccactctgacatggaggtcaccgtcaacggacggctcgtatctgtgccctacgtgggaggtaatatggaggtgaacgtctacggtgcgatcatgcacgaggtgaggttcaaccatttgggtcatatctttacattcacaccccaaaataacgagtttcaactgcaattgagccccaaaaccttcgcatcgaagacctatggactgtgtggaatatgcgacgaaaatggggccaacgacttcatgttacgagatggaactgtgacgacagattggaagacgttagtgcaagagtggactgtgcagcgacctggccaaacctgccagcccattctcgaggagcagtgtctggtgcctgattcttctcattgtcaggtgctgctactgccactcttcgctgagtgccacaaagtgcttgcacctgcaacattctatgctatctgtcaacaagattcgtgccaccaggaacaggtctgcgaggtgatcgccagctacgcgcacttatgcaggacaaatggcgtgtgtgttgactggcgtactccggatttctgcgcaatgtcttgtcctccgtcccttgtctacaatcactgcgaacacggttgccccagacactgtgacggcaatgtgtctagctgtggtgaccacccatccgagggctgtttttgtccacctgacaaggtgatgttggaaggctcttgcgttccagaagaggcctgtacacagtgtattggggaagatggggtgcagcaccaatttctggaggcttgggtcccagaccaccagccctgtcagatctgtacctgcctcagtggtcgaaaagtgaattgtaccacgcagccgtgcccaacggcaaaggcccccacgtgcggcctttgtgaagtggccagactgaggcagaacgccgaccagtgctgcccggaatacgagtgcgtttgcgatccagtgagttgtgatctgccccctgttccccactgcgaaaggggacttcaacctacattaacaaaccccggcgagtgccgacctaatttcacatgcgcctgccgaaaggaggagtgcaagcgcgtcagtccaccgtcctgcccacctcaccgccttcccaccctccgaaagactcaatgctgcgatgagtacgaatgtgcgtgtaattgtgttaacagcacagtgagttgtccgcttgggtatcttgcctctaccgctaccaatgattgcggctgtacaaccacaacctgtctcccagacaaggtgtgcgtccacagaagtacgatctacccagttggacaattctgggaggaaggctgcgacgtctgcacctgcacagacatggaggacgctgtcatgggcttgagggtggcccagtgctcgcagaagccttgcgaggactcctgccgtagcggattcacatatgttctgcatgaaggcgaatgctgcgggaggtgcctcccttcagcatgtgaagttgttacggggagtcccagaggagacagtcagagcagctggaagtcagtaggtagccagtgggccagcccggagaacccttgcctcataaatgagtgcgtgcgagtcaaggaagaggtgtttatccagcagagaaacgtgagttgtccccagctggaggtgcccgtctgtccctctggtttccagctttcctgtaagacttcagcatgttgtccttcctgccgctgcgaaagaatggaggcctgtatgctgaacggtaccgtaatcggccccggtaagactgttatgatcgatgtttgcactacctgtcgatgcatggttcaagtgggcgtgatttccggctttaagttggaatgcaggaagacgacttgtaacccatgcccacttggctacaaagaggagaacaatactggagagtgttgcggcagatgcctgcctacggcatgtaccattcagctacgaggaggccagattatgaccctgaaacgagatgagacactgcaagatggctgcgacactcatttctgtaaggtgaacgagcgaggcgagtacttttgggagaaaagagttacaggctgcccccctttcgatgagcataagtgcctggcggagggaggaaagatcatgaaaattcccggcacctgttgcgacacatgtgaagagccggagtgtaatgatatcaccgctagactgcagtacgtgaaagtcggttcctgtaaatcggaggttgaagtggacatccattactgccaaggcaagtgcgcatctaaagccatgtatagcattgacatcaatgatgttcaggatcaatgttcttgttgcagccccacgaggaccgaacccatgcaggtggcattacattgcaccaatggtagtgtggtgtaccatgaggttttgaatgctatggagtgcaaatgttcacctaggaagtgtagcaaa

SEQ ID NO: 12474 - DNA, 8439 bp, Artificial Sequence
  derived and/or modified sequence
atgattcctgcccgttttgcgggtgtgctgcttgctctggcccttatactgcctggcacactgtgtgcggaaggcacccggggcaggtcatctacagctcgatgctctttgtttggctctgattttgttaacacatttgatggctccatgtactccttcgcgggctactgctcatacttgcttgccgggggatgccagaagcgttcctttagtatcataggcgattttcagaacggcaaacgggttagcttgagtgtttatctgggggagttcttcgatatccacctgttcgtgaacggcaccgtgacccaaggcgaccagagggtgtccatgccctacgcctccaaaggtctgtacctagaaacggaggctggatattataagcttagcggagaggcctacggctttgtggcccggatcgacggatctggaaacttccaggtgctcctgtccgacagatattttaacaaaacatgcggtctctgcggtaactttaacatcttcgccgaagatgatttcatgacccaggaagggacccttacttcagacccttacgacttcgcaaattcatgggcactgtcttccggtgaacaatggtgcgaacgcgcctcaccccccagttcctcatgcaacatctctagcggagagatgcagaagggactgtgggagcagtgccaactgctcaaatctacaagtgtgttcgctaggtgtcatcctcttgtggacccagaaccatttgtggccttatgtgagaagactctttgcgagtgcgccgggggcctggagtgtgcatgcccagccctgctcgagtatgccagaacttgtgcccaagaaggaatggttctctatggatggactgaccattctgcctgcagccccgtgtgcccagccggcatggagtatcgccaatgtgttagcccttgcgcgcgaacctgtcagtccctacacattaatgaaatgtgccaggaacgttgcgtcgatggatgcagctgccccgaaggccagttacttgacgaaggcctgtgtgtggagtcaacggagtgcccatgcgtgcactctgggaagcgttatccccccgggacttctctatcccgtgattgcaatacctgcatttgtcggaactctcagtggatctgctctaatgaagaatgccctggcgaatgcctggtcactggccagagtcacttcaaatcttttgataatcggtacttcacgttttctggcatctgccagtacctcctagcgcgggattgccaggatcacagtttttccatcgtaatagagacagtgcagtgtgcggatgacagggatgctgtttgtacccgctctgtgacggtccggctcccagggctgcacaattcacttgtcaagcttaagcatggggcaggggttgccatggatggccaggatgtccagctgccccttctgaagggagatttgagaatacagcacacagttacggcatctgtacgcctgagctacggagaagatctgcagatggactgggacggccgcgggaggctcctcgttaaattaagcccggtgtacgctggaaagacctgtggactgtgtggaaattataatggaaatcagggcgacgactttttgacaccatccggattggccgagccacgggttgaagatttcgggaacgcttggaaacttcacggcgattgccaagacctgcagaagcaacacagcgatccctgcgcactaaacccaaggatgaccaggttcagcgaggaggcttgtgcagtgcttacgagtcctactttcgaggcttgccaccgtgcggtgagtcctctgccgtacctgcggaattgtcgatacgatgtgtgttcatgttcagatggacgggagtgcctgtgtggcgctctcgcatcatatgctgctgcatgtgccggtagaggcgttcgcgtcgcttggagggaaccaggccggtgtgaactcaattgccccaagggacaggtatacctgcaatgcggcacaccatgcaacctcacctgtaggagccttagctacccagatgaggagtgcaacgaggcatgtttggagggctgtttttgtccgcctggtttgtatatggacgaacggggtgactgcgtgccaaaggcacagtgtccgtgctattatgacggagagatttttcagcccgaggacatttttagtgaccaccataccatgtgttattgtgaggatggctttatgcattgtactatgtctggtgtaccaggaagcctgctgcccgacgcagtactaagctcaccccttagccaccggagtaagaggtcgctgtcctgcaggcctcctatggtcaagttggtgtgccccgcagacaatctgagggcggaagggctggaatgtactaagacctgtcagaactacgacctggagtgcatgtctatgggatgtgttagcgggtgtctgtgccctccggggatggtacggcacgagaatcggtgcgtcgcattagagagatgcccatgtttccatcagggcaaggagtatgcaccaggcgaaaccgtaaaaatcgggtgtaacacgtgcgtgtgtcaggatagaaagtggaactgtacggatcatgtttgcgacgcaacctgcagtaccataggaatggctcattacttaactttcgatggtctcaagtacttgttccctggtgagtgtcagtacgtactggtccaggattactgcggatccaatcccgggactttccgcatcctcgtggggaacaagggctgctcacatccctcggtgaagtgtaaaaagcgcgttacaatcctggtggaggggggtgagattgaattatttgacggagaagttaatgtgaagagacctatgaaggatgagactcatttcgaggtggtggagtccggacgctacatcattttgctactgggaaaagccctgtcggtggtgtgggaccggcacctcagcatatcggtcgtcctgaaacagacctatcaggagaaggtgtgcggcctctgcggtaattttgatggaattcaaaacaacgatcttacttcatctaatctgcaagttgaggaggatccagtggactttgggaattcctggaaggtgtccagccaatgtgctgatacccggaaggtaccactggacagttctccggctacgtgccataataacatcatgaaacagaccatggttgattccagctgcaggatcctgacatcagacgtcttccaggattgcaacaaacttgtggatcctgaaccttacttggatgtatgtatctatgacacttgtagctgcgagagcattggtgactgcgcctgcttctgcgatacaattgctgcctatgcccatgtgtgtgctcagcatggcaaagtggtgacctggagaacagcaacactatgtcctcaatcctgtgaggaaagaaacctgcgtgagaatggatatgagtgtgagtggcgttataacagctgtgctccagcatgccaagtgacgtgccaacacccagagccacttgcatgccctgtgcagtgtgttgaaggctgccacgcccattgtccacctgggaaaatcctggacgagctgctgcagacatgcgtggaccccgaggattgcccagtgtgcgaagtcgccggccgacggtttgcctctggcaagaaagtgactctgaacccatcagatccagaacattgtcagatttgccattgcgacgtggttaatctgacttgtgaggcctgccaggagcccgggggattagtcgtccctccgacagatgccccagtttctccaacaaccctttacgtcgaggacatctcagagccccccctgcacgacttttattgctctcggctgctcgatctcgttttcttactggatgggtctagcagattatccgaggctgaattcgaggtgctcaaagccttcgtcgtcgatatgatggagcgcctgcggataagccaaaagtgggtgcgggtcgccgtggtggagtatcatgacgggagccacgcatatataggacttaaggatagaaagcggccatctgagctgcgccgtatcgcctctcaggtgaagtacgcgggatcccaagtggccagcactagtgaggttctcaagtatacccttttccagattttcagcaaaatagataggccggaagcttctagaatcaccctgttgctgatggccagtcaggaaccacagagaatgagcagaaattttgtccggtatgtgcaaggcctgaaaaagaaaaaggtaattgtgatcccggtgggcatcgggcctcacgccaatcttaaacagatcagacttattgaaaagcaagcgccagagaacaaggcttttgttctgtcgtccgtggacgaattagaacagcagagggatgagattgtgtcatatctctgtgacctcgccccagaggcacccccaccgactctcccgccagacatggcacaggtgaccgtgggacctgggttgctgggggtatccaccctgggaccaaaaagaaacagcatggtgctggacgtagctttcgtcttagaaggctctgataagatcggcgaagcggatttcaaccgatccaaggagtttatggaggaggtgatccagcggatggatgtaggacaggattccatccacgtgaccgttctccagtatagctatatggtaaccgtggaataccccttcagcgaggcgcagtccaagggcgacatcctgcaaagggtgagggaaatacgatatcagggcggtaacaggactaacacaggtttggctctcaggtatttgagcgaccatagtttcttggtgtctcagggtgatcgagagcaggctccaaacctcgtgtacatggtgacgggtaatcctgcttccgacgagatcaagcgactgcctggcgatatccaggtggtaccaatcggggtaggcccgaacgcaaacgtgcaggagctagagagaatcgggtggcccaatgcacctattctcattcaggatttcgagaccctcccaagagaggcccctgacttggtactccagaggtgttgctcaggtgaaggtttacagatccccacactgagccccgcaccggactgctcacaaccactggacgtgatattattattagacggcagcagcagcttcccggcctcttatttcgacgaaatgaagtcctttgcaaaagcttttataagtaaagccaatatcgggcctagactgacacaggtgtcagtgctgcaatatggctccattaccacgattgatgtgccttggaacgtggtgcccgaaaaggcgcatctgctgtcccttgtcgacgttatgcagcgggagggaggccccagtcagatcggagacgccctggggttcgctgtgcgatatttgacttccgagatgcacggcgcacgcccaggagcatccaaagcggtggttattcttgtgacagacgtgagcgtggattcagtggatgccgcagccgatgcagctcgatcaaaccgtgtgaccgtattcccgatcggaataggcgatagatacgacgcggcccagctccggattctggccggcccagcgggagacagcaacgtcgtcaagctgcaacggattgaagatctccccacaatggttactttaggaaatagttttctacacaagctctgcagcgggtttgtacgaatttgcatggacgaagatgggaatgaaaagagacctggcgatgtgtggacactgcctgatcaatgccacactgtgacctgccaaccggatggacagacactcttgaagtcacatagagtcaactgtgaccgcggcctgcgtccgagctgtcctaactcccagtctcccgtgaaggtggaagagacttgtggttgccgctggacatgtccatgcgtttgcactgggagctcgaccaggcatatcgtgacgttcgatggccaaaactttaaattgaccggctcctgtagctatgttttgttccagaacaaagagcaggatcttgaggtgatactccacaacggagcttgttcaccgggcgctcgacaagggtgtatgaaaagcattgaggtgaaacacagtgctctgagcgtagagctacactcggacatggaggtaactgtgaacggacggcttgtgtctgtcccatacgtcgggggaaacatggaggtgaacgtttatggtgctatcatgcacgaggtaagattcaaccacctcggtcatattttcacttttacaccgcagaacaacgagtttcagctccagttgagcccaaagactttcgcatccaagacatatgggctctgtggaatctgtgatgagaatggagcgaacgactttatgctccgggatggaaccgtaaccacggactggaaaaccctggtgcaggaatggactgtgcagagaccgggccaaacctgccaacctatccttgaagaacaatgcctcgtgccagattctagccactgtcaggtgctgctgcttcccctgtttgcagaatgtcacaaggtgcttgctccggccaccttctatgccatttgtcagcaagacagttgccaccaagagcaggtgtgtgaagtgatcgcctcttatgcgcatctgtgtcgcaccaatggggtatgtgtcgattggcgcacaccggacttttgtgccatgagttgtcctccgtcactggtctataaccactgtgaacatggttgcccgcgccactgcgacggcaacgtctcatcttgcggagaccatccgtccgaaggctgtttctgtccgcccgacaaagttatgcttgagggtagctgtgtgcccgaggaggcatgcacccaatgcatcggtgaggacggcgtgcagcatcaattcctggaagcttgggtgcccgatcaccagccctgccaaatctgtacatgtctcagcggtcggaaagtgaactgtactacacagccttgcccaacagcaaaagctcccacatgtggcctgtgcgaagtggcccggctccgccagaatgccgatcagtgttgccctgagtacgagtgtgtctgcgatcccgtgagttgtgacttaccgccagttcctcactgtgaacgtggccttcaacctacactgacaaatccaggtgaatgtcgtccgaatttcacctgcgcatgtaggaaagaagagtgcaagcgggtctcccccccctcatgtcctcctcatcgcttacccaccctgcgcaaaacacaatgctgcgatgaatacgagtgcgcttgcaactgcgtgaactcgactgtctcgtgtccccttggatatctggccagcactgcaactaacgactgtggttgcacaacaacaacatgtctacctgacaaggtttgcgtccatcgaagtaccatctaccctgtcggacagttttgggaagagggctgtgacgtatgtacctgcactgacatggaagacgctgtcatgggactccgcgttgcccagtgtagccaaaagccctgcgaagactcctgcaggagcgggtttacatatgtgctgcatgagggggagtgctgcggtagatgcctgccttctgcctgtgaagtggttactggtagtccccgtggcgactctcagagcagctggaagtccgtgggctcccagtgggcctctcctgaaaacccttgtctgattaatgaatgtgtgcgtgtgaaggaggaggtctttattcagcaacgaaatgtgtcttgcccacagttagaagtgcctgtgtgcccatcggggtttcagctgagttgcaagacttcggcttgttgtcccagctgccgctgtgagaggatggaagcgtgcatgttgaatgggacggtaattgggcctggcaagacagttatgattgatgtgtgtactacctgtcggtgcatggtgcaggtgggtgtgatttccgggtttaaactggagtgcaggaaaactacctgcaacccttgcccactggggtataaagaagaaaacaacacgggcgagtgctgtgggcgatgcttgcccacggcttgtactattcagcttaggggaggacagataatgactctaaagcgggatgagactctgcaagatggctgtgatacccacttctgcaaagtgaacgaaagaggcgagtatttctgggagaagcgagtcaccggctgtcctcctttcgatgagcacaagtgcctcgctgaggggggtaagataatgaaaatcccggggacttgctgtgatacatgcgaagaacccgaatgcaatgatataactgccagacttcaatatgtgaaagtcggcagctgtaagtccgaggtagaagtggatattcattactgccagggcaaatgcgcatctaaggccatgtacagtatcgatattaatgacgtgcaggaccaatgctcttgctgttcgcctacacgaacagagcctatgcaagtcgctctgcattgtacaaatgggagtgtggtttaccacgaggtacttaatgccatggaatgtaagtgcagccctcgcaagtgttctaag

SEQ ID NO: 12475 - DNA, 8439 bp, Artificial Sequence
  derived and/or modified sequence
atgatacctgcacggttcgcgggagtgctgctggctctggcgttgatcctgccgggcaccctttgtgccgaagggacccgcggacgctcctcgaccgcgaggtgctcccttttcggatcagatttcgtgaatactttcgacggtagcatgtactccttcgctggctactgctcatacctgctcgcgggcggttgccagaagaggtcgttctcaatcatcggggacttccagaacggtaaacgcgtgagcctgtcagtttaccttggcgagttcttcgacattcatctcttcgtgaatggaaccgtgacccaaggcgaccaaagggtttccatgccttacgcctctaagggcctgtatctggagactgaggccggctactacaaactctccggcgaggcctacggtttcgtagcgcgcattgatggatcaggtaacttccaggtgctgctgtccgatagatacttcaataagacgtgcggactctgcgggaactttaacatctttgcggaggacgacttcatgactcaggaaggcaccctgacttcggacccgtacgactttgccaatagctgggccctgtccagcggagaacaatggtgtgagcgggcctcgccgccttcctcctcatgcaacatttccagcggagagatgcagaagggactgtgggagcagtgtcagctgctgaagtccacttccgttttcgcccgctgtcaccctctggtagaccctgaacctttcgtggctctgtgcgaaaagacgctctgtgagtgcgccggcggactggaatgtgcatgtccggctctgctggaatacgcccggacttgcgcccaggagggcatggtgctgtacggttggacggatcattcagcgtgtagcccggtttgtcctgcggggatggagtatcgccaatgcgtctccccgtgcgcgcggacctgccaaagcctgcacatcaatgagatgtgccaggagcggtgcgtcgacggatgctcgtgccctgaaggacagctgctggatgagggactctgcgtcgagtcgactgaatgcccgtgcgtccactcgggaaaaagatacccgccgggaacctcactctcgcgcgattgtaacacttgcatctgtcggaactcacagtggatctgcagtaacgaagaatgtccaggcgaatgcctcgtcaccggccagtcgcacttcaagagctttgacaaccgctactttactttctcagggatctgtcaatacctgctggcgagagattgccaggaccatagtttctcgatcgtgatcgagactgtccagtgcgccgacgaccgggatgccgtgtgcactcggtccgtgactgtgaggctgccgggactgcataactccctcgtgaagttgaagcacggcgccggggtggcgatggacggacaggatgtgcagcttcccctgctgaagggagacttgagaattcagcacactgtgactgcatccgtgcgcctgtcgtacggcgaagatctccagatggactgggatggacgcggccgcctgctcgtgaaactttcaccagtctatgctggaaagacttgcggactgtgtggaaactacaacggaaaccaaggcgacgactttttgactccgtctggactggctgagccacgggtggaagatttcggaaatgcctggaagttgcacggagactgtcaggacctccaaaagcagcacagcgatccctgcgctctcaaccctcgcatgactaggttttcggaagaggcgtgcgccgtgttgacctccccgaccttcgaagcctgccaccgcgcagtgtcgccgctcccttaccttaggaactgcagatacgacgtgtgctcgtgctcggacggacgagagtgcctgtgtggggcgctcgcatcatacgcggcggcgtgcgccggtcggggtgtgagagttgcatggcgcgagccgggccggtgtgagctcaattgcccgaagggacaggtctacctccagtgcgggactccctgtaacctcacctgcagaagcctttcgtaccctgatgaggaatgcaatgaagcctgcctggagggatgcttctgccccccgggcctctacatggatgagcgcggggactgcgtgccaaaggcgcagtgcccttgctactacgacggcgagattttccagccagaggacatcttctccgatcatcataccatgtgctactgcgaagatggtttcatgcattgtaccatgtcgggagtccccggatcgctgttgccggatgcggtcctgtcgtcgccattgtcgcaccggtctaagcgctccctctcctgcaggccacctatggtcaaactggtctgcccagctgataacctcagggccgaagggctcgagtgcactaaaacctgccaaaactacgatttggagtgtatgtctatgggatgcgtgtccggttgcctgtgcccgcccggaatggtgcgacatgagaaccggtgcgtggcactggaaaggtgcccttgctttcaccaaggcaaagaatacgccccgggagaaactgtgaaaatcggctgtaacacgtgcgtgtgccaggatagaaaatggaactgcaccgaccacgtgtgtgacgcgacctgcagcaccatcggaatggcgcattacctgactttcgacggactcaagtacttgttcccgggagaatgccagtatgtgctcgtccaggattactgtggatccaacccaggaacctttcggatcctcgtcggtaataagggctgttcccacccctctgtcaagtgcaaaaaacgggtcaccatcctggtggagggcggtgaaatcgagctctttgacggcgaagtcaacgtgaagcgccctatgaaggacgaaactcattttgaggtggtcgaaagcggtagatatatcatcctgctcctcgggaaagcgctgagcgtggtctgggacagacacctttcgatcagcgtggtgcttaagcaaacttaccaagagaaagtctgtggtctttgcggtaacttcgacggcatccagaataatgacctcacttccagcaacctgcaggtggaggaggacccggtggactttggcaatagttggaaagtgtcgagccagtgtgccgacactcggaaggtccctttggattcatcgcccgctacctgccacaacaatatcatgaagcagaccatggtggattcgagctgcaggatcctcacttcggatgtgtttcaggattgtaacaagctggttgatcctgagccgtaccttgacgtctgcatttacgatacctgttcgtgcgaatcgatcggagactgcgcttgcttctgcgataccatcgcagcttacgcccacgtctgtgcgcaacatggaaaggtggtgacctggagaaccgcgactctttgcccacagagctgcgaggaacggaatctgcgcgagaacggatacgaatgtgaatggcgctacaacagctgcgcaccggcctgtcaagtgacgtgccagcacccggagcccctcgcctgcccggtgcagtgtgtggaaggatgccatgcccattgccctccagggaagatcctcgacgagctcctccagacgtgcgtggacccggaagattgccctgtgtgcgaggtggcgggccggcgcttcgcctcagggaagaaggtgaccttgaatccatcggacccagagcattgccagatttgccattgcgacgtcgtgaacctgacttgtgaggcgtgccaggagccgggagggctcgtggtgcctcccactgatgcaccggtgtcccccactactctgtacgttgaagatatctcggagccaccgctgcatgacttctactgctcgcgtctgcttgacttggtgttcctgctggacggctcctcacggctgtcagaggcggagtttgaagttctcaaggcattcgtggtggacatgatggaacgcctgaggatctcccaaaagtgggtgcgggtggcggtggtggaataccacgacggatcgcatgcctacatcggcctcaaggatagaaaaagaccctccgagctccggcggatcgcatcccaggtgaagtacgccggaagccaggtggcctcaacctccgaagtgctgaagtacaccctgttccagatcttcagcaagatcgacagaccggaggcctcaagaatcaccctgctgctgatggcgtcccaggaacctcagcggatgtcgcgcaacttcgtccgctacgtgcagggcctcaagaaaaagaaggtcatcgtgatcccggtcggaatcgggccgcacgcaaatctgaagcagatccggctcatcgaaaagcaggccccagaaaacaaagcgtttgtgttgtcatccgttgacgaactggaacaacagcgcgacgagatcgtgagctatctctgcgatctggcacctgaggcaccgcccccaactctcccgcccgatatggctcaggtcaccgtgggtccaggcctcctgggcgtctccaccctgggcccgaagcgcaactccatggtgctggatgtggcgttcgtgctcgagggctctgacaagatcggggaagctgactttaatcgttcgaaggagtttatggaagaagtgatccagaggatggacgtgggtcaggactccatccacgtgaccgtcctgcaatactcgtacatggttacggtggaataccctttctccgaggcccagagcaagggggatatcctccagcgcgtgagagaaatccggtaccagggaggaaacaggaccaacaccggccttgcactgcgctacctctccgatcactcgttcttggtgagccagggtgaccgggagcaggcaccgaacctggtatacatggtgaccggtaacccagcatccgacgaaatcaagaggctgccaggggatatccaggtggtgccgattggagtgggaccgaacgccaacgtccaggagctggagagaatcggctggccaaacgccccgatcttgatccaggacttcgaaactctgccgcgggaagccccggacctggtgctgcagaggtgctgctcaggtgaaggacttcagatcccaacgttgtccccagcccctgattgtagccagccccttgacgtcattttgttgctcgacggatcctcatccttcccggctagctacttcgacgagatgaagtcttttgcaaaggcattcatctccaaagccaacatcgggccaagattgacccaagtctcagtcctccaatacggatcaatcacgaccatcgacgtcccatggaatgttgttcctgaaaaggcgcacctcctgtccctggttgatgtgatgcaaagagagggaggtccatcccagatcggagatgcactgggattcgccgtgcggtacctgacgtcggaaatgcacggtgcgcgcccaggggcctccaaagcggtcgtgatcctggtcaccgatgtgtcggtggactcagtggacgcggcggcagacgcagcccgctcaaaccgggtcaccgtgttccctattggaatcggagacagatacgatgctgcccaactcagaatcctcgccggacctgccggagatagcaacgtcgtgaaattgcaaaggatcgaagatctgccaaccatggttaccctcggcaacagcttcctccacaaactctgcagcggatttgtgcggatctgcatggacgaagatggaaatgagaaaagacccggggacgtctggaccctgccggatcagtgccatactgtcacttgccaaccggatggacaaactctcctgaagtcgcatagagtgaattgcgatcgggggctccgcccatcgtgtcctaactcacagtcgccggtgaaggtggaggaaacctgtggctgccggtggacttgcccatgcgtctgcactggatcttcgactaggcacattgtgactttcgatggacaaaacttcaagttgaccggttcgtgcagttacgtgctgttccagaacaaggagcaggacctggaggtgatcctccacaatggcgcttgctctccgggagcccggcagggctgtatgaagagcatcgaggtgaagcattccgctttgtcggttgaactgcatagcgacatggaggtcactgtgaatggaagattggtatctgtgccttatgtgggcggcaatatggaagtgaatgtctacggagcgatcatgcacgaagtcagattcaatcacctcggtcatatctttacgtttacgccgcaaaacaacgagttccaactccaactcagcccgaaaactttcgcctcgaaaacttacggtctgtgtggtatctgcgacgaaaatggtgctaacgactttatgctgagggacggaactgtgacgacggactggaaaacgctcgtgcaagagtggacggtgcagcgccccggacagacttgtcagccgattcttgaggagcaatgcctcgtgccagattcttcgcattgccaagtgctcttgctgccgctgttcgcagaatgccataaagtactggccccagcaaccttctatgccatttgccaacaggactcatgccaccaagaacaggtctgcgaggtgatcgcgtcttatgcccatctctgtcgcacgaatggcgtgtgcgtggactggagaacccccgacttctgcgcgatgtcatgcccgccgtcgctggtgtataatcactgcgaacatggatgtccgagacattgtgacgggaacgtgagctcatgcggcgaccacccgtcagaaggatgcttctgtcctcctgacaaagtgatgctggaagggtcctgcgtgccggaagaagcatgcactcagtgcatcggagaggacggagtgcaacatcaattcttggaagcatgggtgccggaccaccaaccgtgtcagatctgtacctgtctgtccggaagaaaagtgaactgcaccactcagccttgtccaaccgccaaggccccaacctgtggtttgtgcgaagtggcgcggctgcggcaaaacgcagatcagtgctgcccagaatacgagtgtgtgtgcgatcctgtgtcctgtgaccttccaccggtgcctcactgtgaacgcggactccagccgactctgactaaccccggagaatgccgaccgaactttacctgcgcttgccgcaaggaagagtgcaagcgcgtctcgccaccttcctgccctccacaccggctgccgaccctgcggaaaacgcaatgttgtgacgaatatgagtgtgcatgcaattgcgtcaatagcactgtctcctgcccgctgggatacctggcttcgactgccaccaacgactgcggctgtaccaccactacttgcctgccggataaagtctgcgtgcaccggtcgaccatctatccggtgggtcagttctgggaagagggatgtgatgtgtgtacctgcaccgacatggaagatgcagtgatgggactgcgcgtcgcccaatgctcccagaagccatgcgaggactcctgcaggtcgggatttacttacgtgttgcacgagggagaatgctgcggccggtgcctgccctcggcctgcgaagtcgtgaccggttcgccgcgcggtgactcgcaatcctcttggaagtcagtcgggtcacagtgggcctccccggagaacccgtgcctcatcaatgagtgcgtccgggtgaaggaagaagtgtttatccaacagcgcaatgtctcgtgtcctcagctcgaggtgccggtgtgcccgtcaggattccagctctcgtgcaagacttccgcgtgttgcccgtcgtgccgatgtgaacgcatggaagcctgcatgctcaatggcacggtgatcgggccaggtaagactgtcatgatcgatgtgtgcactacctgccgctgcatggtgcaggtcggtgttatctccggattcaaactcgaatgccgaaaaaccacctgtaatccttgtccgttgggatacaaggaagaaaacaacactggtgaatgttgtggcagatgcctcccgaccgcttgcaccatccagctgcggggagggcagatcatgaccctcaaacgggacgaaactctgcaggatgggtgcgacactcacttttgtaaggtgaatgagaggggagagtacttctgggaaaaaagagtgactgggtgtccgccgttcgacgaacacaagtgcctcgctgagggcggaaaaatcatgaaaatccccggaacttgttgcgacacctgtgaagaacccgagtgtaacgacatcactgcgcggcttcaatacgtgaaggtgggctcctgcaagtccgaggtggaagtggacattcactattgccaaggcaaatgcgcctcgaaagctatgtactccatcgacatcaacgatgtccaggaccagtgttcgtgctgctcaccaacccggaccgaacctatgcaggtggctctgcactgcaccaatggctccgtggtgtaccacgaagtgctcaacgcgatggagtgtaagtgctccccgcgcaagtgttctaaa

SEQ ID NO: 12476 - DNA, 8439 bp, Artificial Sequence
  derived and/or modified sequence
atgattccggccaggttcgccggggtcctgctagccctcgctctaatcttaccgggaacgctgtgtgcagaagggacgcgaggccgctcgtcaacagcccggtgtagcttgtttggatccgactttgtaaatacattcgatgggagtatgtatagttttgcagggtactgcagctacctactggcaggagggtgtcagaaacgatccttctccataattggagacttccagaatggcaaacgggttagcctcagtgtgtatttaggcgagttttttgacatacacctgtttgttaatggcaccgtgacacaaggggaccagcgcgtgtcgatgccctatgccagcaagggactatatttggagaccgaggccggctactacaagctgtcgggtgaagcctacggtttcgtggcgagaatcgacggctctggcaacttccaggtgctgctcagcgacagatacttcaacaagacctgtggattgtgtggcaactttaatatcttcgctgaagatgactttatgactcaggagggtaccctcacgtccgatccatacgactttgcaaattcatgggctcttagctctggtgagcaatggtgcgagagggcctcacccccaagtagttcatgtaatatttcatccggggagatgcagaaaggactttgggagcagtgccagctacttaaaagcactagtgtgttcgccagatgccacccccttgtagatcccgagccattcgtggctttgtgcgagaaaacgctatgcgagtgtgcaggcggtctagagtgcgcctgtcctgccttgctggaatacgctcggacctgcgcacaggaaggcatggtgctgtacggctggactgatcacagcgcatgctcacctgtgtgccccgccggaatggaataccgtcagtgcgtgagcccatgcgcgcgtacatgccaatctcttcatattaacgaaatgtgccaggaaaggtgtgttgacggatgctcttgccctgaagggcagctcctcgatgagggcttgtgtgtcgaaagtactgaatgtccatgtgtgcattcaggtaagcgctatcccccaggaacatccctatccagagattgtaacacttgcatttgccggaacagtcaatggatctgctctaacgaggaatgcccgggggagtgtctggtgactggacagtcacatttcaagagtttcgataacaggtattttaccttctcaggcatttgccagtacctgctcgctagggactgccaggaccacagcttcagcattgtaatcgagactgttcaatgtgcagacgatagggacgccgtttgtacgagatccgtcaccgttagattgcctggtcttcacaactccctggtgaaattgaaacacggagccggggttgctatggatgggcaagatgtgcaactgccgttgctaaaaggggacttgaggatccagcatacagtaactgcctcagtacgtctgagttacggagaggatctccagatggactgggacggccgaggaaggctactggtgaagctttccccggtgtacgctgggaaaacttgcgggctctgcggtaattataatggcaaccagggtgacgacttcttgaccccatcagggttagctgaacctagagtagaagattttggtaacgcatggaagctgcacggcgactgtcaagatctgcagaaacaacattcagatccatgcgcactaaatccgagaatgacaaggtttagcgaggaagcttgtgccgtgctcacaagtcctacttttgaagcgtgccaccgagccgtttcgcccttgccatacctacggaactgtcgttatgacgtctgtagctgtagcgacgggagggaatgcctgtgcggcgcactggcctcttatgccgcagcctgcgctggtcggggggtgcgcgttgcttggcgtgaacccggaaggtgcgaactgaattgtcctaagggccaggtatacctgcagtgtgggaccccatgtaatctgacgtgccgctcattatcctacccagacgaggagtgcaacgaggcctgcctggaaggttgtttttgtccacctggtctgtatatggacgaaagaggagattgcgtgcctaaggcccaatgcccgtgctattacgacggcgaaattttccagccagaggatatcttttctgatcaccataccatgtgctactgcgaggatggattcatgcactgcactatgagtggagtccctggatctctactccctgatgcagtcctgagctctcctctgagccatcgttccaagaggagtttgagctgtcgcccgcctatggtgaagctcgtctgccccgccgataacttacgtgccgaagggctggagtgtacaaagacttgtcaaaactatgatctggagtgtatgagcatggggtgcgtttcggggtgcctgtgccctcccggaatggtgagacatgagaaccgctgcgtcgccctggagagatgtccttgtttccaccagggcaaagagtacgcaccgggcgagaccgtcaaaatcgggtgcaatacatgcgtttgccaggatcgcaagtggaactgtaccgatcacgtgtgtgacgctacctgttcaactatcggtatggctcattacctgacatttgatgggctgaaatatctttttccaggcgaatgccagtacgtactcgtgcaagactactgcgggtccaaccctgggactttcaggattctggtcggaaataagggctgcagccacccttcggtgaagtgcaaaaagcgggtgactatactcgttgagggtggtgaaattgaactgttcgacggtgaagttaatgtgaaaagacccatgaaagatgagactcattttgaggtcgtcgaatccggccggtacattatcctgctgctgggaaaggcgctgagcgttgtctgggaccgtcatctgagtatctctgtggtgctgaaacaaacatatcaagaaaaagtttgcgggctttgcggcaatttcgacggaatacagaacaacgacctgacttcttctaatttgcaagtggaagaagatcccgtcgattttggaaacagctggaaagtcagctcgcagtgtgccgacacccggaaggttccactagattcgagcccagcaacctgccataacaatatcatgaagcagacaatggtggactccagttgtcggattctgacaagtgatgtctttcaggactgtaataaacttgtagatcctgaaccctacttggacgtctgtatatacgatacttgtagttgcgaaagcattggcgattgtgcttgcttttgtgatacaatcgccgcttatgctcacgtgtgtgcacagcacggaaaggtcgtgacctggcgcaccgccacactgtgcccgcaatcgtgtgaggagagaaacctgcgcgagaatggatacgaatgcgaatggcgttacaattcttgtgcgcccgcctgtcaggtaacctgccagcaccccgaacctctggcctgtccagtgcaatgcgttgaagggtgccatgcccactgtccgcctggtaaaatcctggacgagctgctgcaaacgtgtgtggacccagaagattgccccgtgtgcgaggtggccgggcgacgcttcgctagcgggaagaaggtgaccctgaatccgagtgatcccgaacattgccagatttgccattgcgatgtggtgaacctgacctgtgaggcttgtcaggaaccgggtggacttgtggttccaccaacagacgcgcctgtgtcaccaactacactatatgtagaggatatctccgagcctcccctccacgacttttactgtagtaggctgctcgatctggtctttctactggatggttcctctcggctgtctgaagccgaatttgaagtactgaaagccttcgttgttgacatgatggagcgcctccgaatttcccaaaagtgggtgagggtggccgtggtcgagtatcatgacggctcccacgcttatatagggctgaaagatagaaaaaggcctagcgagctgcggcgtatagcaagtcaggtcaaatacgccgggtcccaagtggcttcgacaagcgaggtgctcaagtacacactttttcagatcttcagcaaaatcgacaggcctgaagccagcagaattacgcttctgctgatggcaagtcaggagccgcaacgaatgtctcggaattttgtccgctatgtgcagggactgaagaagaaaaaagtgatagtgattcccgttgggatcggcccgcatgcgaacctcaagcaaatccgattaatagagaaacaggcccctgagaacaaagcttttgtgttgagctctgtggacgagttggaacagcagagagacgagattgtaagctacctttgcgatctggctccagaagccccaccgccgacactgccgcctgatatggcacaggtcacagtaggacctgggctgctgggagttagtactttgggtccgaagcggaactccatggttctggacgtggcctttgtcctcgaaggcagtgacaagataggcgaggctgacttcaaccggtcaaaggaattcatggaggaggtgattcagcgtatggacgtgggccaggactccattcacgtcacagtcctgcagtacagttacatggtaacagtcgaatacccattctctgaggcccagtcaaaaggcgacatcctgcagcgtgtccgggaaatcagataccaagggggcaatcgtacaaatacgggcctcgcactgcgatatctgagtgaccatagcttcctggtgagccagggggatagggaacaagcccccaacctcgtgtacatggtaactggaaatccggccagcgatgaaatcaagagactgcccggagatatacaagtcgtccctatcggagttgggccgaatgctaatgtgcaggaattggaacggatcggatggcctaacgctccaattttaatccaggacttcgaaacattgccgcgcgaagcacccgatttagtgctacagcgatgttgttctggagagggactgcagattcctaccctgtctccagctcctgactgctcccagcccctcgatgtgatactcctgctggatggttcctcatcctttcctgcaagctatttcgatgagatgaaatccttcgccaaggcattcatctcaaaagcgaacatcggccctaggctaacccaggtgagcgttctccagtacgggagcattacaacaatcgacgttccctggaatgttgtacccgagaaggctcatctgctgtccctcgtggatgtcatgcagcgggagggtggacccagccaaatcggagacgccttgggctttgccgtcagatacttgactagcgaaatgcatggcgccaggcctggagcctcgaaggccgtagtgattctggtcacggatgtgtctgtggatagcgtggacgcggctgctgacgctgcccgctccaatagagttaccgtgtttcccatcggtatcggagacaggtacgatgctgcccagttacgaatcttggccggccccgcgggggattccaacgtggtgaaacttcaacgcatagaggatctgccgacgatggtgaccctaggaaacagttttttgcataagctttgttccggattcgtaagaatctgcatggatgaggacgggaatgagaaacggccaggcgatgtgtggacactacctgaccaatgccacacagtcacctgccagcccgatggacagactctactgaagtctcacagagtaaactgtgataggggcctcagaccctcatgtccaaattcacagtcaccagtcaaggtggaggagacttgcggatgtcggtggacatgtccttgcgtatgcactggtagctccacccggcacatcgtgaccttcgatgggcagaactttaaactgacgggcagttgctcttacgtgctctttcagaacaaagagcaggatcttgaggttatacttcacaatggggcttgttcaccaggagcgaggcaaggctgcatgaagagtattgaggtcaaacattccgctctgagtgtggaactgcactcggatatggaagtgacggtcaatggcaggctcgtgtccgtgccatacgtaggcggtaacatggaagttaacgtatatggcgccattatgcatgaggtgaggttcaatcatctgggccacatattcacgtttacgccccagaacaacgaattccaactacagctttcgcccaaaacctttgcgagcaagacctacggcctgtgtgggatctgtgatgagaacggcgctaatgacttcatgttgcgtgatggaacagtcacaaccgattggaagaccttggtgcaggaatggacagtccagcgacctggccagacctgtcagcctatcctggaagagcagtgtctcgtgcccgacagcagccactgtcaggttctactgctacccctattcgccgaatgccataaggtactggcccccgccacattctatgcaatttgccagcaagattcctgtcatcaagagcaggtttgtgaggtgatcgcctcctacgctcatctatgtaggaccaacggggtgtgcgtggattggcggacacccgatttttgtgccatgagctgccccccctctttagtgtacaaccattgcgagcatggctgcccccggcattgcgacggaaatgtgagcagttgcggagaccaccctagcgaaggctgcttctgtcctcccgataaagtgatgttggagggctcttgcgtccctgaggaggcctgtactcagtgcattggcgaggatggcgtgcagcaccagttcctggaggcctgggtcccggatcaccagccgtgccagatctgtacctgtctatcggggcgcaaagtgaattgcaccacccagccatgccctacagcaaaagcccccacatgtggattgtgcgaagttgcccggctcagacagaatgctgaccaatgttgtccagagtacgagtgcgtgtgcgaccctgtttcttgtgatttgccaccagtgccccactgcgagagaggactccagcccacactcactaaccccggagaatgccgcccaaacttcacatgcgcctgccggaaggaggagtgtaagcgagtttcacctcctagctgtccaccgcaccgtttacctacccttcggaagactcagtgctgcgacgagtacgagtgcgcatgcaactgtgtaaacagcacggtgtcttgtccactgggctatctggcctctaccgcgactaatgattgcgggtgcacaaccacaacctgcctgcccgacaaagtttgtgttcacagatccacaatatatcctgtggggcagttttgggaggaggggtgtgacgtgtgtacctgtactgacatggaggacgctgtcatggggttaagggtggcacagtgcagccaaaagccttgcgaggacagttgcaggtcaggcttcacctacgtgcttcacgagggcgagtgctgcggaaggtgtctgccgtctgcctgtgaggtggttaccggtagtccccggggtgactcccagtcctcctggaagtcagtggggtctcaatgggccagtccagagaacccatgtctgataaacgagtgtgtgagagtcaaagaggaggtgtttattcaacagcgtaacgtctcctgtccccaactggaggttccagtgtgtccatccggttttcagctgtcatgcaagacatccgcctgttgtccgagctgccggtgtgaaaggatggaggcatgcatgctgaatggaacagtaattgggcccggtaaaacggtgatgatcgatgtctgcaccacttgtcgatgtatggtgcaagttggcgtcatcagcggtttcaagctcgagtgccggaaaacaacctgtaatccctgccctctgggatacaaagaagagaacaacaccggtgagtgttgcggcaggtgcttgcctacagcatgtacaatccaactcaggggaggacaaattatgacattgaagagggacgagacactccaagacgggtgtgatacacacttctgtaaggtgaacgaacgcggcgaatacttttgggaaaaacgcgtaaccggatgccctccatttgatgagcataagtgtctagcagaaggagggaaaatcatgaagattcccggaacctgttgcgatacgtgcgaggaacctgaatgtaatgatatcactgcacggctgcaatacgtgaaagtcggctcttgcaagagtgaagtcgaggtggatatccattattgccagggaaagtgcgccagtaaagccatgtatagcattgacatcaacgatgtgcaggatcagtgttcttgctgcagtccaacacggacagagcccatgcaggtggccttacactgtaccaacggctccgtggtgtatcatgaggttcttaatgccatggaatgcaagtgctctcctcggaagtgttcaaag

SEQ ID NO: 12477 - DNA, 8439 bp, Artificial Sequence
  derived and/or modified sequence
atgatccctgctaggttcgcaggggtgttgctggccctggccctcatcctgccaggcactttgtgcgcggaaggcactcgggggagatcatccacggctaggtgttctctgtttggctcggatttcgtgaacacctttgacggctctatgtattccttcgcggggtactgtagctacctactcgccgggggctgtcagaagaggtcattttcaatcattggcgacttccaaaacggaaagcgcgtgagtctctcggtgtatttaggtgagttcttcgatatccatttgtttgttaacggaactgtgacgcagggggaccagcgcgtgtccatgccctacgcttctaaaggcctgtatctcgaaaccgaggcagggtattacaagttatctggtgaagcatacggatttgtggcccgaatcgatgggagcggtaattttcaggtactgctctccgaccgttattttaacaaaacctgcgggctctgtggcaactttaatattttcgcagaggacgattttatgacccaagagggcactttaacgtctgacccctacgacttcgctaattcctgggccctgtcgtctggagagcagtggtgtgaaagagcatcacctcccagcagctcatgcaacatctcgtcaggtgagatgcagaagggactgtgggagcagtgccagctgcttaaatcaactagcgtattcgccaggtgtcacccactggttgatcccgagcctttcgtggccctgtgcgagaaaacgctgtgcgagtgcgccggcggtctggaatgcgcctgtcccgctttgctcgaatatgctcggacatgtgctcaggagggaatggtgctctacgggtggaccgaccactccgcatgctcaccagtgtgccctgccggtatggaataccgccagtgtgtgagcccatgtgcgaggacgtgccaatcgctgcatataaacgaaatgtgtcaggaaaggtgcgtggacggttgcagctgcccagagggacagctcctagacgaagggctttgtgtggaatctaccgaatgcccctgtgtccatagcggtaaaaggtacccaccaggaacaagtctgagtagagactgcaacacatgtatttgtcgaaacagccagtggatctgcagcaacgaagagtgtcccggggagtgcttagtgaccggacagtcccatttcaagtcctttgataatagatattttactttttctgggatctgccaatatctcctcgcacgagactgtcaagatcacagcttttctatcgtgatcgaaaccgtacagtgtgccgacgatcgagacgccgtctgtacccggagcgtgacggtgaggttaccaggcctccacaactccctggtgaagctgaaacatggcgctggagtggccatggacggccaagatgtgcagctgcccttgctgaaaggcgacctccggatccaacacacagtgaccgcctctgtcaggctctcctacggtgaggacctgcagatggactgggacgggagaggaagattattggtcaagttaagtccagtctatgccgggaagacctgtggactctgcgggaattacaatggcaatcagggagacgacttcttaacccccagtggactggccgagccccgagtggaagatttcggtaatgcctggaagctgcacggagattgtcaggacttacagaaacagcatagcgacccttgtgctttgaatccccgaatgacccggttctccgaagaagcttgcgccgtgctgacaagccctacgtttgaagcgtgccacagagccgtgtctccattgccatacctgaggaattgccggtacgatgtttgttcctgtagcgacgggagagagtgcttgtgtggcgccttagcctcctacgccgcggcatgcgcaggtcggggagtacgggtggcttggcgggagccaggtcggtgcgagttgaattgccctaagggtcaggtctacttgcagtgtggtacaccgtgtaacttgacctgccggagcttgtcttatcccgatgaggaatgtaatgaagcttgtctggaaggctgtttctgtccccctgggctgtacatggatgagaggggggattgtgtcccgaaagcccagtgtccttgctactacgatggcgagatattccagccggaagatattttttcagatcatcacacaatgtgctactgtgaggacggcttcatgcattgcaccatgagtggcgtaccaggctccctcttgcctgacgccgttttgagtagccctctgagccaccgatcaaagaggagcctgtcttgtaggcccccgatggtaaaactagtgtgcccggcagacaatctcagggcggaagggctggaatgcacaaagacatgccagaactacgatctggagtgtatgtctatggggtgcgtgagcggctgtctgtgcccacccggaatggtgcgccacgaaaaccggtgcgtcgcactagagaggtgtccctgttttcatcagggcaaggagtacgctcccggggagaccgtcaagataggatgcaatacctgcgtctgccaggacagaaagtggaactgcaccgaccacgtgtgtgacgcaacctgttctacaatagggatggcacattatctcacttttgatggattgaaatatctttttccaggtgagtgccaatacgtcctcgtccaggactactgcggctccaatccagggacgttccgtattctggtcggcaacaaaggctgtagccaccctagcgtaaagtgcaaaaaaagggttacaattctcgtggagggcggagaaattgagctcttcgatggcgaagtgaacgtcaagaggccgatgaaggacgaaacgcatttcgaggtggtggaatcaggccgctatatcatccttctgcttggcaaggcactgtcagtcgtgtgggatagacacctgtctataagcgtggtgctgaaacagacctaccaggagaaagtgtgcggtctgtgcgggaacttcgacggaatccagaataatgacctgacttcttccaacctccaggtggaggaggacccagtcgacttcgggaattcctggaaagtgagctctcaatgcgctgacacccgtaaagtgccactggacagctccccagctacctgtcacaacaatatcatgaagcagactatggtggatagcagctgtcgcatcctcaccagtgatgtcttccaggactgtaataaacttgtggatccagaaccctatttggatgtgtgtatctacgacacctgctcctgcgagagcattggggactgcgcatgcttttgtgataccatcgctgcgtacgctcatgtttgcgcccagcacgggaaagttgtgacatggcgcacagcgactctttgcccccagtcatgcgaggagaggaatctccgtgaaaatggctatgagtgcgagtggagatataacagttgcgccccggcttgtcaggtcacttgccagcaccctgagcccctcgcttgtcccgtccagtgcgtggagggctgccacgctcactgccctcctggcaaaatcctggacgagttattgcagacatgcgtggatcctgaggactgcccagtctgcgaagttgctggaaggcgtttcgcttccggtaagaaggtgaccctgaatccctctgaccctgagcattgccagatttgtcattgcgatgttgtgaacctgacgtgcgaagcctgtcaggagccagggggattagtggtgccccccacagatgcccccgtgtctcctaccactctctatgtggaggacatctctgaaccacccctgcacgatttttactgtagcaggctcttggatctcgttttcctcttggatggatccagcagactttccgaggccgagttcgaggtgctgaaggcatttgttgtggatatgatggagcgcctcagaatcagccagaagtgggttcgggttgctgtggtggagtaccacgacggctcacatgcctatatcggcctgaaagaccgcaaacgcccttctgagctgaggaggattgctagtcaggttaagtacgccggcagccaggtggcgtcaacatcggaggtcctgaaatacaccctgttccagattttttccaagattgatcggccggaggccagtagaatcaccctccttttgatggcctcacaggagccccagcgaatgtccaggaatttcgtgagatacgtgcagggcctcaagaagaagaaagtgatcgtcataccagtgggaatcggcccacacgcgaacctaaagcagatcaggttgatcgagaagcaggcccccgaaaataaggcctttgtgcttagcagcgttgacgagctggaacagcagagggatgagattgtgagctatttgtgtgacctggctcccgaggcgcccccgccgaccctccctccagatatggcccaagttaccgtcggacccggcctgttgggcgtctctaccctgggacccaaacgcaattctatggtcttggatgtggcgttcgttcttgaagggagtgataagatcggagaagccgacttcaaccggagcaaggaatttatggaggaggtgatacagcggatggacgtgggtcaggatagtatccatgtcacagtgcttcagtattcttatatggtgactgtcgaatatccatttagcgaagcccagtcgaagggagacattcttcagcgggtaagggagattcgatatcagggcgggaaccggaccaatactggcctcgcactgcggtatctgtccgatcactcttttctcgtgagccaaggcgatagggaacaagcaccaaatctggtttacatggtaaccggaaacccagcttcagatgagatcaaaaggctccccggagacatccaggttgtgccaatcggtgttgggcccaatgccaacgtgcaagaattggagcgaattggatggcctaacgcccctatactgatccaagacttcgagaccttgccccgggaggctcccgacctggtgctacagcgctgctgtagcggcgaaggacttcagatccccactttgtctcctgcaccagattgcagccagcctctggacgtgattctcctcttggatggtagtagtagcttcccagcttcttatttcgatgaaatgaagtcttttgccaaagcattcatcagtaaagcgaatatcgggccccgactgactcaggtgtcggttctccagtatggaagcattacaacaattgacgtcccttggaacgtcgtccccgagaaggcccatctactcagtctagtggacgtgatgcagcgcgaaggcggaccttcccagatcggagatgccctgggctttgccgtacggtatttaactagtgagatgcacggggctagacctggggcatccaaagccgtggtaatactggttaccgatgtttccgtagattccgtcgacgccgcagcagacgctgctagaagtaaccgggtgaccgtttttcctatcggaatcggagatagatacgacgccgcacaacttcggatcctggctggcccagcaggagactctaatgttgtgaaactgcagaggatagaggaccttcccacaatggtgaccctcgggaatagtttcttacataagctctgcagtgggtttgtgcgaatttgcatggatgaagacggcaatgagaaacgcccgggtgatgtgtggaccttgccagatcagtgtcacactgtcacgtgccaacctgatgggcagaccctcttaaagagtcatagagtgaactgtgaccgggggctccgaccgtcctgtcccaactcccagagtccagtgaaagtggaagaaacttgcggatgtcgttggacctgtccatgtgtgtgtacaggctctagcacgcgacatattgtcacatttgacggacaaaatttcaaactaactggctcttgcagctatgtgctgttccagaacaaagaacaggaccttgaggtgattcttcacaatggcgcctgtagtcctggggcgcgacagggatgtatgaaaagcatcgaagttaaacacagcgcactgagtgttgagctccatagtgatatggaggtgacagtgaacggtcggctcgttagtgtgccatacgtcgggggtaatatggaggtcaacgtgtatggagctatcatgcacgaggttcgattcaaccacctgggccacatcttcacctttaccccgcagaacaacgagtttcagctgcaactgagccccaagaccttcgccagtaagacttatggcttgtgcggtatctgtgacgaaaatggggcaaacgattttatgctgcgcgacggaactgtaacaaccgattggaaaaccctcgtccaggagtggaccgtgcaaagaccgggtcagacctgccagccaattctcgaagagcaatgcctggtccctgattcaagtcactgtcaggttctgctgttacccttgttcgcagaatgtcataaggtgctggctcccgcaacattctatgcaatttgtcagcaggatagttgtcatcaggagcaggtctgcgaggtaatagcctcttacgcacacctctgccggacaaacggcgtgtgcgtggattggcgaactcctgatttttgtgcaatgtcatgtccaccttccctcgtgtataatcactgcgagcatggctgcccccggcattgtgacggtaacgtcagctcatgtggcgatcatcccagcgagggatgtttctgtccaccagacaaagtaatgctggaaggcagctgtgtgcctgaggaagcttgcactcagtgcataggcgaggacggtgttcagcatcagttccttgaagcgtgggtgcccgaccatcaaccgtgccagatttgcacatgtctgtcaggtagaaaagttaactgtacaactcagccatgccctaccgctaaagcccccacttgcggactctgcgaggtcgcaaggctgcggcaaaacgccgatcagtgctgccccgaatatgagtgcgtatgcgatcccgtgtcctgcgacctgcctcccgttccgcactgcgagcgcggtctgcaaccaacactgactaacccaggggagtgtagacccaactttacttgtgcatgccgcaaggaagagtgcaaaagggtgtccccaccctcgtgcccaccccatcgcctaccgacactgcgcaagactcagtgctgtgatgagtacgaatgtgcctgcaattgtgtgaacagcacggtgtcgtgtcctctggggtacctcgcctccactgccacgaacgactgtggatgtacaactacgacatgtctgcctgacaaagtatgtgtccacagaagcacaatttatccagtgggccagttctgggaggagggctgcgacgtgtgtacgtgtaccgacatggaagatgctgtgatgggattaagggtagcacagtgttcgcagaagccgtgcgaggacagctgcaggagcggcttcacatacgtacttcacgagggagagtgctgcgggcgatgcctgcctagcgcctgtgaggtggtgactggttcccctcgcggcgactcacaaagcagttggaagtccgttggctcgcagtgggcatctccagaaaatccatgcctaatcaacgagtgtgtgcgcgtgaaggaggaggttttcatccaacagagaaatgtgtcatgtcctcaacttgaagttcccgtgtgtccttctggatttcagctctcttgcaaaactagcgcttgctgccccagctgccgatgtgaacggatggaggcgtgtatgctcaatggtaccgtcatcggccccggcaagacagtcatgatagacgtgtgcactacgtgccggtgcatggtgcaggtgggggtgataagcggcttcaagctcgaatgtcggaaaacgacatgtaacccgtgcccattgggttataaagaggaaaacaacacaggggaatgctgcggacggtgtctacccactgcatgcactatacagctaagaggaggccagatcatgacattaaagcgtgatgaaacattacaagatggatgcgacacgcacttctgcaaggtgaacgaacgaggagaatacttctgggaaaagcgcgtgacgggctgtccaccatttgatgaacataaatgcctcgctgagggcggcaaaatcatgaaaatcccaggcacttgctgtgacacatgtgaagagccagagtgtaacgacataaccgcacgactgcagtatgtcaaggttgggtcgtgcaaatcggaagtcgaggtggacatccattactgtcagggaaagtgtgcatctaaggccatgtattccatagacatcaacgacgtccaggatcagtgctcctgctgctctccaacaagaaccgaacctatgcaggtcgccttgcattgcacaaatggaagcgtggtgtaccatgaagttctgaacgcaatggagtgcaaatgcagtcccagaaagtgcagcaag

SEQ ID NO: 12478 - DNA, 8439 bp, Artificial Sequence
  derived and/or modified sequence
atgataccagcccgctttgcgggagttcttttggcccttgccctcattctccctggcaccctgtgtgcggagggtactcgcggacgatcctctaccgcaagatgctccctgttcggctccgatttcgtcaacacttttgatggttcgatgtacagctttgcagggtactgctcgtacctcctggcgggcgggtgtcagaagcggtcgttttcgatcattggagatttccagaacggaaagagagtctcgctgtcagtgtaccttggcgagtttttcgacatacatctgtttgtgaatgggactgtgactcaaggtgatcagcgcgtgtccatgccttacgcatccaaaggactctatcttgaaaccgaggctggatattacaagttgtcgggcgaagcctacgggttcgtagcaagaatagacggatccggcaacttccaggtgctgctcagcgatcgctactttaacaaaacttgcgggctttgcggaaactttaacatcttcgcagaggacgactttatgacgcaggagggtactttgacctccgatccatacgattttgcaaactcgtgggcgctgtcctcaggcgagcagtggtgtgaaagggcatcacccccatcatcatcctgcaacataagttcgggtgaaatgcaaaaggggctttgggaacaatgtcaactgcttaagtccacttctgtgtttgcaagatgtcatcctttggtggaccctgaaccctttgtggctctctgtgaaaagactttgtgtgaatgcgcaggaggtcttgaatgcgcctgccccgctttgcttgagtacgcgcgaacttgcgcacaagaaggaatggtcctttacgggtggacggaccactcagcttgcagccccgtttgtcccgcaggtatggagtacagacagtgtgtgtctccatgtgcccgaacttgccaaagcctgcatatcaacgagatgtgtcaggaacggtgtgtggatgggtgttcatgccctgaagggcaactcttggacgagggtctgtgtgtggagagtacggagtgcccatgcgtccactcgggaaagcggtacccccctggaacctcgctttcccgggactgcaacacctgcatttgtagaaattcgcagtggatttgttcgaacgaagagtgtccaggagagtgtctggtgaccggtcagtcacacttcaagtcgtttgacaacagatacttcactttttcaggtatatgtcaatacctcctcgcgcgcgattgtcaggaccatagctttagcattgtgatcgaaaccgtgcaatgtgcagatgaccgggacgcagtgtgcactcgatcagtcaccgttcgccttcctggcctgcataacagcctggtgaagctcaagcacggcgctggcgtcgccatggacggccaggacgttcaactgcccctgctcaagggcgatcttaggattcaacatacggttaccgcgagcgtgaggctttcctacggtgaagatctccaaatggactgggatggacgaggacggctcctggtgaaactttccccagtgtacgcagggaaaacctgtggtctgtgcggtaattacaacggaaatcagggtgatgatttcttgactccatcgggccttgcagagcccagagtggaagatttcggaaacgcatggaagctgcatggagactgtcaggatcttcaaaagcaacattcggatccgtgtgcactgaatccacgtatgacgagattttcagaagaagcatgtgcagtcctgacttcccctactttcgaagcatgtcatcgcgcagtctcaccgctgccatacctgcgaaattgtaggtacgacgtgtgtagctgtagcgatggaagagaatgtctgtgtggcgcgcttgcaagctacgcagcagcctgcgcaggacgtggcgttcgtgtggcatggagagagcctgggagatgtgaactgaactgtccaaagggacaagtgtaccttcaatgtggaactccctgcaacctgacctgcaggagcctgtcgtaccctgacgaagagtgtaacgaagcctgcttggaaggatgcttctgcccaccaggcctctacatggacgaacgtggagattgtgtgccgaaagcccaatgcccatgttattacgacggcgagattttccaaccagaagatatcttttcggaccatcatactatgtgctactgtgaggatggatttatgcattgcaccatgtcaggggtgcctggcagcctcttgcctgacgcagtcctgagttcacctctttctcaccgctcgaagagatccctttcttgtagacctcctatggtcaagctggtgtgtcccgcagacaaccttcgcgcagaagggttggaatgtactaaaacttgtcaaaactacgaccttgagtgcatgtcgatgggatgtgtgtcaggttgtttgtgtccacctggaatggtgcgccatgagaataggtgcgtggcacttgaacgatgtccctgttttcatcagggtaaggaatatgcccctggtgaaaccgtgaagattgggtgtaatacttgtgtgtgtcaggatagaaaatggaattgcactgaccatgtgtgtgatgcaacgtgttctactatagggatggcccactatcttacctttgacggactcaagtacctttttcctggtgaatgtcaatacgtgcttgtgcaagactattgcggatcaaaccccggaacttttaggatccttgtgggaaacaagggatgttcgcatccatccgtgaagtgcaagaagagagtgactatcctggtggaagggggcgagattgaacttttcgatggggaagtgaatgtgaagcgccctatgaaggacgaaacccatttcgaggtggtggagtcagggagatacattatccttcttcttggtaaggctctgtctgtggtgtgggatcggcatctcagcatcagcgtggtgctcaaacagacttaccaagaaaaagtctgtggactttgtgggaatttcgatggcattcagaataacgatctcacttcgtcgaacctgcaagtggaagaggatccggtggattttgggaatagctggaaggtttcatcccaatgtgcggatactaggaaggtgccactggatagtagccctgcaacgtgccacaataacatcatgaaacagaccatggtcgactcctcttgtcggatcctcacctcagatgtctttcaagattgtaataagttggtcgatccagaaccttacctggacgtgtgtatctacgatacttgcagctgcgaatcaattggagattgtgcctgtttttgtgataccattgctgcctacgcacatgtctgtgcccagcacggtaaggtcgtgacctggcggaccgcgaccctttgtcctcaatcatgcgaggaacggaacctcagagagaacggttatgaatgtgagtggcggtacaattcatgcgcaccagcatgtcaagtgacttgtcaacatcccgagcctctggcgtgcccggtgcagtgcgtggagggatgccatgcccattgccccccgggtaagatccttgatgaactgttgcagacttgtgtcgaccctgaggattgccctgtctgtgaggtcgccggtagacggtttgccagcggaaagaaggtgactctgaacccttcggatcctgagcattgccaaatttgtcattgcgacgtggtcaacctgacgtgtgaagcgtgtcaagaaccaggaggcctcgtagtgccacccactgacgcacctgtgagcccaacgaccctgtacgttgaagatatctcagagcctccccttcacgatttctattgttcccgtctcctggacctggtgtttctcctcgatggatccagccggctttcggaagcggagtttgaagtgcttaaggcctttgtggtcgacatgatggaaagactgcgtatttcacaaaagtgggtacgcgtcgcggtagtcgaataccatgatggttcccatgcatacataggtctgaaggataggaagcggccaagcgaattgagacgcatcgctagccaggtgaaatacgccggatcccaagtggcgtcgacctctgaagttctcaagtacacccttttccagattttctccaaaatagatcgaccagaggcttcacgtataacccttcttcttatggcctcgcaggaacctcaaagaatgtcgcggaactttgtgagatacgtccagggattgaagaagaaaaaggtgattgtgattccagtgggaataggacctcatgcaaatctgaagcaaattaggttgattgaaaaacaagccccagaaaacaaggcattcgtcctttcctcagtcgatgaactggaacaacaacgcgatgagatagtgagttacctttgcgacctggcacccgaagcgcccccacctacccttcctccagatatggcacaggtgactgtgggcccaggattgctgggtgtaagcactctgggcccgaagaggaactctatggtcctcgacgtggcatttgtcctcgaagggagcgacaaaattggagaagcagactttaaccgctcgaaggagttcatggaagaggtgattcagcgcatggacgtgggccaggactcgatacatgtgaccgtcctgcagtactcgtatatggtaactgtcgaatacccgtttagcgaagctcaatccaaaggggatatcctccagcgtgtgagggaaattaggtaccagggagggaacagaaccaacaccggcctggcacttaggtacttgagcgatcacagctttctcgtgtcacaaggcgatagagaacaagcacctaatcttgtgtacatggtgaccggtaacccagcatcggatgaaatcaagcgcctgcctggggacatccaggtggtgcctattggtgtcggcccaaacgcaaatgtccaggaactggagaggattgggtggcccaatgcaccaatcctgattcaagatttcgaaaccctgccccgtgaggcacctgatctggtgcttcaacggtgttgctcgggcgaaggcctgcaaatccctactttgtcacctgcacctgattgttctcaacctcttgacgtcatactgcttctggatggaagctcgtcatttcccgcatcgtactttgacgaaatgaagagcttcgcaaaggcatttatctcaaaagccaacatcggacccagactcactcaggtgtccgtcctgcaatacggatctatcaccacgatcgatgtcccctggaacgtcgtgcctgaaaaagcgcacctcctgagcctcgtggatgtgatgcaaagagagggtggtccttcccaaattggagatgcactgggatttgccgtcagatacctgacttcggaaatgcatggagcccgccctggcgcgtcgaaagcagtggtgattcttgtgaccgatgtgtcggtggacagcgtcgatgcagccgcagacgcagcaagatcgaaccgtgtcactgtattccccattggaatcggtgacaggtacgacgctgcacagctccggatcctggccgggcctgcaggtgatagcaatgtggttaagttgcaaagaattgaggatctgcctaccatggtgactcttggtaactcctttctgcacaagctgtgttcgggattcgtgcggatctgcatggatgaagatggaaatgagaagcggccaggggatgtctggaccttgcctgaccagtgtcacaccgtcacttgtcaaccagatggtcaaacgctcctcaaatcgcatagggtcaactgtgatcgcggactgcgaccgtcctgccctaactcacaatccccagtgaaggtggaagaaacctgtggatgtagatggacctgcccgtgtgtctgtactggttcgtccactcgccatattgtgacgttcgacggtcagaatttcaaacttaccggatcgtgctcttacgtgctttttcagaataaagaacaagatctggaggtgatcctgcacaatggtgcttgtagcccaggcgctagacagggatgcatgaaaagcatcgaagtcaagcattccgcactgagcgtggaactgcactcggatatggaagtgaccgtgaatggaaggctcgtctccgtgccatacgtcgggggcaacatggaagtaaacgtgtatggtgcgattatgcacgaagtgaggtttaatcatctcggacatatctttactttcactcctcaaaacaatgagtttcagcttcagctttccccaaagacgtttgcatccaaaacctacggactgtgtggtatttgtgacgaaaatggcgctaacgactttatgctgcgggatggaactgtgaccaccgactggaaaaccctggtgcaggagtggactgtccagaggcccggacaaacctgtcaacccatactggaggaacagtgtctggtccctgattcgtcccattgtcaggtgcttcttctccctctttttgcagaatgtcataaggtgctcgcaccggctaccttttacgcaatttgccagcaagattcctgtcaccaagaacaagtgtgcgaggtcattgcctcatacgcccacctttgtcgcaccaacggtgtctgtgttgattggagaaccccagacttctgtgcaatgtcgtgcccgccttccctcgtgtacaaccactgcgaacatgggtgtcctaggcactgcgatggtaacgtatcttcctgtggggatcaccccagcgaagggtgtttctgtccccctgacaaggtcatgctggaaggaagctgtgtccccgaggaagcatgtacgcagtgcattggagaggatggcgttcagcatcagtttctggaggcttgggtgcctgatcatcaaccatgccagatttgtacgtgcctctcagggagaaaagtgaattgtaccacccaaccatgtcctaccgcgaaggcgcctacttgtggcctctgcgaagtggcaagacttcgtcaaaacgcagatcaatgctgtcccgagtacgaatgcgtttgtgatcctgtgagctgtgacctccctccagtcccgcactgcgagcgcggcctgcaacccaccctgaccaacccaggtgaatgtagacctaacttcacctgcgcatgtcgaaaggaagagtgcaagcgggtgtccccgccctcctgtccgccgcatagactgccgactcttcgcaagactcagtgttgcgatgaatacgagtgtgcctgcaattgtgtgaacagcaccgtgagctgcccgctgggttacctcgcatccaccgcgactaacgattgcggatgtactaccaccacctgccttccagataaggtctgtgtgcaccgatccactatttaccccgtgggtcagttttgggaggaaggatgtgacgtttgcacttgtactgatatggaggatgccgtgatgggacttcgggtagcacagtgttcccagaagccttgtgaggatagctgtcgttctggattcacctacgtgctgcacgaaggagaatgctgcggacgttgcttgccatccgcatgtgaagtggtcaccgggtcaccacgcggcgactcgcaatcctcctggaaatccgtcggaagccaatgggcctcacctgaaaatccatgcctgattaacgagtgcgtccgagtgaaagaagaggtctttattcagcagcgaaacgtgtcgtgcccccagcttgaagtgccagtgtgcccaagcggctttcagcttagctgtaagacctccgcatgctgtccctcgtgcagatgtgaaaggatggaggcctgtatgcttaatggaaccgtgattggacctggtaagactgtgatgattgatgtctgcaccacgtgtcggtgcatggtgcaggttggtgtcatctcaggcttcaaactggaatgtagaaagaccacctgtaacccttgtccgctggggtacaaagaagagaacaataccggcgagtgttgtggacggtgccttcctacggcctgtaccatccaattgcggggaggacaaatcatgactctcaaacgggacgaaactcttcaggatggttgtgatacccatttttgtaaggtcaatgagaggggtgaatacttttgggaaaagcgcgtgaccggatgtcctccgtttgatgaacacaagtgtcttgccgaaggaggaaaaatcatgaagattcctggtacgtgttgtgacacctgtgaagagccagagtgcaacgatattaccgccagactgcaatacgtgaaggtcggctcgtgtaaatcggaagtcgaagtcgatattcattactgtcaagggaagtgcgctagcaaggcaatgtactcgatcgacattaacgatgtgcaagaccaatgctcctgttgctcaccaactagaaccgagcctatgcaagtggcactccattgtaccaatggatccgtggtttaccacgaagtgctcaacgccatggaatgtaaatgctcaccacgaaagtgttccaag

SEQ ID NO: 12479 - DNA, 8439 bp, Artificial Sequence
  derived and/or modified sequence
atgatcccagctcgctttgctggggtgctgctggcccttgcgctgatcctgccgggaactttgtgcgcagagggtacccgcgggcgttcatcgaccgcgcgctgttccctgttcggctcagacttcgtgaataccttcgacggatccatgtactcattcgcgggttactgtagctacctcttggccggaggatgccaaaagcggtccttctcgattatcggagatttccagaacggcaagcgcgtctccctgtccgtctaccttggtgaattcttcgacatccacctctttgtgaatggaaccgtgacccaaggcgaccagcgggtgtcgatgccgtacgccagcaagggcctctacctggaaaccgaagccggatactacaagctgtcaggagaagcgtacggattcgtggcgcggatagacggaagcggcaacttccaagtgctcctgtccgaccgctacttcaacaagacttgcggcctgtgcgggaactttaacatcttcgccgaggacgacttcatgacccaggaaggaactctgacctcagatccttacgactttgccaactcttgggcactgtcctccggcgaacaatggtgcgaacgggcctcaccgccgtcctcctcctgcaacatttcctctggcgaaatgcagaagggactctgggagcaatgccaactgctgaagtcgaccagtgtattcgccagatgccacccgctggttgatccggaaccattcgtggccctgtgcgaaaagacgctgtgcgagtgtgcgggaggactggagtgtgcctgcccggccctcctggagtacgcaagaacctgcgcccaagagggcatggtgctgtacggatggactgaccattcggcgtgctcgcccgtttgtccggctggaatggagtatcgccagtgcgtgagcccttgcgcgcgcacgtgccagtccctccacatcaacgaaatgtgtcaggagagatgcgtggacggctgctcctgcccggagggacagctcctggacgagggactgtgcgtcgaaagcactgaatgcccgtgcgttcatagcggcaagaggtatccgccgggaacctcactctcgagagactgtaacacgtgcatctgccgcaatagccagtggatctgctccaacgaggaatgtccgggcgaatgtctcgtcactgggcagtcccacttcaagtcgttcgacaatagatacttcactttcagcggaatttgccaatacctcctggcaagagattgccaggatcatagcttcagtatcgtcatcgagactgtgcaatgcgccgacgatagagatgcagtctgcactcgctcggtgaccgtccggctcccgggattgcacaactcgctggtcaagctcaagcacggagcaggggttgctatggacggccaggatgtgcagctgccactcctgaagggagatctgcgcatacaacatactgtgactgcgtcggtgcggctctcgtacggcgaagatctgcagatggattgggacggacgcggtcgccttctggttaagctgagccccgtgtacgccggtaaaacctgtggcctctgcggtaattacaatggaaaccaaggggacgattttcttaccccttcgggattggcagagccgcgggtggaggatttcggaaacgcatggaaactccacggagactgtcaggacctgcaaaaacaacattcagacccatgcgccttgaacccccgcatgactcggttctcggaggaagcatgtgcggtgctgacttccccgactttcgaagcgtgccaccgcgcagtcagcccgctgccgtacctgagaaattgccggtacgacgtctgctcgtgcagcgatgggagggagtgcctgtgcggggcattggcgtcctacgcggctgcgtgtgcaggcagaggagtgcgggtggcttggcgagagcctggaaggtgcgagctgaattgccctaagggacaggtctacctccagtgcggcactccgtgtaatctcacttgtcgcagcctgtcatacccggatgaagaatgcaacgaggcatgcctggaaggatgcttttgccctccagggctgtacatggacgaacggggagactgcgtgccgaaggcgcagtgtccgtgctactacgacggagagatcttccagccggaggacatcttctcggatcaccatacgatgtgctactgtgaggatggatttatgcactgtaccatgtcgggagtaccgggaagtctcctccccgacgcggtgctgtcaagtccattgagccatcgttctaagcggtcgctttcatgtcgcccgcccatggtgaagctggtgtgcccagccgacaacctgagggcggaaggtttggaatgtaccaagacttgccaaaactacgatcttgaatgcatgtccatgggatgcgtctcgggatgcttgtgcccgccgggaatggtccggcatgagaatcggtgcgtggccctcgaacgctgcccatgcttccatcaaggaaaggagtacgcgccgggggagacggtgaaaattggctgcaacacttgcgtgtgccaggaccgcaaatggaattgcaccgaccacgtgtgtgatgcgacgtgctccactatcggaatggcccattacttgacttttgacggtctgaagtacctgttcccgggtgaatgtcagtacgtcctggtgcaggactactgtgggtccaatccgggaaccttcagaatccttgtgggcaacaagggatgttcacacccgtcagtcaaatgcaagaagagggtgaccatcctcgtcgaaggcggggagatcgaactgtttgacggagaagtgaacgtgaagcggccaatgaaggatgaaacgcacttcgaggttgtggaatcagggcgctacatcatccttctccttggaaaagcgctctccgtcgtgtgggatcgacatctctcgatcagcgtggtccttaagcagacttaccaggaaaaggtctgtgggctgtgcggtaactttgacggcattcagaataacgacctcactagctcgaaccttcaggtagaggaggacccagtggatttcggcaactcgtggaaggtgagctcacaatgtgccgataccagaaaggttccgctggactcgtcacccgcaacctgccacaacaatatcatgaagcaaactatggtggactcgagctgcaggatcctcacctcggacgtttttcaggattgcaataagctcgtagatcccgaaccttacctggatgtttgcatttacgacacttgctcctgcgaatcaatcggagactgcgcttgtttctgcgatacgatcgccgcgtatgctcatgtatgtgcccaacacggaaaggtggtgacctggcggactgccactctgtgtccgcaatcctgcgaggaacggaatcttagagaaaatggttacgaatgcgaatggcggtacaactcatgtgcccccgcctgtcaagttacctgccagcacccagagcccctggcttgccccgtgcagtgtgtggaaggatgccacgcccactgccctccgggaaagatccttgacgagctcttgcagacgtgtgttgaccctgaggattgtccagtttgcgaggtggccggtagacgcttcgcctctggaaagaaagtgactctgaatccgtccgaccctgagcattgtcagatttgccactgtgacgtggtcaatctcacctgcgaagcctgccaagagcccggaggacttgtcgtcccgccaactgacgctccagtgtcccctactaccctgtatgtggaggacatctccgagccgccgttgcatgacttctactgctcgcggctgctcgatctggtttttctgctggacgggtcctctaggctgtcagaagccgagttcgaggttctcaaggcgttcgtggtggatatgatggagcgtctcagaatctcgcaaaaatgggttagagtcgccgttgtggagtaccacgacggaagccacgcttacatcggccttaaagacagaaagcgacctagcgaacttagaaggatcgcctcacaagtgaagtacgccggttcgcaggtggcgtcaactagcgaggtgctcaaatacaccttgttccagatcttttcaaagatcgatcgcccagaagcctcgcgcatcactctgctcctgatggcatcacaggagccgcagcgcatgtctaggaacttcgtccggtacgtccagggcctcaagaaaaagaaggtcatcgtcatcccggtcggcatcggcccacatgctaacctgaagcaaatcagacttatcgagaagcaggcgcccgaaaacaaagcgtttgtgcttagttcagtggacgagctcgaacaacaacgcgacgaaatcgtgagctatctgtgcgatttggcgccggaagcaccaccgccgactctcccgcctgacatggcacaggtgaccgtgggacctgggttgttgggggtaagcaccctgggaccaaaacggaactcgatggtcctggacgtggcgtttgtcctggagggctccgacaagatcggggaggcagacttcaatcgctcaaaggaattcatggaagaagtgatccagcggatggatgtgggccaggattcgattcacgtgaccgtgctgcagtactcctacatggtgaccgtggaatacccgttttccgaagctcaatcaaagggcgacatattgcagcgcgtgagagagatccggtaccaggggggaaacagaaccaatacgggattggctctccgctacctgtctgatcactccttcctggtgtcccagggcgaccgagaacaagcaccaaatcttgtgtatatggtgacggggaacccggcaagcgatgagatcaaacgcctgccgggagatatccaagtcgtgccaatcggtgtggggcctaacgcgaatgtgcaagagctggagaggattggatggccaaatgccccaatccttatccaggacttcgagacgctgccgcgcgaagccccagatctggtgctgcagcggtgttgctcgggcgaggggctccaaatcccgactctgtctccggccccggattgctcgcagccactggacgtgatcctcctcctggacggatcgtcaagtttcccagcgagctacttcgatgagatgaagagtttcgcaaaggccttcatctccaaggctaacattggacctcggctcactcaggtgtccgtcctgcagtacggatcgataaccactatcgatgtgccatggaacgtggtgccggaaaaggcccacctgttgtccctggtggacgtgatgcaacgcgaaggcggaccatctcagatcggagacgccctgggattcgcagtgcggtacctgacgtcagagatgcacggagcgcggcctggggcgtccaaggcggtcgtcatcctcgtgaccgacgtctcggtcgactccgtcgacgccgccgccgatgctgccagatcaaaccgcgtgacggtgttcccgattggcattggcgatcggtacgacgccgcccaactgcgcattctcgccgggcccgccggagattccaacgtggtgaagctccagaggattgaggatctgccaaccatggtgaccctcggaaactccttcctgcacaaactctgttcaggatttgtcagaatctgcatggatgaagatggaaatgagaagcgacctggagacgtgtggactctgccggaccagtgccacacggtgacctgccaaccggacggccaaaccctcctgaagtcccatcgggtaaattgcgatcgcggactgcggcccagctgtcccaattcgcagagccccgtgaaagtcgaggaaacttgcgggtgccgctggacttgtccctgcgtgtgcactggaagctctactaggcacatcgtcaccttcgatggacagaacttcaaactgactggctcatgctcctacgtgctctttcaaaacaaagagcaagatctggaagtgattctccacaacggggcctgtagcccaggcgccagacagggatgtatgaaatctatcgaagtgaaacattccgccctgtccgtggaacttcactcagacatggaggtgactgtcaatggccgcctggtgtcggtaccgtacgtcggcggaaacatggaagtcaacgtctacggggccatcatgcacgaagtgagattcaaccacctgggacatatcttcaccttcactccgcagaacaacgagtttcagctgcagctctcgcctaaaaccttcgcgagcaagacctatgggctttgcggaatctgtgatgagaacggcgctaatgacttcatgctccgcgatgggaccgtgacgaccgattggaaaactctggtgcaggaatggaccgtgcagcggccaggacagacctgtcagcccatccttgaggaacagtgcttggtgccagactcgtcacactgccaagttctgctgctccctttgtttgcagaatgccacaaagtcctcgctccggcgaccttctacgccatatgccagcaggacagctgtcaccaggaacaagtctgcgaggtgatcgcctcgtacgcccacctgtgccggaccaacggtgtgtgcgtggactggcggaccccggacttttgcgctatgtcctgcccgccgtcgttggtctacaaccattgcgaacatggctgccctaggcattgtgacggtaacgtgagctcctgcggtgaccatccaagcgaaggatgcttctgtccaccggataaagtcatgctggaggggtcctgcgtgcctgaggaggcatgtacccagtgtatcggcgaggacggcgtgcaacatcagttcctggaagcctgggtcccagatcaccagccgtgccagatctgtacctgtctgtcgggcagaaaagtgaactgcacgacccaaccttgccctactgcaaaagcccccacctgcggactgtgcgaagttgctcgcctcaggcaaaacgcagaccaatgctgcccggaatacgaatgtgtctgcgacccggtgtcgtgcgaccttccacccgtgccacactgcgagcgtggcttgcagccgactctcacgaatcctggtgaatgcaggccgaacttcacctgtgcttgtcggaaagaagaatgcaagcgcgtgtcacctccatcatgtccgccccatcggctgcctaccctgcgtaagactcagtgctgcgacgaatatgaatgcgcttgcaattgcgtgaattcgaccgtgtcttgccccttgggttacctcgcgtccactgcgaccaatgattgtggttgtactactactacctgcctcccagataaagtgtgtgtgcaccgctccaccatctacccagttgggcaattctgggaagagggatgcgacgtgtgcacttgtaccgatatggaggacgcagtcatgggactgcgcgtcgcacagtgcagccagaagccttgcgaagattcttgcaggagcggttttacttacgtgctgcacgagggcgaatgctgcggtaggtgtctgccttccgcctgtgaggtcgtgaccggaagcccccgcggagactcccagtcctcgtggaagtcggtcggatcacagtgggccagcccggaaaacccctgtttgatcaacgagtgcgtgcgcgtcaaagaagaagtgttcatccagcaacgcaacgtcagctgcccgcaactcgaagtgcctgtgtgcccatccggttttcagctctcgtgcaaaacttcggcgtgctgcccttcatgcagatgcgagcgcatggaagcatgtatgctgaacggaactgtcatcggtcccggaaagactgtgatgatcgacgtgtgtactacctgtcggtgcatggtgcaagtgggagtgatctccggctttaagctggaatgccggaaaaccacctgcaatccatgcccgctcggatacaaggaagagaacaacaccggggagtgttgtgggcggtgtctgccaaccgcgtgcactatccagctgcgaggaggtcagataatgaccctgaaacgtgatgaaacccttcaagatggttgcgatacccacttctgcaaggtgaacgagcggggagaatacttctgggagaagcgcgtcactggttgccctccgtttgacgagcacaagtgcctcgcagaaggaggcaagattatgaagatcccgggtacctgctgtgacacctgcgaagaaccggaatgtaatgacatcaccgcaaggctgcagtacgtcaaggtgggctcgtgcaagagcgaagtcgaagtcgatatccattactgccagggcaaatgcgcttcaaaggctatgtattcgattgacatcaatgatgtgcaggatcagtgcagctgctgctcacctactcggactgaaccgatgcaagtggccctccattgtactaatggatcggtggtctaccatgaggtcctgaacgctatggaatgtaagtgctcgccacgaaagtgctccaaa

SEQ ID NO: 12480 - DNA, 8439 bp, Artificial Sequence
  derived and/or modified sequence
atgatcccagccaggttcgcgggggttctcctagccctcgccctcatcctgcctggaacactctgtgccgaagggacacgagggcggtcttccacagcccggtgttcactatttggatctgactttgtaaatacatttgatgggagtatgtattcctttgcaggatattgtagttatctcctggcaggagggtgtcagaaaagatctttttccatcatcggagattttcagaacggaaaaagggtctccttatcagtctatctgggagagtttttcgatatacacctctttgtgaacggaacagtgactcagggagatcagcgggtgagtatgccatacgctagtaaagggctgtatctggaaactgaagcagggtattataaactatctggagaagcttacggattcgtagcacgaattgatggaagtgggaatttccaggtactgctatcagatcggtattttaacaaaacatgcggactttgcgggaacttcaatatatttgcagaagatgattttatgacacaggaagggacactcactagtgatccctacgatttcgccaattcatgggcattgtcttccggggaacagtggtgcgaacgagcctcccccccctcctcctcatgtaatatatcttctggagaaatgcagaaagggctttgggaacagtgtcagctgctaaaatctacgtcagtctttgccaggtgtcaccctttagtagaccccgaaccattcgttgctctttgcgaaaaaacactctgtgaatgtgcaggagggctagaatgtgcttgccccgccctgctcgaatatgccaggacatgtgcacaagaaggaatggtgttgtacggatggacagatcattccgcatgttcccctgtctgtcccgctgggatggagtaccgacagtgcgttagtccttgtgcaaggacatgtcagagtctgcatataaatgaaatgtgccaggagcgatgtgtagacggatgcagttgtcctgagggacagctcctcgacgagggactatgtgtagagtctactgaatgtccttgcgtccactctggaaaacgatatcctcccggaacatcactctctcgagattgtaacacatgcatttgtaggaactctcagtggatctgttctaacgaggagtgccctggagaatgtctggtgacaggacagtctcattttaagagttttgataacagatatttcacattttccggaatatgtcagtatcttctcgctcgagattgtcaggatcattcgttctctatcgttattgaaacagtgcagtgtgctgatgatcgggatgccgtgtgtactcgctcagtgacagtacgactcccaggattacataacagtctggtaaaactgaagcatggagctggagtcgccatggatggacaggatgtccagctccctctactgaaaggggatttaaggatacagcatactgtgacagctagtgtgagattgtcgtacggggaagatttacagatggactgggatggaaggggaaggctgcttgtgaaattgtcacctgtgtatgctggaaaaacatgcgggctgtgtgggaattacaatgggaaccagggagacgattttctgacaccttctgggctcgccgaacctagagtggaagattttggaaacgcctggaaactccacggagattgtcaagatctgcagaagcagcatagtgatccttgtgctctgaatcctcggatgacgcgatttagtgaagaagcctgtgccgtgctgactagtcctacattcgaagcctgtcatagggctgtttctccacttccttacctgcgaaattgccgatatgatgtctgttcttgttcagacgggcgagaatgtctctgcggggccctcgcatcctatgctgccgcttgtgccgggcggggggtacgcgtcgcatggcgggaaccaggacgatgcgaacttaattgccctaaaggacaggtgtatctacagtgcgggactccgtgcaatctcacgtgtagaagtctctcataccctgatgaggagtgcaatgaagcttgtctggaagggtgtttctgtccacctggactatacatggatgaacgcggggattgtgtgcccaaagcacaatgtccctgctactatgatggagaaatctttcagcccgaagatatcttctcagatcaccatacaatgtgttattgtgaagatgggttcatgcactgtactatgtccggggtccctgggtcgcttcttccagatgccgtgctgagtagtccactctcccacagatcaaaacggtctctcagttgccggcctccaatggtgaaattagtctgtccggccgacaatctgcgagctgaggggctggaatgcactaaaacatgtcagaattatgatcttgaatgcatgtccatggggtgtgtgagtggatgtctctgtccacctgggatggttaggcatgaaaatcggtgcgtggcactggaacggtgtccctgttttcatcagggaaaagaatatgccccgggggaaacagtgaaaatagggtgtaacacttgtgtgtgtcaggatcggaaatggaactgtacagatcatgtttgcgatgccacttgttctactattggaatggcccattatctcacttttgatggactaaagtatctctttcctggagaatgccagtatgttttagttcaggactattgcggatctaatcctggaactttcagaatactcgttggaaacaaagggtgtagtcatccttcggtaaagtgcaagaaacgggtgactattcttgtggagggaggagaaatagaacttttcgatggggaagtgaatgtgaaacgacccatgaaggatgagactcattttgaagtagtcgaatctgggcggtatattattctactcttgggaaaagctttgtccgttgtttgggataggcatctgtctatctcagtggtcttaaaacagacttatcaggaaaaagtgtgcgggttatgtgggaactttgatggaattcagaacaatgatctcacttcgtcaaatttacaggttgaggaggatcctgtagacttcggaaactcctggaaagtatcttctcagtgtgccgatactaggaaagtcccactggatagttcacccgctacatgccataataacatcatgaaacagacaatggttgattcttcttgtagaatcctcacttctgatgtattccaggactgcaataaactagtcgatcctgagccatatcttgatgtgtgcatctacgatacttgttcctgcgaatcaatcggggattgtgcctgtttctgtgatactattgcagcctatgcccacgtgtgtgctcagcacggaaaagtagtaacatggagaacagcgactctgtgtccacaatcgtgtgaagaacgcaacctgcgggaaaacggatacgaatgcgagtggagatacaacagttgcgctcctgcctgccaggtgacgtgccagcatcccgagcctctcgcatgtcccgtccagtgtgtagaggggtgtcacgcccattgtccccctgggaaaatcctggacgaactactacaaacttgcgtagacccagaagactgccccgtttgcgaagtagctgggcgccgcttcgcctctgggaaaaaagtcacacttaatccttctgatcccgaacattgccagatctgccactgtgatgtggtcaatctcacatgtgaggcctgtcaggaaccaggggggctagtggttccccctacagatgcccctgtatcgcctacaactttatatgtggaggatatttctgaaccccccctccacgatttctattgctctagactactggatctcgttttcttgctggatgggtcttctcgcctgtcagaagcggagtttgaagtgctcaaggcattcgttgtggatatgatggaacggctcaggatatcgcagaaatgggttcgggtggccgtggtagaatatcacgatggaagtcatgcctacatcgggctgaaagataggaagcggccatcagagttgcggaggattgcatcacaagtgaaatatgccggatctcaggtcgcctctacgtccgaagtcttgaaatacactttgttccagatattcagtaaaatagaccggcccgaagcttctcgcatcactctgcttctcatggcatcccaggaacctcagagaatgtctcgaaatttcgtgcggtacgttcagggactcaaaaaaaagaaagtgatcgttattccagttggaatcggacctcacgctaatttgaagcaaatccgactaatcgaaaaacaggcccctgagaataaagcctttgtgctgtcctcagtggatgaattagaacagcagagggatgaaatcgtatcttatctctgcgaccttgccccagaagcgccacctcccacactgcccccagacatggcacaggtgactgtgggacccgggctgttgggggtgagtactctcgggcctaagcgtaattccatggtgctggatgtggcgttcgtactggaaggatccgataaaatcggagaagcagattttaaccggtccaaagaatttatggaggaggttattcagcggatggacgtgggacaggatagtatacacgtaacagtactgcagtattcatacatggtaacagtagaatatcctttctcagaagctcagtctaaaggggatatacttcagcgcgtgcgggaaatccgctatcagggagggaaccggacaaatacaggactggctttacgatatctgtctgatcattccttcctggtctcccagggagatagagagcaggccccaaatctcgtgtacatggtgactgggaatccagcatctgatgaaatcaaacgactccccggggatatccaggtcgtaccaataggggttggacccaacgcgaatgtccaggaactggagcgaatcgggtggcctaatgctcctatactaatacaggatttcgaaacactacctagagaagcccccgatctcgtccttcagagatgttgttctggggaagggcttcagatccctactctgagtccagctcctgattgttctcagccccttgatgtaatcctgctcctcgatgggtcatcttcctttcccgcatcctacttcgatgagatgaaatcttttgcaaaagctttcatcagtaaagctaacataggaccccgactcacacaggtatctgttctgcagtatggatctataacaactattgatgtcccatggaatgtggtgccagaaaaagcccacctcttgagtctcgtggatgtgatgcaaagagaaggggggccttcccagataggagacgccctagggttcgctgttcgctatctgacttctgagatgcatggggcacggcctggggcatccaaagccgtggtgatcttggtcacagatgtgagtgttgattcggtagatgccgcagcagatgccgctaggagtaatcgcgtcacagtctttcccataggaatcggagatagatatgatgctgcacagttgaggatcctcgccgggcccgccggggacagtaatgtcgtgaagcttcagcgaatcgaagatctgcctacgatggtaacattggggaactcatttctgcacaaactctgctcaggattcgtcaggatatgtatggacgaagatgggaatgaaaaacgaccaggagacgtttggactctgcccgaccagtgtcatactgtgacttgccagcccgacgggcagactctcctaaaatcacatagggtcaattgtgatcgggggctcaggccaagttgccctaactcacagtccccagtaaaagtcgaagaaacttgtggatgtagatggacatgtccctgtgtttgtacaggaagttctacaagacatattgtgactttcgacggacagaattttaaactcacagggtcttgctcatatgtgctgtttcagaataaagaacaggatttagaggtaatcttgcacaacggagcatgctccccaggagctaggcagggatgcatgaaaagtatcgaggtgaaacactctgcactgagtgtcgagctacattctgatatggaggtgacagttaatggaaggctggtgagtgtaccctatgtaggggggaatatggaggtgaacgtttatggggctattatgcatgaagtccgcttcaaccaccttgggcatatctttacttttactccccagaataacgagtttcagctgcagctctctcctaagacgtttgcctcaaagacttatgggctctgcggaatttgtgatgaaaacggggcaaacgatttcatgctccgggacggaactgttacaacagattggaaaactcttgtacaagaatggacagtgcagagacccggacagacttgccagcctatcctcgaagaacagtgtctcgttccagatagttcccattgtcaggtgctcctgctaccactttttgcggaatgccacaaagtgctggcccccgcaactttttacgccatctgtcagcaggactcatgccatcaggaacaggtttgtgaagttatcgcctcctatgcccacctttgtaggactaatggggtttgtgttgattggagaacacctgacttttgtgctatgtcctgtccaccttccctagtgtacaaccattgcgaacatgggtgccctcgacactgcgacgggaatgtctcctcttgtggagatcacccatccgaaggatgcttttgtcccccagataaggtaatgcttgaaggatcttgtgtgccagaagaggcctgtacacagtgtattggagaagacggggtccagcatcagttcctcgaagcttgggtgcccgatcatcagccttgtcagatatgcacgtgtctatccgggaggaaagttaactgcactacacagccttgccccactgccaaagcccctacttgtgggctctgtgaagtcgcaaggctcagacagaacgcagatcagtgctgcccagaatacgaatgtgtctgcgatccagtttcctgtgatttacctcctgtgcctcactgcgaaagggggcttcagcccactctgactaaccccggagaatgtagaccaaatttcacatgtgcctgccggaaagaagaatgtaaaagagtctctcctcccagttgcccccctcatagattgcctactcttcggaaaacacagtgttgtgatgaatacgaatgcgcctgcaactgtgtaaattctacagtgtcatgcccactgggatatctcgcttctacagcgacaaacgattgcgggtgcacaacgactacttgtctccctgataaagtgtgtgtccaccggtcaactatttatcctgtggggcaattttgggaagaaggatgcgatgtttgtacttgcactgatatggaagatgcagtgatgggattacgtgtagctcagtgttctcagaaaccctgcgaagattcctgtagaagtggatttacatacgtcctgcacgaaggggagtgctgtgggagatgcctgccttctgcttgtgaagtggtgacagggtccccaagaggagattctcagtctagttggaagtcggtggggagtcagtgggcatcccccgagaacccatgcctaattaatgaatgtgtgagggtcaaggaagaagtatttatccagcagcgcaacgtgtcttgtccccagttagaagtacctgtatgtccttccgggttccagcttagttgtaaaacttctgcctgctgtcccagttgcagatgcgagagaatggaggcgtgtatgcttaacggaactgtgatcgggcctgggaagacagtaatgatcgatgtctgtacaacatgccgctgtatggtccaagtgggggttatctcagggtttaaactggaatgcaggaaaactacatgtaacccatgccccttagggtataaagaagagaataacacaggggaatgttgcggacggtgcctgcccactgcctgtactatacagctcaggggggggcagatcatgactctcaaacgcgatgaaactcttcaagacgggtgcgatactcatttttgcaaagtgaatgaaaggggagaatacttttgggagaaaagggtgactgggtgtcctcctttcgatgaacataagtgtcttgcagagggagggaaaataatgaaaatcccgggaacttgctgcgatacatgcgaagaaccagaatgcaacgatattacagcgcgcctacagtacgtgaaggttggatcttgcaaatctgaggttgaagtggatatacattactgccagggaaaatgtgcttcaaaagccatgtacagtatagatatcaatgatgttcaggatcagtgctcctgttgctctcctacacggactgaaccaatgcaagttgccctccactgtactaacgggtctgtagtttatcacgaagtgcttaacgccatggaatgcaaatgctcaccaaggaaatgctctaaa
